United States Patent Application Publication US 2018/0305689 A1 - sequence listing, part 105

SEQ ID NO: 1545866 - RNA, 19 nt, Artificial Sequence
  Description of Artificial Sequence: Synthetic oligonucleotide
  Sense strand starting at position 2361 of SEQ ID NO: 1245220
uuaggaagugugugaugaa

SEQ ID NO: 1545867 - RNA, 19 nt, Artificial Sequence
  Description of Artificial Sequence: Synthetic oligonucleotide
  Antisense strand to SEQ ID NO: 1545866
uucaucacacacuuccuaa

SEQ ID NO: 1545868 - RNA, 19 nt, Artificial Sequence
  Description of Artificial Sequence: Synthetic oligonucleotide
  Sense strand starting at position 2563 of SEQ ID NO: 1245220
aaguaaacaugcucagagu

SEQ ID NO: 1545869 - RNA, 19 nt, Artificial Sequence
  Description of Artificial Sequence: Synthetic oligonucleotide
  Antisense strand to SEQ ID NO: 1545868
acucugagcauguuuacuu

SEQ ID NO: 1545870 - RNA, 19 nt, Artificial Sequence
  Description of Artificial Sequence: Synthetic oligonucleotide
  Sense strand starting at position 2564 of SEQ ID NO: 1245220
aguaaacaugcucagagua

SEQ ID NO: 1545871 - RNA, 19 nt, Artificial Sequence
  Description of Artificial Sequence: Synthetic oligonucleotide
  Antisense strand to SEQ ID NO: 1545870
uacucugagcauguuuacu

SEQ ID NO: 1545872 - RNA, 19 nt, Artificial Sequence
  Description of Artificial Sequence: Synthetic oligonucleotide
  Sense strand starting at position 2569 of SEQ ID NO: 1245220
acaugcucagaguaauaau

SEQ ID NO: 1545873 - RNA, 19 nt, Artificial Sequence
  Description of Artificial Sequence: Synthetic oligonucleotide
  Antisense strand to SEQ ID NO: 1545872
auuauuacucugagcaugu

SEQ ID NO: 1545874 - RNA, 19 nt, Artificial Sequence
  Description of Artificial Sequence: Synthetic oligonucleotide
  Sense strand starting at position 2630 of SEQ ID NO: 1245220
caaaucuaugagugugguu

SEQ ID NO: 1545875 - RNA, 19 nt, Artificial Sequence
  Description of Artificial Sequence: Synthetic oligonucleotide
  Antisense strand to SEQ ID NO: 1545874
aaccacacucauagauuug

SEQ ID NO: 1545876 - RNA, 19 nt, Artificial Sequence
  Description of Artificial Sequence: Synthetic oligonucleotide
  Sense strand starting at position 2632 of SEQ ID NO: 1245220
aaucuaugagugugguuaa

SEQ ID NO: 1545877 - RNA, 19 nt, Artificial Sequence
  Description of Artificial Sequence: Synthetic oligonucleotide
  Antisense strand to SEQ ID NO: 1545876
uuaaccacacucauagauu

SEQ ID NO: 1545878 - RNA, 19 nt, Artificial Sequence
  Description of Artificial Sequence: Synthetic oligonucleotide
  Sense strand starting at position 2635 of SEQ ID NO: 1245220
cuaugagugugguuaauac

SEQ ID NO: 1545879 - RNA, 19 nt, Artificial Sequence
  Description of Artificial Sequence: Synthetic oligonucleotide
  Antisense strand to SEQ ID NO: 1545878
guauuaaccacacucauag

SEQ ID NO: 1545880 - RNA, 19 nt, Artificial Sequence
  Description of Artificial Sequence: Synthetic oligonucleotide
  Sense strand starting at position 2643 of SEQ ID NO: 1245220
gugguuaauacacggagau

SEQ ID NO: 1545881 - RNA, 19 nt, Artificial Sequence
  Description of Artificial Sequence: Synthetic oligonucleotide
  Antisense strand to SEQ ID NO: 1545880
aucuccguguauuaaccac

SEQ ID NO: 1545882 - RNA, 19 nt, Artificial Sequence
  Description of Artificial Sequence: Synthetic oligonucleotide
  Sense strand starting at position 2644 of SEQ ID NO: 1245220
ugguuaauacacggagaug

SEQ ID NO: 1545883 - RNA, 19 nt, Artificial Sequence
  Description of Artificial Sequence: Synthetic oligonucleotide
  Antisense strand to SEQ ID NO: 1545882
caucuccguguauuaacca

SEQ ID NO: 1545884 - RNA, 19 nt, Artificial Sequence
  Description of Artificial Sequence: Synthetic oligonucleotide
  Sense strand starting at position 2645 of SEQ ID NO: 1245220
gguuaauacacggagaugu

SEQ ID NO: 1545885 - RNA, 19 nt, Artificial Sequence
  Description of Artificial Sequence: Synthetic oligonucleotide
  Antisense strand to SEQ ID NO: 1545884
acaucuccguguauuaacc

SEQ ID NO: 1545886 - RNA, 19 nt, Artificial Sequence
  Description of Artificial Sequence: Synthetic oligonucleotide
  Sense strand starting at position 2656 of SEQ ID NO: 1245220
ggagaugugguuugaggaa

SEQ ID NO: 1545887 - RNA, 19 nt, Artificial Sequence
  Description of Artificial Sequence: Synthetic oligonucleotide
  Antisense strand to SEQ ID NO: 1545886
uuccucaaaccacaucucc

SEQ ID NO: 1545888 - RNA, 19 nt, Artificial Sequence
  Description of Artificial Sequence: Synthetic oligonucleotide
  Sense strand starting at position 2701 of SEQ ID NO: 1245220
ccugguauacaauaaguau

SEQ ID NO: 1545889 - RNA, 19 nt, Artificial Sequence
  Description of Artificial Sequence: Synthetic oligonucleotide
  Antisense strand to SEQ ID NO: 1545888
auacuuauuguauaccagg

SEQ ID NO: 1545890 - RNA, 19 nt, Artificial Sequence
  Description of Artificial Sequence: Synthetic oligonucleotide
  Sense strand starting at position 2709 of SEQ ID NO: 1245220
acaauaaguaugcgguaaa

SEQ ID NO: 1545891 - RNA, 19 nt, Artificial Sequence
  Description of Artificial Sequence: Synthetic oligonucleotide
  Antisense strand to SEQ ID NO: 1545890
uuuaccgcauacuuauugu

SEQ ID NO: 1545892 - RNA, 19 nt, Artificial Sequence
  Description of Artificial Sequence: Synthetic oligonucleotide
  Sense strand starting at position 2720 of SEQ ID NO: 1245220
gcgguaaaugguuauuauu

SEQ ID NO: 1545893 - RNA, 19 nt, Artificial Sequence
  Description of Artificial Sequence: Synthetic oligonucleotide
  Antisense strand to SEQ ID NO: 1545892
aauaauaaccauuuaccgc

SEQ ID NO: 1545894 - RNA, 19 nt, Artificial Sequence
  Description of Artificial Sequence: Synthetic oligonucleotide
  Sense strand starting at position 2773 of SEQ ID NO: 1245220
ggugaacaacuuugacaua

SEQ ID NO: 1545895 - RNA, 19 nt, Artificial Sequence
  Description of Artificial Sequence: Synthetic oligonucleotide
  Antisense strand to SEQ ID NO: 1545894
uaugucaaaguuguucacc

SEQ ID NO: 1545896 - RNA, 19 nt, Artificial Sequence
  Description of Artificial Sequence: Synthetic oligonucleotide
  Sense strand starting at position 2801 of SEQ ID NO: 1245220
gggacagccugauuccaua

SEQ ID NO: 1545897 - RNA, 19 nt, Artificial Sequence
  Description of Artificial Sequence: Synthetic oligonucleotide
  Antisense strand to SEQ ID NO: 1545896
uauggaaucaggcuguccc

SEQ ID NO: 1545898 - RNA, 19 nt, Artificial Sequence
  Description of Artificial Sequence: Synthetic oligonucleotide
  Sense strand starting at position 2826 of SEQ ID NO: 1245220
cuaauauggcaccguggau

SEQ ID NO: 1545899 - RNA, 19 nt, Artificial Sequence
  Description of Artificial Sequence: Synthetic oligonucleotide
  Antisense strand to SEQ ID NO: 1545898
auccacggugccauauuag

SEQ ID NO: 1545900 - RNA, 19 nt, Artificial Sequence
  Description of Artificial Sequence: Synthetic oligonucleotide
  Sense strand starting at position 3115 of SEQ ID NO: 1245220
ugaucacagcugugaauag

SEQ ID NO: 1545901 - RNA, 19 nt, Artificial Sequence
  Description of Artificial Sequence: Synthetic oligonucleotide
  Antisense strand to SEQ ID NO: 1545900
cuauucacagcugugauca

SEQ ID NO: 1545902 - RNA, 19 nt, Artificial Sequence
  Description of Artificial Sequence: Synthetic oligonucleotide
  Sense strand starting at position 3236 of SEQ ID NO: 1245220
gaccuuguuugggucauga

SEQ ID NO: 1545903 - RNA, 19 nt, Artificial Sequence
  Description of Artificial Sequence: Synthetic oligonucleotide
  Antisense strand to SEQ ID NO: 1545902
ucaugacccaaacaagguc

SEQ ID NO: 1545904 - RNA, 19 nt, Artificial Sequence
  Description of Artificial Sequence: Synthetic oligonucleotide
  Sense strand starting at position 3238 of SEQ ID NO: 1245220
ccuuguuugggucaugauu

SEQ ID NO: 1545905 - RNA, 19 nt, Artificial Sequence
  Description of Artificial Sequence: Synthetic oligonucleotide
  Antisense strand to SEQ ID NO: 1545904
aaucaugacccaaacaagg

SEQ ID NO: 1545906 - RNA, 19 nt, Artificial Sequence
  Description of Artificial Sequence: Synthetic oligonucleotide
  Sense strand starting at position 3635 of SEQ ID NO: 1245220
acugaauguuaggugacau

SEQ ID NO: 1545907 - RNA, 19 nt, Artificial Sequence
  Description of Artificial Sequence: Synthetic oligonucleotide
  Antisense strand to SEQ ID NO: 1545906
augucaccuaacauucagu

SEQ ID NO: 1545908 - RNA, 19 nt, Artificial Sequence
  Description of Artificial Sequence: Synthetic oligonucleotide
  Sense strand starting at position 3684 of SEQ ID NO: 1245220
auaccauaguggcuaugau

SEQ ID NO: 1545909 - RNA, 19 nt, Artificial Sequence
  Description of Artificial Sequence: Synthetic oligonucleotide
  Antisense strand to SEQ ID NO: 1545908
aucauagccacuaugguau

SEQ ID NO: 1545910 - RNA, 19 nt, Artificial Sequence
  Description of Artificial Sequence: Synthetic oligonucleotide
  Sense strand starting at position 3685 of SEQ ID NO: 1245220
uaccauaguggcuaugauu

SEQ ID NO: 1545911 - RNA, 19 nt, Artificial Sequence
  Description of Artificial Sequence: Synthetic oligonucleotide
  Antisense strand to SEQ ID NO: 1545910
aaucauagccacuauggua

SEQ ID NO: 1545912 - RNA, 19 nt, Artificial Sequence
  Description of Artificial Sequence: Synthetic oligonucleotide
  Sense strand starting at position 3839 of SEQ ID NO: 1245220
uggcaaaguguuuaauguu

SEQ ID NO: 1545913 - RNA, 19 nt, Artificial Sequence
  Description of Artificial Sequence: Synthetic oligonucleotide
  Antisense strand to SEQ ID NO: 1545912
aacauuaaacacuuugcca

SEQ ID NO: 1545914 - RNA, 19 nt, Artificial Sequence
  Description of Artificial Sequence: Synthetic oligonucleotide
  Sense strand starting at position 3846 of SEQ ID NO: 1245220
guguuuaauguuuaagcaa

SEQ ID NO: 1545915 - RNA, 19 nt, Artificial Sequence
  Description of Artificial Sequence: Synthetic oligonucleotide
  Antisense strand to SEQ ID NO: 1545914
uugcuuaaacauuaaacac

SEQ ID NO: 1545916 - RNA, 19 nt, Artificial Sequence
  Description of Artificial Sequence: Synthetic oligonucleotide
  Sense strand starting at position 3849 of SEQ ID NO: 1245220
uuuaauguuuaagcaagga

SEQ ID NO: 1545917 - RNA, 19 nt, Artificial Sequence
  Description of Artificial Sequence: Synthetic oligonucleotide
  Antisense strand to SEQ ID NO: 1545916
uccuugcuuaaacauuaaa

SEQ ID NO: 1545918 - RNA, 19 nt, Artificial Sequence
  Description of Artificial Sequence: Synthetic oligonucleotide
  Sense strand starting at position 3884 of SEQ ID NO: 1245220
uugugcuaggccuaauuau

SEQ ID NO: 1545919 - RNA, 19 nt, Artificial Sequence
  Description of Artificial Sequence: Synthetic oligonucleotide
  Antisense strand to SEQ ID NO: 1545918
auaauuaggccuagcacaa

SEQ ID NO: 1545920 - RNA, 19 nt, Artificial Sequence
  Description of Artificial Sequence: Synthetic oligonucleotide
  Sense strand starting at position 3975 of SEQ ID NO: 1245220
gcaaguaugcgaugaagaa

SEQ ID NO: 1545921 - RNA, 19 nt, Artificial Sequence
  Description of Artificial Sequence: Synthetic oligonucleotide
  Antisense strand to SEQ ID NO: 1545920
uucuucaucgcauacuugc

SEQ ID NO: 1545922 - RNA, 19 nt, Artificial Sequence
  Description of Artificial Sequence: Synthetic oligonucleotide
  Sense strand starting at position 3976 of SEQ ID NO: 1245220
caaguaugcgaugaagaac

SEQ ID NO: 1545923 - RNA, 19 nt, Artificial Sequence
  Description of Artificial Sequence: Synthetic oligonucleotide
  Antisense strand to SEQ ID NO: 1545922
guucuucaucgcauacuug

SEQ ID NO: 1545924 - RNA, 19 nt, Artificial Sequence
  Description of Artificial Sequence: Synthetic oligonucleotide
  Sense strand starting at position 20 of SEQ ID NO: 1245221
agaugcaguucuccaaacu

SEQ ID NO: 1545925 - RNA, 19 nt, Artificial Sequence
  Description of Artificial Sequence: Synthetic oligonucleotide
  Antisense strand to SEQ ID NO: 1545924
aguuuggagaacugcaucu

SEQ ID NO: 1545926 - RNA, 19 nt, Artificial Sequence
  Description of Artificial Sequence: Synthetic oligonucleotide
  Sense strand starting at position 246 of SEQ ID NO: 1245221
ggacucaaaucuuuauguu

SEQ ID NO: 1545927 - RNA, 19 nt, Artificial Sequence
  Description of Artificial Sequence: Synthetic oligonucleotide
  Antisense strand to SEQ ID NO: 1545926
aacauaaagauuugagucc

SEQ ID NO: 1545928 - RNA, 19 nt, Artificial Sequence
  Description of Artificial Sequence: Synthetic oligonucleotide
  Sense strand starting at position 258 of SEQ ID NO: 1245221
uuauguucgcuuuaagaac

SEQ ID NO: 1545929 - RNA, 19 nt, Artificial Sequence
  Description of Artificial Sequence: Synthetic oligonucleotide
  Antisense strand to SEQ ID NO: 1545928
guucuuaaagcgaacauaa

SEQ ID NO: 1545930 - RNA, 19 nt, Artificial Sequence
  Description of Artificial Sequence: Synthetic oligonucleotide
  Sense strand starting at position 506 of SEQ ID NO: 1245221
gguuuagagguagauucuu

SEQ ID NO: 1545931 - RNA, 19 nt, Artificial Sequence
  Description of Artificial Sequence: Synthetic oligonucleotide
  Antisense strand to SEQ ID NO: 1545930
aagaaucuaccucuaaacc

SEQ ID NO: 1545932 - RNA, 19 nt, Artificial Sequence
  Description of Artificial Sequence: Synthetic oligonucleotide
  Sense strand starting at position 511 of SEQ ID NO: 1245221
agagguagauucuuggauc

SEQ ID NO: 1545933 - RNA, 19 nt, Artificial Sequence
  Description of Artificial Sequence: Synthetic oligonucleotide
  Antisense strand to SEQ ID NO: 1545932
gauccaagaaucuaccucu

SEQ ID NO: 1545934 - RNA, 19 nt, Artificial Sequence
  Description of Artificial Sequence: Synthetic oligonucleotide
  Sense strand starting at position 519 of SEQ ID NO: 1245221
auucuuggaucauugagca

SEQ ID NO: 1545935 - RNA, 19 nt, Artificial Sequence
  Description of Artificial Sequence: Synthetic oligonucleotide
  Antisense strand to SEQ ID NO: 1545934
ugcucaaugauccaagaau

SEQ ID NO: 1545936 - RNA, 19 nt, Artificial Sequence
  Description of Artificial Sequence: Synthetic oligonucleotide
  Sense strand starting at position 523 of SEQ ID NO: 1245221
uuggaucauugagcacauu

SEQ ID NO: 1545937 - RNA, 19 nt, Artificial Sequence
  Description of Artificial Sequence: Synthetic oligonucleotide
  Antisense strand to SEQ ID NO: 1545936
aaugugcucaaugauccaa

SEQ ID NO: 1545938 - RNA, 19 nt, Artificial Sequence
  Description of Artificial Sequence: Synthetic oligonucleotide
  Sense strand starting at position 623 of SEQ ID NO: 1245221
uggagaugauccucgcuga

SEQ ID NO: 1545939 - RNA, 19 nt, Artificial Sequence
  Description of Artificial Sequence: Synthetic oligonucleotide
  Antisense strand to SEQ ID NO: 1545938
ucagcgaggaucaucucca

SEQ ID NO: 1545940 - RNA, 19 nt, Artificial Sequence
  Description of Artificial Sequence: Synthetic oligonucleotide
  Sense strand starting at position 624 of SEQ ID NO: 1245221
ggagaugauccucgcugaa

SEQ ID NO: 1545941 - RNA, 19 nt, Artificial Sequence
  Description of Artificial Sequence: Synthetic oligonucleotide
  Antisense strand to SEQ ID NO: 1545940
uucagcgaggaucaucucc

SEQ ID NO: 1545942 - RNA, 19 nt, Artificial Sequence
  Description of Artificial Sequence: Synthetic oligonucleotide
  Sense strand starting at position 983 of SEQ ID NO: 1245221
ggaggucaaggcuaaagua

SEQ ID NO: 1545943 - RNA, 19 nt, Artificial Sequence
  Description of Artificial Sequence: Synthetic oligonucleotide
  Antisense strand to SEQ ID NO: 1545942
uacuuuagccuugaccucc

SEQ ID NO: 1545944 - RNA, 19 nt, Artificial Sequence
  Description of Artificial Sequence: Synthetic oligonucleotide
  Sense strand starting at position 1827 of SEQ ID NO: 1245221
aguugaacugguuaagucu

SEQ ID NO: 1545945 - RNA, 19 nt, Artificial Sequence
  Description of Artificial Sequence: Synthetic oligonucleotide
  Antisense strand to SEQ ID NO: 1545944
agacuuaaccaguucaacu

SEQ ID NO: 1545946 - RNA, 19 nt, Artificial Sequence
  Description of Artificial Sequence: Synthetic oligonucleotide
  Sense strand starting at position 1830 of SEQ ID NO: 1245221
ugaacugguuaagucuaua

SEQ ID NO: 1545947 - RNA, 19 nt, Artificial Sequence
  Description of Artificial Sequence: Synthetic oligonucleotide
  Antisense strand to SEQ ID NO: 1545946
uauagacuuaaccaguuca

SEQ ID NO: 1545948 - RNA, 19 nt, Artificial Sequence
  Description of Artificial Sequence: Synthetic oligonucleotide
  Sense strand starting at position 1833 of SEQ ID NO: 1245221
acugguuaagucuauagca

SEQ ID NO: 1545949 - RNA, 19 nt, Artificial Sequence
  Description of Artificial Sequence: Synthetic oligonucleotide
  Antisense strand to SEQ ID NO: 1545948
ugcuauagacuuaaccagu

SEQ ID NO: 1545950 - RNA, 19 nt, Artificial Sequence
  Description of Artificial Sequence: Synthetic oligonucleotide
  Sense strand starting at position 1880 of SEQ ID NO: 1245221
cuaacagaaucaguugagu

SEQ ID NO: 1545951 - RNA, 19 nt, Artificial Sequence
  Description of Artificial Sequence: Synthetic oligonucleotide
  Antisense strand to SEQ ID NO: 1545950
acucaacugauucuguuag

SEQ ID NO: 1545952 - RNA, 19 nt, Artificial Sequence
  Description of Artificial Sequence: Synthetic oligonucleotide
  Sense strand starting at position 1976 of SEQ ID NO: 1245221
auccucaugaagggugaau

SEQ ID NO: 1545953 - RNA, 19 nt, Artificial Sequence
  Description of Artificial Sequence: Synthetic oligonucleotide
  Antisense strand to SEQ ID NO: 1545952
auucacccuucaugaggau

SEQ ID NO: 1545954 - RNA, 19 nt, Artificial Sequence
  Description of Artificial Sequence: Synthetic oligonucleotide
  Sense strand starting at position 1978 of SEQ ID NO: 1245221
ccucaugaagggugaauau

SEQ ID NO: 1545955 - RNA, 19 nt, Artificial Sequence
  Description of Artificial Sequence: Synthetic oligonucleotide
  Antisense strand to SEQ ID NO: 1545954
auauucacccuucaugagg

SEQ ID NO: 1545956 - RNA, 19 nt, Artificial Sequence
  Description of Artificial Sequence: Synthetic oligonucleotide
  Sense strand starting at position 2028 of SEQ ID NO: 1245221
acaagcuugcagugaacaa

SEQ ID NO: 1545957 - RNA, 19 nt, Artificial Sequence
  Description of Artificial Sequence: Synthetic oligonucleotide
  Antisense strand to SEQ ID NO: 1545956
uuguucacugcaagcuugu

SEQ ID NO: 1545958 - RNA, 19 nt, Artificial Sequence
  Description of Artificial Sequence: Synthetic oligonucleotide
  Sense strand starting at position 2059 of SEQ ID NO: 1245221
uguccuuaaggaugaaaca

SEQ ID NO: 1545959 - RNA, 19 nt, Artificial Sequence
  Description of Artificial Sequence: Synthetic oligonucleotide
  Antisense strand to SEQ ID NO: 1545958
uguuucauccuuaaggaca

SEQ ID NO: 1545960 - RNA, 19 nt, Artificial Sequence
  Description of Artificial Sequence: Synthetic oligonucleotide
  Sense strand starting at position 2138 of SEQ ID NO: 1245221
cccugauaauugcuaguga

SEQ ID NO: 1545961 - RNA, 19 nt, Artificial Sequence
  Description of Artificial Sequence: Synthetic oligonucleotide
  Antisense strand to SEQ ID NO: 1545960
ucacuagcaauuaucaggg

SEQ ID NO: 1545962 - RNA, 19 nt, Artificial Sequence
  Description of Artificial Sequence: Synthetic oligonucleotide
  Sense strand starting at position 2230 of SEQ ID NO: 1245221
gugagaaagcuacacaugu

SEQ ID NO: 1545963 - RNA, 19 nt, Artificial Sequence
  Description of Artificial Sequence: Synthetic oligonucleotide
  Antisense strand to SEQ ID NO: 1545962
acauguguagcuuucucac

SEQ ID NO: 1545964 - RNA, 19 nt, Artificial Sequence
  Description of Artificial Sequence: Synthetic oligonucleotide
  Sense strand starting at position 2309 of SEQ ID NO: 1245221
agacaacacugccuaugau

SEQ ID NO: 1545965 - RNA, 19 nt, Artificial Sequence
  Description of Artificial Sequence: Synthetic oligonucleotide
  Antisense strand to SEQ ID NO: 1545964
aucauaggcaguguugucu

SEQ ID NO: 1545966 - RNA, 19 nt, Artificial Sequence
  Description of Artificial Sequence: Synthetic oligonucleotide
  Sense strand starting at position 2347 of SEQ ID NO: 1245221
aaguguucuuaggcuauuu

SEQ ID NO: 1545967 - RNA, 19 nt, Artificial Sequence
  Description of Artificial Sequence: Synthetic oligonucleotide
  Antisense strand to SEQ ID NO: 1545966
aaauagccuaagaacacuu

SEQ ID NO: 1545968 - RNA, 19 nt, Artificial Sequence
  Description of Artificial Sequence: Synthetic oligonucleotide
  Sense strand starting at position 2352 of SEQ ID NO: 1245221
uucuuaggcuauuugucau

SEQ ID NO: 1545969 - RNA, 19 nt, Artificial Sequence
  Description of Artificial Sequence: Synthetic oligonucleotide
  Antisense strand to SEQ ID NO: 1545968
augacaaauagccuaagaa

SEQ ID NO: 1545970 - RNA, 19 nt, Artificial Sequence
  Description of Artificial Sequence: Synthetic oligonucleotide
  Sense strand starting at position 2386 of SEQ ID NO: 1245221
uuggaaaggucauucuugu

SEQ ID NO: 1545971 - RNA, 19 nt, Artificial Sequence
  Description of Artificial Sequence: Synthetic oligonucleotide
  Antisense strand to SEQ ID NO: 1545970
acaagaaugaccuuuccaa

SEQ ID NO: 1545972 - RNA, 19 nt, Artificial Sequence
  Description of Artificial Sequence: Synthetic oligonucleotide
  Sense strand starting at position 2493 of SEQ ID NO: 1245221
ggaucuaaauguuuggcuu

SEQ ID NO: 1545973 - RNA, 19 nt, Artificial Sequence
  Description of Artificial Sequence: Synthetic oligonucleotide
  Antisense strand to SEQ ID NO: 1545972
aagccaaacauuuagaucc

SEQ ID NO: 1545974 - RNA, 19 nt, Artificial Sequence
  Description of Artificial Sequence: Synthetic oligonucleotide
  Sense strand starting at position 2531 of SEQ ID NO: 1245221
ccagucauucuauggauuc

SEQ ID NO: 1545975 - RNA, 19 nt, Artificial Sequence
  Description of Artificial Sequence: Synthetic oligonucleotide
  Antisense strand to SEQ ID NO: 1545974
gaauccauagaaugacugg

SEQ ID NO: 1545976 - RNA, 19 nt, Artificial Sequence
  Description of Artificial Sequence: Synthetic oligonucleotide
  Sense strand starting at position 2688 of SEQ ID NO: 1245221
uugagcauugcuuaacaua

SEQ ID NO: 1545977 - RNA, 19 nt, Artificial Sequence
  Description of Artificial Sequence: Synthetic oligonucleotide
  Antisense strand to SEQ ID NO: 1545976
uauguuaagcaaugcucaa

SEQ ID NO: 1545978 - RNA, 19 nt, Artificial Sequence
  Description of Artificial Sequence: Synthetic oligonucleotide
  Sense strand starting at position 2809 of SEQ ID NO: 1245221
uuaugacaaugaguguaau

SEQ ID NO: 1545979 - RNA, 19 nt, Artificial Sequence
  Description of Artificial Sequence: Synthetic oligonucleotide
  Antisense strand to SEQ ID NO: 1545978
auuacacucauugucauaa

SEQ ID NO: 1545980 - RNA, 19 nt, Artificial Sequence
  Description of Artificial Sequence: Synthetic oligonucleotide
  Sense strand starting at position 2812 of SEQ ID NO: 1245221
ugacaaugaguguaauguc

SEQ ID NO: 1545981 - RNA, 19 nt, Artificial Sequence
  Description of Artificial Sequence: Synthetic oligonucleotide
  Antisense strand to SEQ ID NO: 1545980
gacauuacacucauuguca

SEQ ID NO: 1545982 - RNA, 19 nt, Artificial Sequence
  Description of Artificial Sequence: Synthetic oligonucleotide
  Sense strand starting at position 2822 of SEQ ID NO: 1245221
uguaaugucaggcacaaug

SEQ ID NO: 1545983 - RNA, 19 nt, Artificial Sequence
  Description of Artificial Sequence: Synthetic oligonucleotide
  Antisense strand to SEQ ID NO: 1545982
cauugugccugacauuaca

SEQ ID NO: 1545984 - RNA, 19 nt, Artificial Sequence
  Description of Artificial Sequence: Synthetic oligonucleotide
  Sense strand starting at position 2832 of SEQ ID NO: 1245221
ggcacaaugugaccaauaa

SEQ ID NO: 1545985 - RNA, 19 nt, Artificial Sequence
  Description of Artificial Sequence: Synthetic oligonucleotide
  Antisense strand to SEQ ID NO: 1545984
uuauuggucacauugugcc

SEQ ID NO: 1545986 - RNA, 19 nt, Artificial Sequence
  Description of Artificial Sequence: Synthetic oligonucleotide
  Sense strand starting at position 2883 of SEQ ID NO: 1245221
aggccugcugccgugauaa

SEQ ID NO: 1545987 - RNA, 19 nt, Artificial Sequence
  Description of Artificial Sequence: Synthetic oligonucleotide
  Antisense strand to SEQ ID NO: 1545986
uuaucacggcagcaggccu

SEQ ID NO: 1545988 - RNA, 19 nt, Artificial Sequence
  Description of Artificial Sequence: Synthetic oligonucleotide
  Sense strand starting at position 2922 of SEQ ID NO: 1245221
acuguugacucuuccuuga

SEQ ID NO: 1545989 - RNA, 19 nt, Artificial Sequence
  Description of Artificial Sequence: Synthetic oligonucleotide
  Antisense strand to SEQ ID NO: 1545988
ucaaggaagagucaacagu

SEQ ID NO: 1545990 - RNA, 19 nt, Artificial Sequence
  Description of Artificial Sequence: Synthetic oligonucleotide
  Sense strand starting at position 2924 of SEQ ID NO: 1245221
uguugacucuuccuugaga

SEQ ID NO: 1545991 - RNA, 19 nt, Artificial Sequence
  Description of Artificial Sequence: Synthetic oligonucleotide
  Antisense strand to SEQ ID NO: 1545990
ucucaaggaagagucaaca

SEQ ID NO: 1545992 - RNA, 19 nt, Artificial Sequence
  Description of Artificial Sequence: Synthetic oligonucleotide
  Sense strand starting at position 2925 of SEQ ID NO: 1245221
guugacucuuccuugagag

SEQ ID NO: 1545993 - RNA, 19 nt, Artificial Sequence
  Description of Artificial Sequence: Synthetic oligonucleotide
  Antisense strand to SEQ ID NO: 1545992
cucucaaggaagagucaac

SEQ ID NO: 1545994 - RNA, 19 nt, Artificial Sequence
  Description of Artificial Sequence: Synthetic oligonucleotide
  Sense strand starting at position 2926 of SEQ ID NO: 1245221
uugacucuuccuugagaga

SEQ ID NO: 1545995 - RNA, 19 nt, Artificial Sequence
  Description of Artificial Sequence: Synthetic oligonucleotide
  Antisense strand to SEQ ID NO: 1545994
ucucucaaggaagagucaa

SEQ ID NO: 1545996 - RNA, 19 nt, Artificial Sequence
  Description of Artificial Sequence: Synthetic oligonucleotide
  Sense strand starting at position 3002 of SEQ ID NO: 1245221
acaacagucugucuuugau

SEQ ID NO: 1545997 - RNA, 19 nt, Artificial Sequence
  Description of Artificial Sequence: Synthetic oligonucleotide
  Antisense strand to SEQ ID NO: 1545996
aucaaagacagacuguugu

SEQ ID NO: 1545998 - RNA, 19 nt, Artificial Sequence
  Description of Artificial Sequence: Synthetic oligonucleotide
  Sense strand starting at position 3488 of SEQ ID NO: 1245221
gcaacuagagcagauuauu

SEQ ID NO: 1545999 - RNA, 19 nt, Artificial Sequence
  Description of Artificial Sequence: Synthetic oligonucleotide
  Antisense strand to SEQ ID NO: 1545998
aauaaucugcucuaguugc

SEQ ID NO: 1546000 - RNA, 19 nt, Artificial Sequence
  Description of Artificial Sequence: Synthetic oligonucleotide
  Sense strand starting at position 3536 of SEQ ID NO: 1245221
gggauugugcauuagauca

SEQ ID NO: 1546001 - RNA, 19 nt, Artificial Sequence
  Description of Artificial Sequence: Synthetic oligonucleotide
  Antisense strand to SEQ ID NO: 1546000
ugaucuaaugcacaauccc

SEQ ID NO: 1546002 - RNA, 19 nt, Artificial Sequence
  Description of Artificial Sequence: Synthetic oligonucleotide
  Sense strand starting at position 3784 of SEQ ID NO: 1245221
aguugacaauaguuuauca

SEQ ID NO: 1546003 - RNA, 19 nt, Artificial Sequence
  Description of Artificial Sequence: Synthetic oligonucleotide
  Antisense strand to SEQ ID NO: 1546002
ugauaaacuauugucaacu

SEQ ID NO: 1546004 - RNA, 19 nt, Artificial Sequence
  Description of Artificial Sequence: Synthetic oligonucleotide
  Sense strand starting at position 77 of SEQ ID NO: 1245222
ugugaaugaacguaguaua

SEQ ID NO: 1546005 - RNA, 19 nt, Artificial Sequence
  Description of Artificial Sequence: Synthetic oligonucleotide
  Antisense strand to SEQ ID NO: 1546004
uauacuacguucauucaca

SEQ ID NO: 1546006 - RNA, 19 nt, Artificial Sequence
  Description of Artificial Sequence: Synthetic oligonucleotide
  Sense strand starting at position 139 of SEQ ID NO: 1245222
cccucucacccguaagaca

SEQ ID NO: 1546007 - RNA, 19 nt, Artificial Sequence
  Description of Artificial Sequence: Synthetic oligonucleotide
  Antisense strand to SEQ ID NO: 1546006
ugucuuacgggugagaggg

SEQ ID NO: 1546008 - RNA, 19 nt, Artificial Sequence
  Description of Artificial Sequence: Synthetic oligonucleotide
  Sense strand starting at position 195 of SEQ ID NO: 1245222
uuucuauggucaccacaua

SEQ ID NO: 1546009 - RNA, 19 nt, Artificial Sequence
  Description of Artificial Sequence: Synthetic oligonucleotide
  Antisense strand to SEQ ID NO: 1546008
uauguggugaccauagaaa

SEQ ID NO: 1546010 - RNA, 19 nt, Artificial Sequence
  Description of Artificial Sequence: Synthetic oligonucleotide
  Sense strand starting at position 196 of SEQ ID NO: 1245222
uucuauggucaccacauau

SEQ ID NO: 1546011 - RNA, 19 nt, Artificial Sequence
  Description of Artificial Sequence: Synthetic oligonucleotide
  Antisense strand to SEQ ID NO: 1546010
auauguggugaccauagaa

SEQ ID NO: 1546012 - RNA, 19 nt, Artificial Sequence
  Description of Artificial Sequence: Synthetic oligonucleotide
  Sense strand starting at position 510 of SEQ ID NO: 1245222
ugcaaacuugaaugauucu

SEQ ID NO: 1546013 - RNA, 19 nt, Artificial Sequence
  Description of Artificial Sequence: Synthetic oligonucleotide
  Antisense strand to SEQ ID NO: 1546012
agaaucauucaaguuugca

SEQ ID NO: 1546014 - RNA, 19 nt, Artificial Sequence
  Description of Artificial Sequence: Synthetic oligonucleotide
  Sense strand starting at position 584 of SEQ ID NO: 1245222
guauauuaugaaggccaaa

SEQ ID NO: 1546015 - RNA, 19 nt, Artificial Sequence
  Description of Artificial Sequence: Synthetic oligonucleotide
  Antisense strand to SEQ ID NO: 1546014
uuuggccuucauaauauac

SEQ ID NO: 1546016 - RNA, 19 nt, Artificial Sequence
  Description of Artificial Sequence: Synthetic oligonucleotide
  Sense strand starting at position 641 of SEQ ID NO: 1245222
agcagaagaaacuguuaga

SEQ ID NO: 1546017 - RNA, 19 nt, Artificial Sequence
  Description of Artificial Sequence: Synthetic oligonucleotide
  Antisense strand to SEQ ID NO: 1546016
ucuaacaguuucuucugcu

SEQ ID NO: 1546018 - RNA, 19 nt, Artificial Sequence
  Description of Artificial Sequence: Synthetic oligonucleotide
  Sense strand starting at position 1288 of SEQ ID NO: 1245222
cccaacuauugaucgauua

SEQ ID NO: 1546019 - RNA, 19 nt, Artificial Sequence
  Description of Artificial Sequence: Synthetic oligonucleotide
  Antisense strand to SEQ ID NO: 1546018
uaaucgaucaauaguuggg

SEQ ID NO: 1546020 - RNA, 19 nt, Artificial Sequence
  Description of Artificial Sequence: Synthetic oligonucleotide
  Sense strand starting at position 1289 of SEQ ID NO: 1245222
ccaacuauugaucgauuaa

SEQ ID NO: 1546021 - RNA, 19 nt, Artificial Sequence
  Description of Artificial Sequence: Synthetic oligonucleotide
  Antisense strand to SEQ ID NO: 1546020
uuaaucgaucaauaguugg

SEQ ID NO: 1546022 - RNA, 19 nt, Artificial Sequence
  Description of Artificial Sequence: Synthetic oligonucleotide
  Sense strand starting at position 1418 of SEQ ID NO: 1245222
uggugaccagagugacauu

SEQ ID NO: 1546023 - RNA, 19 nt, Artificial Sequence
  Description of Artificial Sequence: Synthetic oligonucleotide
  Antisense strand to SEQ ID NO: 1546022
aaugucacucuggucacca

SEQ ID NO: 1546024 - RNA, 19 nt, Artificial Sequence
  Description of Artificial Sequence: Synthetic oligonucleotide
  Sense strand starting at position 1916 of SEQ ID NO: 1245222
cgacacuuucugcagaaau

SEQ ID NO: 1546025 - RNA, 19 nt, Artificial Sequence
  Description of Artificial Sequence: Synthetic oligonucleotide
  Antisense strand to SEQ ID NO: 1546024
auuucugcagaaagugucg

SEQ ID NO: 1546026 - RNA, 19 nt, Artificial Sequence
  Description of Artificial Sequence: Synthetic oligonucleotide
  Sense strand starting at position 1929 of SEQ ID NO: 1245222
agaaauucugcagauggca

SEQ ID NO: 1546027 - RNA, 19 nt, Artificial Sequence
  Description of Artificial Sequence: Synthetic oligonucleotide
  Antisense strand to SEQ ID NO: 1546026
ugccaucugcagaauuucu

SEQ ID NO: 1546028 - RNA, 19 nt, Artificial Sequence
  Description of Artificial Sequence: Synthetic oligonucleotide
  Sense strand starting at position 2099 of SEQ ID NO: 1245222
ccuguuagagcgcauuuaa

SEQ ID NO: 1546029 - RNA, 19 nt, Artificial Sequence
  Description of Artificial Sequence: Synthetic oligonucleotide
  Antisense strand to SEQ ID NO: 1546028
uuaaaugcgcucuaacagg

SEQ ID NO: 1546030 - RNA, 19 nt, Artificial Sequence
  Description of Artificial Sequence: Synthetic oligonucleotide
  Sense strand starting at position 2224 of SEQ ID NO: 1245222
accguaugucccgaaagga

SEQ ID NO: 1546031 - RNA, 19 nt, Artificial Sequence
  Description of Artificial Sequence: Synthetic oligonucleotide
  Antisense strand to SEQ ID NO: 1546030
uccuuucgggacauacggu

SEQ ID NO: 1546032 - RNA, 19 nt, Artificial Sequence
  Description of Artificial Sequence: Synthetic oligonucleotide
  Sense strand starting at position 2363 of SEQ ID NO: 1245222
uccaaacacgugcauaaau

SEQ ID NO: 1546033 - RNA, 19 nt, Artificial Sequence
  Description of Artificial Sequence: Synthetic oligonucleotide
  Antisense strand to SEQ ID NO: 1546032
auuuaugcacguguuugga

SEQ ID NO: 1546034 - RNA, 19 nt, Artificial Sequence
  Description of Artificial Sequence: Synthetic oligonucleotide
  Sense strand starting at position 2396 of SEQ ID NO: 1245222
uuaguuaucgucucgcucu

SEQ ID NO: 1546035 - RNA, 19 nt, Artificial Sequence
  Description of Artificial Sequence: Synthetic oligonucleotide
  Antisense strand to SEQ ID NO: 1546034
agagcgagacgauaacuaa

SEQ ID NO: 1546036 - RNA, 19 nt, Artificial Sequence
  Description of Artificial Sequence: Synthetic oligonucleotide
  Sense strand starting at position 2412 of SEQ ID NO: 1245222
ucugcauugggucauaaag

SEQ ID NO: 1546037 - RNA, 19 nt, Artificial Sequence
  Description of Artificial Sequence: Synthetic oligonucleotide
  Antisense strand to SEQ ID NO: 1546036
cuuuaugacccaaugcaga

SEQ ID NO: 1546038 - RNA, 19 nt, Artificial Sequence
  Description of Artificial Sequence: Synthetic oligonucleotide
  Sense strand starting at position 2726 of SEQ ID NO: 1245222
ggacucagccaugaugcua

SEQ ID NO: 1546039 - RNA, 19 nt, Artificial Sequence
  Description of Artificial Sequence: Synthetic oligonucleotide
  Antisense strand to SEQ ID NO: 1546038
uagcaucauggcugagucc

SEQ ID NO: 1546040 - RNA, 19 nt, Artificial Sequence
  Description of Artificial Sequence: Synthetic oligonucleotide
  Sense strand starting at position 2802 of SEQ ID NO: 1245222
cuaugucagaguggaagau

SEQ ID NO: 1546041 - RNA, 19 nt, Artificial Sequence
  Description of Artificial Sequence: Synthetic oligonucleotide
  Antisense strand to SEQ ID NO: 1546040
aucuuccacucugacauag

SEQ ID NO: 1546042 - RNA, 19 nt, Artificial Sequence
  Description of Artificial Sequence: Synthetic oligonucleotide
  Sense strand starting at position 2908 of SEQ ID NO: 1245222
agggaaccacugugacauu

SEQ ID NO: 1546043 - RNA, 19 nt, Artificial Sequence
  Description of Artificial Sequence: Synthetic oligonucleotide
  Antisense strand to SEQ ID NO: 1546042
aaugucacagugguucccu

SEQ ID NO: 1546044 - RNA, 19 nt, Artificial Sequence
  Description of Artificial Sequence: Synthetic oligonucleotide
  Sense strand starting at position 2911 of SEQ ID NO: 1245222
gaaccacugugacauuuga

SEQ ID NO: 1546045 - RNA, 19 nt, Artificial Sequence
  Description of Artificial Sequence: Synthetic oligonucleotide
  Antisense strand to SEQ ID NO: 1546044
ucaaaugucacagugguuc

SEQ ID NO: 1546046 - RNA, 19 nt, Artificial Sequence
  Description of Artificial Sequence: Synthetic oligonucleotide
  Sense strand starting at position 3213 of SEQ ID NO: 1245222
aaggguuagcucuggagga

SEQ ID NO: 1546047 - RNA, 19 nt, Artificial Sequence
  Description of Artificial Sequence: Synthetic oligonucleotide
  Antisense strand to SEQ ID NO: 1546046
uccuccagagcuaacccuu

SEQ ID NO: 1546048 - RNA, 19 nt, Artificial Sequence
  Description of Artificial Sequence: Synthetic oligonucleotide
  Sense strand starting at position 3305 of SEQ ID NO: 1245222
agaggaaugggcgaguuca

SEQ ID NO: 1546049 - RNA, 19 nt, Artificial Sequence
  Description of Artificial Sequence: Synthetic oligonucleotide
  Antisense strand to SEQ ID NO: 1546048
ugaacucgcccauuccucu

SEQ ID NO: 1546050 - RNA, 19 nt, Artificial Sequence
  Description of Artificial Sequence: Synthetic oligonucleotide
  Sense strand starting at position 3395 of SEQ ID NO: 1245222
uuuauacggccauaaucua

SEQ ID NO: 1546051 - RNA, 19 nt, Artificial Sequence
  Description of Artificial Sequence: Synthetic oligonucleotide
  Antisense strand to SEQ ID NO: 1546050
uagauuauggccguauaaa

SEQ ID NO: 1546052 - RNA, 19 nt, Artificial Sequence
  Description of Artificial Sequence: Synthetic oligonucleotide
  Sense strand starting at position 3402 of SEQ ID NO: 1245222
ggccauaaucuauauacug

SEQ ID NO: 1546053 - RNA, 19 nt, Artificial Sequence
  Description of Artificial Sequence: Synthetic oligonucleotide
  Antisense strand to SEQ ID NO: 1546052
caguauauagauuauggcc

SEQ ID NO: 1546054 - RNA, 19 nt, Artificial Sequence
  Description of Artificial Sequence: Synthetic oligonucleotide
  Sense strand starting at position 3419 of SEQ ID NO: 1245222
ugaacuaauccauguagug

SEQ ID NO: 1546055 - RNA, 19 nt, Artificial Sequence
  Description of Artificial Sequence: Synthetic oligonucleotide
  Antisense strand to SEQ ID NO: 1546054
cacuacauggauuaguuca

SEQ ID NO: 1546056 - RNA, 19 nt, Artificial Sequence
  Description of Artificial Sequence: Synthetic oligonucleotide
  Sense strand starting at position 3428 of SEQ ID NO: 1245222
ccauguagugcuuagaaug

SEQ ID NO: 1546057 - RNA, 19 nt, Artificial Sequence
  Description of Artificial Sequence: Synthetic oligonucleotide
  Antisense strand to SEQ ID NO: 1546056
cauucuaagcacuacaugg

SEQ ID NO: 1546058 - RNA, 19 nt, Artificial Sequence
  Description of Artificial Sequence: Synthetic oligonucleotide
  Sense strand starting at position 3433 of SEQ ID NO: 1245222
uagugcuuagaaugaccaa

SEQ ID NO: 1546059 - RNA, 19 nt, Artificial Sequence
  Description of Artificial Sequence: Synthetic oligonucleotide
  Antisense strand to SEQ ID NO: 1546058
uuggucauucuaagcacua

SEQ ID NO: 1546060 - RNA, 19 nt, Artificial Sequence
  Description of Artificial Sequence: Synthetic oligonucleotide
  Sense strand starting at position 3456 of SEQ ID NO: 1245222
guaauaagauuauccgaag

SEQ ID NO: 1546061 - RNA, 19 nt, Artificial Sequence
  Description of Artificial Sequence: Synthetic oligonucleotide
  Antisense strand to SEQ ID NO: 1546060
cuucggauaaucuuauuac

SEQ ID NO: 1546062 - RNA, 19 nt, Artificial Sequence
  Description of Artificial Sequence: Synthetic oligonucleotide
  Sense strand starting at position 3500 of SEQ ID NO: 1245222
cccaaaguaugauuguaaa

SEQ ID NO: 1546063 - RNA, 19 nt, Artificial Sequence
  Description of Artificial Sequence: Synthetic oligonucleotide
  Antisense strand to SEQ ID NO: 1546062
uuuacaaucauacuuuggg

SEQ ID NO: 1546064 - RNA, 19 nt, Artificial Sequence
  Description of Artificial Sequence: Synthetic oligonucleotide
  Sense strand starting at position 3513 of SEQ ID NO: 1245222
uguaaagauucucugcaaa

SEQ ID NO: 1546065 - RNA, 19 nt, Artificial Sequence
  Description of Artificial Sequence: Synthetic oligonucleotide
  Antisense strand to SEQ ID NO: 1546064
uuugcagagaaucuuuaca

SEQ ID NO: 1546066 - RNA, 19 nt, Artificial Sequence
  Description of Artificial Sequence: Synthetic oligonucleotide
  Sense strand starting at position 3757 of SEQ ID NO: 1245222
auugauauccaggagccuu

SEQ ID NO: 1546067 - RNA, 19 nt, Artificial Sequence
  Description of Artificial Sequence: Synthetic oligonucleotide
  Antisense strand to SEQ ID NO: 1546066
aaggcuccuggauaucaau

SEQ ID NO: 1546068 - RNA, 19 nt, Artificial Sequence
  Description of Artificial Sequence: Synthetic oligonucleotide
  Sense strand starting at position 3897 of SEQ ID NO: 1245222
acgcaugaugcccacaaga

SEQ ID NO: 1546069 - RNA, 19 nt, Artificial Sequence
  Description of Artificial Sequence: Synthetic oligonucleotide
  Antisense strand to SEQ ID NO: 1546068
ucuugugggcaucaugcgu

SEQ ID NO: 1546070 - RNA, 19 nt, Artificial Sequence
  Description of Artificial Sequence: Synthetic oligonucleotide
  Sense strand starting at position 3899 of SEQ ID NO: 1245222
gcaugaugcccacaagagu

SEQ ID NO: 1546071 - RNA, 19 nt, Artificial Sequence
  Description of Artificial Sequence: Synthetic oligonucleotide
  Antisense strand to SEQ ID NO: 1546070
acucuugugggcaucaugc

SEQ ID NO: 1546072 - RNA, 19 nt, Artificial Sequence
  Description of Artificial Sequence: Synthetic oligonucleotide
  Sense strand starting at position 3916 of SEQ ID NO: 1245222
gucuaagauucuccuuaug

SEQ ID NO: 1546073 - RNA, 19 nt, Artificial Sequence
  Description of Artificial Sequence: Synthetic oligonucleotide
  Antisense strand to SEQ ID NO: 1546072
cauaaggagaaucuuagac

SEQ ID NO: 1546074 - RNA, 19 nt, Artificial Sequence
  Description of Artificial Sequence: Synthetic oligonucleotide
  Sense strand starting at position 3918 of SEQ ID NO: 1245222
cuaagauucuccuuaugug

SEQ ID NO: 1546075 - RNA, 19 nt, Artificial Sequence
  Description of Artificial Sequence: Synthetic oligonucleotide
  Antisense strand to SEQ ID NO: 1546074
cacauaaggagaaucuuag

SEQ ID NO: 1546076 - RNA, 19 nt, Artificial Sequence
  Description of Artificial Sequence: Synthetic oligonucleotide
  Sense strand starting at position 3947 of SEQ ID NO: 1245222
acaguacaguucuuuggaa

SEQ ID NO: 1546077 - RNA, 19 nt, Artificial Sequence
  Description of Artificial Sequence: Synthetic oligonucleotide
  Antisense strand to SEQ ID NO: 1546076
uuccaaagaacuguacugu

SEQ ID NO: 1546078 - RNA, 19 nt, Artificial Sequence
  Description of Artificial Sequence: Synthetic oligonucleotide
  Sense strand starting at position 3948 of SEQ ID NO: 1245222
caguacaguucuuuggaaa

SEQ ID NO: 1546079 - RNA, 19 nt, Artificial Sequence
  Description of Artificial Sequence: Synthetic oligonucleotide
  Antisense strand to SEQ ID NO: 1546078
uuuccaaagaacuguacug

SEQ ID NO: 1546080 - RNA, 19 nt, Artificial Sequence
  Description of Artificial Sequence: Synthetic oligonucleotide
  Sense strand starting at position 3949 of SEQ ID NO: 1245222
aguacaguucuuuggaaau

SEQ ID NO: 1546081 - RNA, 19 nt, Artificial Sequence
  Description of Artificial Sequence: Synthetic oligonucleotide
  Antisense strand to SEQ ID NO: 1546080
auuuccaaagaacuguacu

SEQ ID NO: 1546082 - RNA, 19 nt, Artificial Sequence
  Description of Artificial Sequence: Synthetic oligonucleotide
  Sense strand starting at position 3961 of SEQ ID NO: 1245222
uggaaauuagagggcaagu

SEQ ID NO: 1546083 - RNA, 19 nt, Artificial Sequence
  Description of Artificial Sequence: Synthetic oligonucleotide
  Antisense strand to SEQ ID NO: 1546082
acuugcccucuaauuucca

SEQ ID NO: 1546084 - RNA, 19 nt, Artificial Sequence
  Description of Artificial Sequence: Synthetic oligonucleotide
  Sense strand starting at position 34 of SEQ ID NO: 1245223
cuguuaucacacugaaagg

SEQ ID NO: 1546085 - RNA, 19 nt, Artificial Sequence
  Description of Artificial Sequence: Synthetic oligonucleotide
  Antisense strand to SEQ ID NO: 1546084
ccuuucagugugauaacag

SEQ ID NO: 1546086 - RNA, 19 nt, Artificial Sequence
  Description of Artificial Sequence: Synthetic oligonucleotide
  Sense strand starting at position 86 of SEQ ID NO: 1245223
agagaacaguaugcauaau

SEQ ID NO: 1546087 - RNA, 19 nt, Artificial Sequence
  Description of Artificial Sequence: Synthetic oligonucleotide
  Antisense strand to SEQ ID NO: 1546086
auuaugcauacuguucucu

SEQ ID NO: 1546088 - RNA, 19 nt, Artificial Sequence
  Description of Artificial Sequence: Synthetic oligonucleotide
  Sense strand starting at position 257 of SEQ ID NO: 1245223
ggcauuagauccucacuac

SEQ ID NO: 1546089 - RNA, 19 nt, Artificial Sequence
  Description of Artificial Sequence: Synthetic oligonucleotide
  Antisense strand to SEQ ID NO: 1546088
guagugaggaucuaaugcc

SEQ ID NO: 1546090 - RNA, 19 nt, Artificial Sequence
  Description of Artificial Sequence: Synthetic oligonucleotide
  Sense strand starting at position 376 of SEQ ID NO: 1245223
ggccuuugacuacacugau

SEQ ID NO: 1546091 - RNA, 19 nt, Artificial Sequence
  Description of Artificial Sequence: Synthetic oligonucleotide
  Antisense strand to SEQ ID NO: 1546090
aucaguguagucaaaggcc

SEQ ID NO: 1546092 - RNA, 19 nt, Artificial Sequence
  Description of Artificial Sequence: Synthetic oligonucleotide
  Sense strand starting at position 549 of SEQ ID NO: 1245223
gggugucaaagucauauaa

SEQ ID NO: 1546093 - RNA, 19 nt, Artificial Sequence
  Description of Artificial Sequence: Synthetic oligonucleotide
  Antisense strand to SEQ ID NO: 1546092
uuauaugacuuugacaccc

SEQ ID NO: 1546094 - RNA, 19 nt, Artificial Sequence
  Description of Artificial Sequence: Synthetic oligonucleotide
  Sense strand starting at position 964 of SEQ ID NO: 1245223
agagaagauuuaugagcca

SEQ ID NO: 1546095 - RNA, 19 nt, Artificial Sequence
  Description of Artificial Sequence: Synthetic oligonucleotide
  Antisense strand to SEQ ID NO: 1546094
uggcucauaaaucuucucu

SEQ ID NO: 1546096 - RNA, 19 nt, Artificial Sequence
  Description of Artificial Sequence: Synthetic oligonucleotide
  Sense strand starting at position 1103 of SEQ ID NO: 1245223
ucuggaaauuugcauauga

SEQ ID NO: 1546097 - RNA, 19 nt, Artificial Sequence
  Description of Artificial Sequence: Synthetic oligonucleotide
  Antisense strand to SEQ ID NO: 1546096
ucauaugcaaauuuccaga

SEQ ID NO: 1546098 - RNA, 19 nt, Artificial Sequence
  Description of Artificial Sequence: Synthetic oligonucleotide
  Sense strand starting at position 1293 of SEQ ID NO: 1245223
agccuuuaucucuaaggca

SEQ ID NO: 1546099 - RNA, 19 nt, Artificial Sequence
  Description of Artificial Sequence: Synthetic oligonucleotide
  Antisense strand to SEQ ID NO: 1546098
ugccuuagagauaaaggcu

SEQ ID NO: 1546100 - RNA, 19 nt, Artificial Sequence
  Description of Artificial Sequence: Synthetic oligonucleotide
  Sense strand starting at position 1307 of SEQ ID NO: 1245223
aggcauaaucuagguacua

SEQ ID NO: 1546101 - RNA, 19 nt, Artificial Sequence
  Description of Artificial Sequence: Synthetic oligonucleotide
  Antisense strand to SEQ ID NO: 1546100
uaguaccuagauuaugccu

SEQ ID NO: 1546102 - RNA, 19 nt, Artificial Sequence
  Description of Artificial Sequence: Synthetic oligonucleotide
  Sense strand starting at position 1308 of SEQ ID NO: 1245223
ggcauaaucuagguacuaa

SEQ ID NO: 1546103 - RNA, 19 nt, Artificial Sequence
  Description of Artificial Sequence: Synthetic oligonucleotide
  Antisense strand to SEQ ID NO: 1546102
uuaguaccuagauuaugcc

SEQ ID NO: 1546104 - RNA, 19 nt, Artificial Sequence
  Description of Artificial Sequence: Synthetic oligonucleotide
  Sense strand starting at position 1384 of SEQ ID NO: 1245223
cuaauugcccuggaacuaa

SEQ ID NO: 1546105 - RNA, 19 nt, Artificial Sequence
  Description of Artificial Sequence: Synthetic oligonucleotide
  Antisense strand to SEQ ID NO: 1546104
uuaguuccagggcaauuag

SEQ ID NO: 1546106 - RNA, 19 nt, Artificial Sequence
  Description of Artificial Sequence: Synthetic oligonucleotide
  Sense strand starting at position 1464 of SEQ ID NO: 1245223
cgacgcuauccacaaauga

SEQ ID NO: 1546107 - RNA, 19 nt, Artificial Sequence
  Description of Artificial Sequence: Synthetic oligonucleotide
  Antisense strand to SEQ ID NO: 1546106
ucauuuguggauagcgucg

SEQ ID NO: 1546108 - RNA, 19 nt, Artificial Sequence
  Description of Artificial Sequence: Synthetic oligonucleotide
  Sense strand starting at position 1561 of SEQ ID NO: 1245223
cuuugcuguccacaggaau

SEQ ID NO: 1546109 - RNA, 19 nt, Artificial Sequence
  Description of Artificial Sequence: Synthetic oligonucleotide
  Antisense strand to SEQ ID NO: 1546108
auuccuguggacagcaaag

SEQ ID NO: 1546110 - RNA, 19 nt, Artificial Sequence
  Description of Artificial Sequence: Synthetic oligonucleotide
  Sense strand starting at position 1574 of SEQ ID NO: 1245223
aggaaugcacccugaauac

SEQ ID NO: 1546111 - RNA, 19 nt, Artificial Sequence
  Description of Artificial Sequence: Synthetic oligonucleotide
  Antisense strand to SEQ ID NO: 1546110
guauucagggugcauuccu

SEQ ID NO: 1546112 - RNA, 19 nt, Artificial Sequence
  Description of Artificial Sequence: Synthetic oligonucleotide
  Sense strand starting at position 2037 of SEQ ID NO: 1245223
auaaucugacgucaugcaa

SEQ ID NO: 1546113 - RNA, 19 nt, Artificial Sequence
  Description of Artificial Sequence: Synthetic oligonucleotide
  Antisense strand to SEQ ID NO: 1546112
uugcaugacgucagauuau

SEQ ID NO: 1546114 - RNA, 19 nt, Artificial Sequence
  Description of Artificial Sequence: Synthetic oligonucleotide
  Sense strand starting at position 2255 of SEQ ID NO: 1245223
acgguagguccucaauaaa

SEQ ID NO: 1546115 - RNA, 19 nt, Artificial Sequence
  Description of Artificial Sequence: Synthetic oligonucleotide
  Antisense strand to SEQ ID NO: 1546114
uuuauugaggaccuaccgu

SEQ ID NO: 1546116 - RNA, 19 nt, Artificial Sequence
  Description of Artificial Sequence: Synthetic oligonucleotide
  Sense strand starting at position 2654 of SEQ ID NO: 1245223
guccauucucguccugcua

SEQ ID NO: 1546117 - RNA, 19 nt, Artificial Sequence
  Description of Artificial Sequence: Synthetic oligonucleotide
  Antisense strand to SEQ ID NO: 1546116
uagcaggacgagaauggac

SEQ ID NO: 1546118 - RNA, 19 nt, Artificial Sequence
  Description of Artificial Sequence: Synthetic oligonucleotide
  Sense strand starting at position 2822 of SEQ ID NO: 1245223
ugaagauguguuuauccua

SEQ ID NO: 1546119 - RNA, 19 nt, Artificial Sequence
  Description of Artificial Sequence: Synthetic oligonucleotide
  Antisense strand to SEQ ID NO: 1546118
uaggauaaacacaucuuca

SEQ ID NO: 1546120 - RNA, 19 nt, Artificial Sequence
  Description of Artificial Sequence: Synthetic oligonucleotide
  Sense strand starting at position 2830 of SEQ ID NO: 1245223
uguuuauccuagguaagau

SEQ ID NO: 1546121 - RNA, 19 nt, Artificial Sequence
  Description of Artificial Sequence: Synthetic oligonucleotide
  Antisense strand to SEQ ID NO: 1546120
aucuuaccuaggauaaaca

SEQ ID NO: 1546122 - RNA, 19 nt, Artificial Sequence
  Description of Artificial Sequence: Synthetic oligonucleotide
  Sense strand starting at position 2874 of SEQ ID NO: 1245223
aaaugugaauccuuaugga

SEQ ID NO: 1546123 - RNA, 19 nt, Artificial Sequence
  Description of Artificial Sequence: Synthetic oligonucleotide
  Antisense strand to SEQ ID NO: 1546122
uccauaaggauucacauuu

SEQ ID NO: 1546124 - RNA, 19 nt, Artificial Sequence
  Description of Artificial Sequence: Synthetic oligonucleotide
  Sense strand starting at position 3133 of SEQ ID NO: 1245223
ccaacuucccaguagucaa

SEQ ID NO: 1546125 - RNA, 19 nt, Artificial Sequence
  Description of Artificial Sequence: Synthetic oligonucleotide
  Antisense strand to SEQ ID NO: 1546124
uugacuacugggaaguugg

SEQ ID NO: 1546126 - RNA, 19 nt, Artificial Sequence
  Description of Artificial Sequence: Synthetic oligonucleotide
  Sense strand starting at position 3226 of SEQ ID NO: 1245223
aguauaagauguccuaaug

SEQ ID NO: 1546127 - RNA, 19 nt, Artificial Sequence
  Description of Artificial Sequence: Synthetic oligonucleotide
  Antisense strand to SEQ ID NO: 1546126
cauuaggacaucuuauacu

SEQ ID NO: 1546128 - RNA, 19 nt, Artificial Sequence
  Description of Artificial Sequence: Synthetic oligonucleotide
  Sense strand starting at position 3319 of SEQ ID NO: 1245223
auggaaaucucuccuggua

SEQ ID NO: 1546129 - RNA, 19 nt, Artificial Sequence
  Description of Artificial Sequence: Synthetic oligonucleotide
  Antisense strand to SEQ ID NO: 1546128
uaccaggagagauuuccau

SEQ ID NO: 1546130 - RNA, 19 nt, Artificial Sequence
  Description of Artificial Sequence: Synthetic oligonucleotide
  Sense strand starting at position 3351 of SEQ ID NO: 1245223
gugggaagaucugcuggaa

SEQ ID NO: 1546131 - RNA, 19 nt, Artificial Sequence
  Description of Artificial Sequence: Synthetic oligonucleotide
  Antisense strand to SEQ ID NO: 1546130
uuccagcagaucuucccac

SEQ ID NO: 1546132 - RNA, 19 nt, Artificial Sequence
  Description of Artificial Sequence: Synthetic oligonucleotide
  Sense strand starting at position 3354 of SEQ ID NO: 1245223
ggaagaucugcuggaacug

SEQ ID NO: 1546133 - RNA, 19 nt, Artificial Sequence
  Description of Artificial Sequence: Synthetic oligonucleotide
  Antisense strand to SEQ ID NO: 1546132
caguuccagcagaucuucc

SEQ ID NO: 1546134 - RNA, 19 nt, Artificial Sequence
  Description of Artificial Sequence: Synthetic oligonucleotide
  Sense strand starting at position 3469 of SEQ ID NO: 1245223
ucaggacagugcuugacaa

SEQ ID NO: 1546135 - RNA, 19 nt, Artificial Sequence
  Description of Artificial Sequence: Synthetic oligonucleotide
  Antisense strand to SEQ ID NO: 1546134
uugucaagcacuguccuga

SEQ ID NO: 1546136 - RNA, 19 nt, Artificial Sequence
  Description of Artificial Sequence: Synthetic oligonucleotide
  Sense strand starting at position 3522 of SEQ ID NO: 1245223
acugaugccugaucacuga

SEQ ID NO: 1546137 - RNA, 19 nt, Artificial Sequence
  Description of Artificial Sequence: Synthetic oligonucleotide
  Antisense strand to SEQ ID NO: 1546136
ucagugaucaggcaucagu

SEQ ID NO: 1546138 - RNA, 19 nt, Artificial Sequence
  Description of Artificial Sequence: Synthetic oligonucleotide
  Sense strand starting at position 3639 of SEQ ID NO: 1245223
ucacucuuucgauagagug

SEQ ID NO: 1546139 - RNA, 19 nt, Artificial Sequence
  Description of Artificial Sequence: Synthetic oligonucleotide
  Antisense strand to SEQ ID NO: 1546138
cacucuaucgaaagaguga

SEQ ID NO: 1546140 - RNA, 19 nt, Artificial Sequence
  Description of Artificial Sequence: Synthetic oligonucleotide
  Sense strand starting at position 3655 of SEQ ID NO: 1245223
gugggaaguuaguucugaa

SEQ ID NO: 1546141 - RNA, 19 nt, Artificial Sequence
  Description of Artificial Sequence: Synthetic oligonucleotide
  Antisense strand to SEQ ID NO: 1546140
uucagaacuaacuucccac

SEQ ID NO: 1546142 - RNA, 19 nt, Artificial Sequence
  Description of Artificial Sequence: Synthetic oligonucleotide
  Sense strand starting at position 3759 of SEQ ID NO: 1245223
cuuguuucugaguaaagag

SEQ ID NO: 1546143 - RNA, 19 nt, Artificial Sequence
  Description of Artificial Sequence: Synthetic oligonucleotide
  Antisense strand to SEQ ID NO: 1546142
cucuuuacucagaaacaag

SEQ ID NO: 1546144 - RNA, 19 nt, Artificial Sequence
  Description of Artificial Sequence: Synthetic oligonucleotide
  Sense strand starting at position 3768 of SEQ ID NO: 1245223
gaguaaagagguuaauugu

SEQ ID NO: 1546145 - RNA, 19 nt, Artificial Sequence
  Description of Artificial Sequence: Synthetic oligonucleotide
  Antisense strand to SEQ ID NO: 1546144
acaauuaaccucuuuacuc

SEQ ID NO: 1546146 - RNA, 19 nt, Artificial Sequence
  Description of Artificial Sequence: Synthetic oligonucleotide
  Sense strand starting at position 3844 of SEQ ID NO: 1245223
acacuaagucaauaucugu

SEQ ID NO: 1546147 - RNA, 19 nt, Artificial Sequence
  Description of Artificial Sequence: Synthetic oligonucleotide
  Antisense strand to SEQ ID NO: 1546146
acagauauugacuuagugu

SEQ ID NO: 1546148 - RNA, 19 nt, Artificial Sequence
  Description of Artificial Sequence: Synthetic oligonucleotide
  Sense strand starting at position 3847 of SEQ ID NO: 1245223
cuaagucaauaucuguaua

SEQ ID NO: 1546149 - RNA, 19 nt, Artificial Sequence
  Description of Artificial Sequence: Synthetic oligonucleotide
  Antisense strand to SEQ ID NO: 1546148
uauacagauauugacuuag

SEQ ID NO: 1546150 - RNA, 19 nt, Artificial Sequence
  Description of Artificial Sequence: Synthetic oligonucleotide
  Sense strand starting at position 3850 of SEQ ID NO: 1245223
agucaauaucuguauaugu

SEQ ID NO: 1546151 - RNA, 19 nt, Artificial Sequence
  Description of Artificial Sequence: Synthetic oligonucleotide
  Antisense strand to SEQ ID NO: 1546150
acauauacagauauugacu

SEQ ID NO: 1546152 - RNA, 19 nt, Artificial Sequence
  Description of Artificial Sequence: Synthetic oligonucleotide
  Sense strand starting at position 3873 of SEQ ID NO: 1245223
guacauguauauccacaca

SEQ ID NO: 1546153 - RNA, 19 nt, Artificial Sequence
  Description of Artificial Sequence: Synthetic oligonucleotide
  Antisense strand to SEQ ID NO: 1546152
uguguggauauacauguac

SEQ ID NO: 1546154 - RNA, 19 nt, Artificial Sequence
  Description of Artificial Sequence: Synthetic oligonucleotide
  Sense strand starting at position 3926 of SEQ ID NO: 1245223
uggaaagaaugguuuguga

SEQ ID NO: 1546155 - RNA, 19 nt, Artificial Sequence
  Description of Artificial Sequence: Synthetic oligonucleotide
  Antisense strand to SEQ ID NO: 1546154
ucacaaaccauucuuucca

SEQ ID NO: 1546156 - RNA, 19 nt, Artificial Sequence
  Description of Artificial Sequence: Synthetic oligonucleotide
  Sense strand starting at position 3928 of SEQ ID NO: 1245223
gaaagaaugguuugugauu

SEQ ID NO: 1546157 - RNA, 19 nt, Artificial Sequence
  Description of Artificial Sequence: Synthetic oligonucleotide
  Antisense strand to SEQ ID NO: 1546156
aaucacaaaccauucuuuc

SEQ ID NO: 1546158 - RNA, 19 nt, Artificial Sequence
  Description of Artificial Sequence: Synthetic oligonucleotide
  Sense strand starting at position 3929 of SEQ ID NO: 1245223
aaagaaugguuugugauug

SEQ ID NO: 1546159 - RNA, 19 nt, Artificial Sequence
  Description of Artificial Sequence: Synthetic oligonucleotide
  Antisense strand to SEQ ID NO: 1546158
caaucacaaaccauucuuu

SEQ ID NO: 1546160 - RNA, 19 nt, Artificial Sequence
  Description of Artificial Sequence: Synthetic oligonucleotide
  Sense strand starting at position 3973 of SEQ ID NO: 1245223
agucauuaaugccugggau

SEQ ID NO: 1546161 - RNA, 19 nt, Artificial Sequence
  Description of Artificial Sequence: Synthetic oligonucleotide
  Antisense strand to SEQ ID NO: 1546160
aucccaggcauuaaugacu

SEQ ID NO: 1546162 - RNA, 19 nt, Artificial Sequence
  Description of Artificial Sequence: Synthetic oligonucleotide
  Sense strand starting at position 3975 of SEQ ID NO: 1245223
ucauuaaugccugggauua

SEQ ID NO: 1546163 - RNA, 19 nt, Artificial Sequence
  Description of Artificial Sequence: Synthetic oligonucleotide
  Antisense strand to SEQ ID NO: 1546162
uaaucccaggcauuaauga

SEQ ID NO: 1546164 - RNA, 19 nt, Artificial Sequence
  Description of Artificial Sequence: Synthetic oligonucleotide
  Sense strand starting at position 48 of SEQ ID NO: 1245224
caguuaggagacugaguuu

SEQ ID NO: 1546165 - RNA, 19 nt, Artificial Sequence
  Description of Artificial Sequence: Synthetic oligonucleotide
  Antisense strand to SEQ ID NO: 1546164
aaacucagucuccuaacug

SEQ ID NO: 1546166 - RNA, 19 nt, Artificial Sequence
  Description of Artificial Sequence: Synthetic oligonucleotide
  Sense strand starting at position 51 of SEQ ID NO: 1245224
uuaggagacugaguuuaca

SEQ ID NO: 1546167 - RNA, 19 nt, Artificial Sequence
  Description of Artificial Sequence: Synthetic oligonucleotide
  Antisense strand to SEQ ID NO: 1546166
uguaaacucagucuccuaa

SEQ ID NO: 1546168 - RNA, 19 nt, Artificial Sequence
  Description of Artificial Sequence: Synthetic oligonucleotide
  Sense strand starting at position 166 of SEQ ID NO: 1245224
gugggcuguaacgagagau

SEQ ID NO: 1546169 - RNA, 19 nt, Artificial Sequence
  Description of Artificial Sequence: Synthetic oligonucleotide
  Antisense strand to SEQ ID NO: 1546168
aucucucguuacagcccac

SEQ ID NO: 1546170 - RNA, 19 nt, Artificial Sequence
  Description of Artificial Sequence: Synthetic oligonucleotide
  Sense strand starting at position 353 of SEQ ID NO: 1245224
gaguucugugguuagaauc

SEQ ID NO: 1546171 - RNA, 19 nt, Artificial Sequence
  Description of Artificial Sequence: Synthetic oligonucleotide
  Antisense strand to SEQ ID NO: 1546170
gauucuaaccacagaacuc

SEQ ID NO: 1546172 - RNA, 19 nt, Artificial Sequence
  Description of Artificial Sequence: Synthetic oligonucleotide
  Sense strand starting at position 363 of SEQ ID NO: 1245224
guuagaauccuagagucca

SEQ ID NO: 1546173 - RNA, 19 nt, Artificial Sequence
  Description of Artificial Sequence: Synthetic oligonucleotide
  Antisense strand to SEQ ID NO: 1546172
uggacucuaggauucuaac

SEQ ID NO: 1546174 - RNA, 19 nt, Artificial Sequence
  Description of Artificial Sequence: Synthetic oligonucleotide
  Sense strand starting at position 666 of SEQ ID NO: 1245224
ggugcuuccguuccaagua

SEQ ID NO: 1546175 - RNA, 19 nt, Artificial Sequence
  Description of Artificial Sequence: Synthetic oligonucleotide
  Antisense strand to SEQ ID NO: 1546174
uacuuggaacggaagcacc

SEQ ID NO: 1546176 - RNA, 19 nt, Artificial Sequence
  Description of Artificial Sequence: Synthetic oligonucleotide
  Sense strand starting at position 757 of SEQ ID NO: 1245224
aguucucaccacuggacaa

SEQ ID NO: 1546177 - RNA, 19 nt, Artificial Sequence
  Description of Artificial Sequence: Synthetic oligonucleotide
  Antisense strand to SEQ ID NO: 1546176
uuguccaguggugagaacu

SEQ ID NO: 1546178 - RNA, 19 nt, Artificial Sequence
  Description of Artificial Sequence: Synthetic oligonucleotide
  Sense strand starting at position 802 of SEQ ID NO: 1245224
gccaguaaagccucgcuuu

SEQ ID NO: 1546179 - RNA, 19 nt, Artificial Sequence
  Description of Artificial Sequence: Synthetic oligonucleotide
  Antisense strand to SEQ ID NO: 1546178
aaagcgaggcuuuacuggc

SEQ ID NO: 1546180 - RNA, 19 nt, Artificial Sequence
  Description of Artificial Sequence: Synthetic oligonucleotide
  Sense strand starting at position 839 of SEQ ID NO: 1245224
cugauuaccguuuauuaga

SEQ ID NO: 1546181 - RNA, 19 nt, Artificial Sequence
  Description of Artificial Sequence: Synthetic oligonucleotide
  Antisense strand to SEQ ID NO: 1546180
ucuaauaaacgguaaucag

SEQ ID NO: 1546182 - RNA, 19 nt, Artificial Sequence
  Description of Artificial Sequence: Synthetic oligonucleotide
  Sense strand starting at position 904 of SEQ ID NO: 1245224
cgcuuuauucgccuuuaaa

SEQ ID NO: 1546183 - RNA, 19 nt, Artificial Sequence
  Description of Artificial Sequence: Synthetic oligonucleotide
  Antisense strand to SEQ ID NO: 1546182
uuuaaaggcgaauaaagcg

SEQ ID NO: 1546184 - RNA, 19 nt, Artificial Sequence
  Description of Artificial Sequence: Synthetic oligonucleotide
  Sense strand starting at position 954 of SEQ ID NO: 1245224
cugcuaaauccauaggucu

SEQ ID NO: 1546185 - RNA, 19 nt, Artificial Sequence
  Description of Artificial Sequence: Synthetic oligonucleotide
  Antisense strand to SEQ ID NO: 1546184
agaccuauggauuuagcag

SEQ ID NO: 1546186 - RNA, 19 nt, Artificial Sequence
  Description of Artificial Sequence: Synthetic oligonucleotide
  Sense strand starting at position 961 of SEQ ID NO: 1245224
auccauaggucucucaaga

SEQ ID NO: 1546187 - RNA, 19 nt, Artificial Sequence
  Description of Artificial Sequence: Synthetic oligonucleotide
  Antisense strand to SEQ ID NO: 1546186
ucuugagagaccuauggau

SEQ ID NO: 1546188 - RNA, 19 nt, Artificial Sequence
  Description of Artificial Sequence: Synthetic oligonucleotide
  Sense strand starting at position 1023 of SEQ ID NO: 1245224
aagacacuuccauggcgaa

SEQ ID NO: 1546189 - RNA, 19 nt, Artificial Sequence
  Description of Artificial Sequence: Synthetic oligonucleotide
  Antisense strand to SEQ ID NO: 1546188
uucgccauggaagugucuu

SEQ ID NO: 1546190 - RNA, 19 nt, Artificial Sequence
  Description of Artificial Sequence: Synthetic oligonucleotide
  Sense strand starting at position 1038 of SEQ ID NO: 1245224
cgaauugaauuagcccaaa

SEQ ID NO: 1546191 - RNA, 19 nt, Artificial Sequence
  Description of Artificial Sequence: Synthetic oligonucleotide
  Antisense strand to SEQ ID NO: 1546190
uuugggcuaauucaauucg

SEQ ID NO: 1546192 - RNA, 19 nt, Artificial Sequence
  Description of Artificial Sequence: Synthetic oligonucleotide
  Sense strand starting at position 1071 of SEQ ID NO: 1245224
gggacaagguauuacauuu

SEQ ID NO: 1546193 - RNA, 19 nt, Artificial Sequence
  Description of Artificial Sequence: Synthetic oligonucleotide
  Antisense strand to SEQ ID NO: 1546192
aaauguaauaccuuguccc

SEQ ID NO: 1546194 - RNA, 19 nt, Artificial Sequence
  Description of Artificial Sequence: Synthetic oligonucleotide
  Sense strand starting at position 1179 of SEQ ID NO: 1245224
cggauacugagcugaagaa

SEQ ID NO: 1546195 - RNA, 19 nt, Artificial Sequence
  Description of Artificial Sequence: Synthetic oligonucleotide
  Antisense strand to SEQ ID NO: 1546194
uucuucagcucaguauccg

SEQ ID NO: 1546196 - RNA, 19 nt, Artificial Sequence
  Description of Artificial Sequence: Synthetic oligonucleotide
  Sense strand starting at position 1191 of SEQ ID NO: 1245224
ugaagaacuucccaauuug

SEQ ID NO: 1546197 - RNA, 19 nt, Artificial Sequence
  Description of Artificial Sequence: Synthetic oligonucleotide
  Antisense strand to SEQ ID NO: 1546196
caaauugggaaguucuuca

SEQ ID NO: 1546198 - RNA, 19 nt, Artificial Sequence
  Description of Artificial Sequence: Synthetic oligonucleotide
  Sense strand starting at position 1307 of SEQ ID NO: 1245224
gcaaguugacguuagaaac

SEQ ID NO: 1546199 - RNA, 19 nt, Artificial Sequence
  Description of Artificial Sequence: Synthetic oligonucleotide
  Antisense strand to SEQ ID NO: 1546198
guuucuaacgucaacuugc

SEQ ID NO: 1546200 - RNA, 19 nt, Artificial Sequence
  Description of Artificial Sequence: Synthetic oligonucleotide
  Sense strand starting at position 2063 of SEQ ID NO: 1245224
caaguccuuguagggaaau

SEQ ID NO: 1546201 - RNA, 19 nt, Artificial Sequence
  Description of Artificial Sequence: Synthetic oligonucleotide
  Antisense strand to SEQ ID NO: 1546200
auuucccuacaaggacuug

SEQ ID NO: 1546202 - RNA, 19 nt, Artificial Sequence
  Description of Artificial Sequence: Synthetic oligonucleotide
  Sense strand starting at position 2576 of SEQ ID NO: 1245224
ucugcuugccuagaacaau

SEQ ID NO: 1546203 - RNA, 19 nt, Artificial Sequence
  Description of Artificial Sequence: Synthetic oligonucleotide
  Antisense strand to SEQ ID NO: 1546202
auuguucuaggcaagcaga

SEQ ID NO: 1546204 - RNA, 19 nt, Artificial Sequence
  Description of Artificial Sequence: Synthetic oligonucleotide
  Sense strand starting at position 2590 of SEQ ID NO: 1245224
acaauucguaacgaugaau

SEQ ID NO: 1546205 - RNA, 19 nt, Artificial Sequence
  Description of Artificial Sequence: Synthetic oligonucleotide
  Antisense strand to SEQ ID NO: 1546204
auucaucguuacgaauugu

SEQ ID NO: 1546206 - RNA, 19 nt, Artificial Sequence
  Description of Artificial Sequence: Synthetic oligonucleotide
  Sense strand starting at position 2593 of SEQ ID NO: 1245224
auucguaacgaugaaucuu

SEQ ID NO: 1546207 - RNA, 19 nt, Artificial Sequence
  Description of Artificial Sequence: Synthetic oligonucleotide
  Antisense strand to SEQ ID NO: 1546206
aagauucaucguuacgaau

SEQ ID NO: 1546208 - RNA, 19 nt, Artificial Sequence
  Description of Artificial Sequence: Synthetic oligonucleotide
  Sense strand starting at position 2845 of SEQ ID NO: 1245224
ccacuugaauccuucugga

SEQ ID NO: 1546209 - RNA, 19 nt, Artificial Sequence
  Description of Artificial Sequence: Synthetic oligonucleotide
  Antisense strand to SEQ ID NO: 1546208
uccagaaggauucaagugg

SEQ ID NO: 1546210 - RNA, 19 nt, Artificial Sequence
  Description of Artificial Sequence: Synthetic oligonucleotide
  Sense strand starting at position 2890 of SEQ ID NO: 1245224
ggaauaguaucuucuaagu

SEQ ID NO: 1546211 - RNA, 19 nt, Artificial Sequence
  Description of Artificial Sequence: Synthetic oligonucleotide
  Antisense strand to SEQ ID NO: 1546210
acuuagaagauacuauucc

SEQ ID NO: 1546212 - RNA, 19 nt, Artificial Sequence
  Description of Artificial Sequence: Synthetic oligonucleotide
  Sense strand starting at position 2915 of SEQ ID NO: 1245224
agcuucuuucuugagggau

SEQ ID NO: 1546213 - RNA, 19 nt, Artificial Sequence
  Description of Artificial Sequence: Synthetic oligonucleotide
  Antisense strand to SEQ ID NO: 1546212
aucccucaagaaagaagcu

SEQ ID NO: 1546214 - RNA, 19 nt, Artificial Sequence
  Description of Artificial Sequence: Synthetic oligonucleotide
  Sense strand starting at position 2927 of SEQ ID NO: 1245224
gagggaucucgggaacguu

SEQ ID NO: 1546215 - RNA, 19 nt, Artificial Sequence
  Description of Artificial Sequence: Synthetic oligonucleotide
  Antisense strand to SEQ ID NO: 1546214
aacguucccgagaucccuc

SEQ ID NO: 1546216 - RNA, 19 nt, Artificial Sequence
  Description of Artificial Sequence: Synthetic oligonucleotide
  Sense strand starting at position 2949 of SEQ ID NO: 1245224
uguauuaaccacuaacgua

SEQ ID NO: 1546217 - RNA, 19 nt, Artificial Sequence
  Description of Artificial Sequence: Synthetic oligonucleotide
  Antisense strand to SEQ ID NO: 1546216
uacguuagugguuaauaca

SEQ ID NO: 1546218 - RNA, 19 nt, Artificial Sequence
  Description of Artificial Sequence: Synthetic oligonucleotide
  Sense strand starting at position 2957 of SEQ ID NO: 1245224
ccacuaacguauuccaaag

SEQ ID NO: 1546219 - RNA, 19 nt, Artificial Sequence
  Description of Artificial Sequence: Synthetic oligonucleotide
  Antisense strand to SEQ ID NO: 1546218
cuuuggaauacguuagugg

SEQ ID NO: 1546220 - RNA, 19 nt, Artificial Sequence
  Description of Artificial Sequence: Synthetic oligonucleotide
  Sense strand starting at position 3022 of SEQ ID NO: 1245224
uccacaggugauugaaaca

SEQ ID NO: 1546221 - RNA, 19 nt, Artificial Sequence
  Description of Artificial Sequence: Synthetic oligonucleotide
  Antisense strand to SEQ ID NO: 1546220
uguuucaaucaccugugga

SEQ ID NO: 1546222 - RNA, 19 nt, Artificial Sequence
  Description of Artificial Sequence: Synthetic oligonucleotide
  Sense strand starting at position 3056 of SEQ ID NO: 1245224
ccaaacuuccuugauggua

SEQ ID NO: 1546223 - RNA, 19 nt, Artificial Sequence
  Description of Artificial Sequence: Synthetic oligonucleotide
  Antisense strand to SEQ ID NO: 1546222
uaccaucaaggaaguuugg

SEQ ID NO: 1546224 - RNA, 19 nt, Artificial Sequence
  Description of Artificial Sequence: Synthetic oligonucleotide
  Sense strand starting at position 3108 of SEQ ID NO: 1245224
auaauugcgucauuuccaa

SEQ ID NO: 1546225 - RNA, 19 nt, Artificial Sequence
  Description of Artificial Sequence: Synthetic oligonucleotide
  Antisense strand to SEQ ID NO: 1546224
uuggaaaugacgcaauuau

SEQ ID NO: 1546226 - RNA, 19 nt, Artificial Sequence
  Description of Artificial Sequence: Synthetic oligonucleotide
  Sense strand starting at position 3159 of SEQ ID NO: 1245224
ugggaagccauccauguaa

SEQ ID NO: 1546227 - RNA, 19 nt, Artificial Sequence
  Description of Artificial Sequence: Synthetic oligonucleotide
  Antisense strand to SEQ ID NO: 1546226
uuacauggauggcuuccca

SEQ ID NO: 1546228 - RNA, 19 nt, Artificial Sequence
  Description of Artificial Sequence: Synthetic oligonucleotide
  Sense strand starting at position 3161 of SEQ ID NO: 1245224
ggaagccauccauguaaug

SEQ ID NO: 1546229 - RNA, 19 nt, Artificial Sequence
  Description of Artificial Sequence: Synthetic oligonucleotide
  Antisense strand to SEQ ID NO: 1546228
cauuacauggauggcuucc

SEQ ID NO: 1546230 - RNA, 19 nt, Artificial Sequence
  Description of Artificial Sequence: Synthetic oligonucleotide
  Sense strand starting at position 3284 of SEQ ID NO: 1245224
gcuugcgagcacuugcaau

SEQ ID NO: 1546231 - RNA, 19 nt, Artificial Sequence
  Description of Artificial Sequence: Synthetic oligonucleotide
  Antisense strand to SEQ ID NO: 1546230
auugcaagugcucgcaagc

SEQ ID NO: 1546232 - RNA, 19 nt, Artificial Sequence
  Description of Artificial Sequence: Synthetic oligonucleotide
  Sense strand starting at position 3446 of SEQ ID NO: 1245224
cuuugagucagguaauugu

SEQ ID NO: 1546233 - RNA, 19 nt, Artificial Sequence
  Description of Artificial Sequence: Synthetic oligonucleotide
  Antisense strand to SEQ ID NO: 1546232
acaauuaccugacucaaag

SEQ ID NO: 1546234 - RNA, 19 nt, Artificial Sequence
  Description of Artificial Sequence: Synthetic oligonucleotide
  Sense strand starting at position 3609 of SEQ ID NO: 1245224
cggaguuagcggaguauca

SEQ ID NO: 1546235 - RNA, 19 nt, Artificial Sequence
  Description of Artificial Sequence: Synthetic oligonucleotide
  Antisense strand to SEQ ID NO: 1546234
ugauacuccgcuaacuccg

SEQ ID NO: 1546236 - RNA, 19 nt, Artificial Sequence
  Description of Artificial Sequence: Synthetic oligonucleotide
  Sense strand starting at position 3667 of SEQ ID NO: 1245224
uuaguuagggccuauugaa

SEQ ID NO: 1546237 - RNA, 19 nt, Artificial Sequence
  Description of Artificial Sequence: Synthetic oligonucleotide
  Antisense strand to SEQ ID NO: 1546236
uucaauaggcccuaacuaa

SEQ ID NO: 1546238 - RNA, 19 nt, Artificial Sequence
  Description of Artificial Sequence: Synthetic oligonucleotide
  Sense strand starting at position 3703 of SEQ ID NO: 1245224
uaaacuugucugggaacua

SEQ ID NO: 1546239 - RNA, 19 nt, Artificial Sequence
  Description of Artificial Sequence: Synthetic oligonucleotide
  Antisense strand to SEQ ID NO: 1546238
uaguucccagacaaguuua

SEQ ID NO: 1546240 - RNA, 19 nt, Artificial Sequence
  Description of Artificial Sequence: Synthetic oligonucleotide
  Sense strand starting at position 3822 of SEQ ID NO: 1245224
ccugauugucuggagguga

SEQ ID NO: 1546241 - RNA, 19 nt, Artificial Sequence
  Description of Artificial Sequence: Synthetic oligonucleotide
  Antisense strand to SEQ ID NO: 1546240
ucaccuccagacaaucagg

SEQ ID NO: 1546242 - RNA, 19 nt, Artificial Sequence
  Description of Artificial Sequence: Synthetic oligonucleotide
  Sense strand starting at position 3935 of SEQ ID NO: 1245224
uuagucaaccaauguggaa

SEQ ID NO: 1546243 - RNA, 19 nt, Artificial Sequence
  Description of Artificial Sequence: Synthetic oligonucleotide
  Antisense strand to SEQ ID NO: 1546242
uuccacauugguugacuaa

SEQ ID NO: 1546244 - RNA, 19 nt, Artificial Sequence
  Description of Artificial Sequence: Synthetic oligonucleotide
  Sense strand starting at position 261 of SEQ ID NO: 1245225
cauggcaggugcucaaaua

SEQ ID NO: 1546245 - RNA, 19 nt, Artificial Sequence
  Description of Artificial Sequence: Synthetic oligonucleotide
  Antisense strand to SEQ ID NO: 1546244
uauuugagcaccugccaug

SEQ ID NO: 1546246 - RNA, 19 nt, Artificial Sequence
  Description of Artificial Sequence: Synthetic oligonucleotide
  Sense strand starting at position 262 of SEQ ID NO: 1245225
auggcaggugcucaaauaa

SEQ ID NO: 1546247 - RNA, 19 nt, Artificial Sequence
  Description of Artificial Sequence: Synthetic oligonucleotide
  Antisense strand to SEQ ID NO: 1546246
uuauuugagcaccugccau

SEQ ID NO: 1546248 - RNA, 19 nt, Artificial Sequence
  Description of Artificial Sequence: Synthetic oligonucleotide
  Sense strand starting at position 418 of SEQ ID NO: 1245225
ggaucugaauuccaacaug

SEQ ID NO: 1546249 - RNA, 19 nt, Artificial Sequence
  Description of Artificial Sequence: Synthetic oligonucleotide
  Antisense strand to SEQ ID NO: 1546248
cauguuggaauucagaucc

SEQ ID NO: 1546250 - RNA, 19 nt, Artificial Sequence
  Description of Artificial Sequence: Synthetic oligonucleotide
  Sense strand starting at position 490 of SEQ ID NO: 1245225
uaaggaaacuuaguagcua

SEQ ID NO: 1546251 - RNA, 19 nt, Artificial Sequence
  Description of Artificial Sequence: Synthetic oligonucleotide
  Antisense strand to SEQ ID NO: 1546250
uagcuacuaaguuuccuua

SEQ ID NO: 1546252 - RNA, 19 nt, Artificial Sequence
  Description of Artificial Sequence: Synthetic oligonucleotide
  Sense strand starting at position 514 of SEQ ID NO: 1245225
ugcuccauaccuggaagaa

SEQ ID NO: 1546253 - RNA, 19 nt, Artificial Sequence
  Description of Artificial Sequence: Synthetic oligonucleotide
  Antisense strand to SEQ ID NO: 1546252
uucuuccagguauggagca

SEQ ID NO: 1546254 - RNA, 19 nt, Artificial Sequence
  Description of Artificial Sequence: Synthetic oligonucleotide
  Sense strand starting at position 546 of SEQ ID NO: 1245225
gggacaacugggugcuaaa

SEQ ID NO: 1546255 - RNA, 19 nt, Artificial Sequence
  Description of Artificial Sequence: Synthetic oligonucleotide
  Antisense strand to SEQ ID NO: 1546254
uuuagcacccaguuguccc

SEQ ID NO: 1546256 - RNA, 19 nt, Artificial Sequence
  Description of Artificial Sequence: Synthetic oligonucleotide
  Sense strand starting at position 729 of SEQ ID NO: 1245225
caggaucuguacucaggaa

SEQ ID NO: 1546257 - RNA, 19 nt, Artificial Sequence
  Description of Artificial Sequence: Synthetic oligonucleotide
  Antisense strand to SEQ ID NO: 1546256
uuccugaguacagauccug

SEQ ID NO: 1546258 - RNA, 19 nt, Artificial Sequence
  Description of Artificial Sequence: Synthetic oligonucleotide
  Sense strand starting at position 799 of SEQ ID NO: 1245225
gcugaaauucucuaccaug

SEQ ID NO: 1546259 - RNA, 19 nt, Artificial Sequence
  Description of Artificial Sequence: Synthetic oligonucleotide
  Antisense strand to SEQ ID NO: 1546258
caugguagagaauuucagc

SEQ ID NO: 1546260 - RNA, 19 nt, Artificial Sequence
  Description of Artificial Sequence: Synthetic oligonucleotide
  Sense strand starting at position 822 of SEQ ID NO: 1245225
uguggauaccugggcauaa

SEQ ID NO: 1546261 - RNA, 19 nt, Artificial Sequence
  Description of Artificial Sequence: Synthetic oligonucleotide
  Antisense strand to SEQ ID NO: 1546260
uuaugcccagguauccaca

SEQ ID NO: 1546262 - RNA, 19 nt, Artificial Sequence
  Description of Artificial Sequence: Synthetic oligonucleotide
  Sense strand starting at position 856 of SEQ ID NO: 1245225
caaagcuaauguguagaau

SEQ ID NO: 1546263 - RNA, 19 nt, Artificial Sequence
  Description of Artificial Sequence: Synthetic oligonucleotide
  Antisense strand to SEQ ID NO: 1546262
auucuacacauuagcuuug

SEQ ID NO: 1546264 - RNA, 19 nt, Artificial Sequence
  Description of Artificial Sequence: Synthetic oligonucleotide
  Sense strand starting at position 928 of SEQ ID NO: 1245225
cagauauaccuggagccuu

SEQ ID NO: 1546265 - RNA, 19 nt, Artificial Sequence
  Description of Artificial Sequence: Synthetic oligonucleotide
  Antisense strand to SEQ ID NO: 1546264
aaggcuccagguauaucug

SEQ ID NO: 1546266 - RNA, 19 nt, Artificial Sequence
  Description of Artificial Sequence: Synthetic oligonucleotide
  Sense strand starting at position 945 of SEQ ID NO: 1245225
uuugaaucuugggagaaag

SEQ ID NO: 1546267 - RNA, 19 nt, Artificial Sequence
  Description of Artificial Sequence: Synthetic oligonucleotide
  Antisense strand to SEQ ID NO: 1546266
cuuucucccaagauucaaa

SEQ ID NO: 1546268 - RNA, 19 nt, Artificial Sequence
  Description of Artificial Sequence: Synthetic oligonucleotide
  Sense strand starting at position 1015 of SEQ ID NO: 1245225
gcaacucuugucuggacau

SEQ ID NO: 1546269 - RNA, 19 nt, Artificial Sequence
  Description of Artificial Sequence: Synthetic oligonucleotide
  Antisense strand to SEQ ID NO: 1546268
auguccagacaagaguugc

SEQ ID NO: 1546270 - RNA, 19 nt, Artificial Sequence
  Description of Artificial Sequence: Synthetic oligonucleotide
  Sense strand starting at position 1366 of SEQ ID NO: 1245225
cuuucuuauuacuccguua

SEQ ID NO: 1546271 - RNA, 19 nt, Artificial Sequence
  Description of Artificial Sequence: Synthetic oligonucleotide
  Antisense strand to SEQ ID NO: 1546270
uaacggaguaauaagaaag

SEQ ID NO: 1546272 - RNA, 19 nt, Artificial Sequence
  Description of Artificial Sequence: Synthetic oligonucleotide
  Sense strand starting at position 1371 of SEQ ID NO: 1245225
uuauuacuccguuagugaa

SEQ ID NO: 1546273 - RNA, 19 nt, Artificial Sequence
  Description of Artificial Sequence: Synthetic oligonucleotide
  Antisense strand to SEQ ID NO: 1546272
uucacuaacggaguaauaa

SEQ ID NO: 1546274 - RNA, 19 nt, Artificial Sequence
  Description of Artificial Sequence: Synthetic oligonucleotide
  Sense strand starting at position 1373 of SEQ ID NO: 1245225
auuacuccguuagugaaga

SEQ ID NO: 1546275 - RNA, 19 nt, Artificial Sequence
  Description of Artificial Sequence: Synthetic oligonucleotide
  Antisense strand to SEQ ID NO: 1546274
ucuucacuaacggaguaau

SEQ ID NO: 1546276 - RNA, 19 nt, Artificial Sequence
  Description of Artificial Sequence: Synthetic oligonucleotide
  Sense strand starting at position 1405 of SEQ ID NO: 1245225
cucuauggcuucuuagaua

SEQ ID NO: 1546277 - RNA, 19 nt, Artificial Sequence
  Description of Artificial Sequence: Synthetic oligonucleotide
  Antisense strand to SEQ ID NO: 1546276
uaucuaagaagccauagag

SEQ ID NO: 1546278 - RNA, 19 nt, Artificial Sequence
  Description of Artificial Sequence: Synthetic oligonucleotide
  Sense strand starting at position 1464 of SEQ ID NO: 1245225
gguccuacuuaccuaucua

SEQ ID NO: 1546279 - RNA, 19 nt, Artificial Sequence
  Description of Artificial Sequence: Synthetic oligonucleotide
  Antisense strand to SEQ ID NO: 1546278
uagauagguaaguaggacc

SEQ ID NO: 1546280 - RNA, 19 nt, Artificial Sequence
  Description of Artificial Sequence: Synthetic oligonucleotide
  Sense strand starting at position 1490 of SEQ ID NO: 1245225
uuccgacuauuagucauua

SEQ ID NO: 1546281 - RNA, 19 nt, Artificial Sequence
  Description of Artificial Sequence: Synthetic oligonucleotide
  Antisense strand to SEQ ID NO: 1546280
uaaugacuaauagucggaa

SEQ ID NO: 1546282 - RNA, 19 nt, Artificial Sequence
  Description of Artificial Sequence: Synthetic oligonucleotide
  Sense strand starting at position 1495 of SEQ ID NO: 1245225
acuauuagucauuacaguu

SEQ ID NO: 1546283 - RNA, 19 nt, Artificial Sequence
  Description of Artificial Sequence: Synthetic oligonucleotide
  Antisense strand to SEQ ID NO: 1546282
aacuguaaugacuaauagu

SEQ ID NO: 1546284 - RNA, 19 nt, Artificial Sequence
  Description of Artificial Sequence: Synthetic oligonucleotide
  Sense strand starting at position 1598 of SEQ ID NO: 1245225
ccacacaucuagccggaaa

SEQ ID NO: 1546285 - RNA, 19 nt, Artificial Sequence
  Description of Artificial Sequence: Synthetic oligonucleotide
  Antisense strand to SEQ ID NO: 1546284
uuuccggcuagaugugugg

SEQ ID NO: 1546286 - RNA, 19 nt, Artificial Sequence
  Description of Artificial Sequence: Synthetic oligonucleotide
  Sense strand starting at position 1655 of SEQ ID NO: 1245225
cagugaggucacgacucuu

SEQ ID NO: 1546287 - RNA, 19 nt, Artificial Sequence
  Description of Artificial Sequence: Synthetic oligonucleotide
  Antisense strand to SEQ ID NO: 1546286
aagagucgugaccucacug

SEQ ID NO: 1546288 - RNA, 19 nt, Artificial Sequence
  Description of Artificial Sequence: Synthetic oligonucleotide
  Sense strand starting at position 1790 of SEQ ID NO: 1245225
cacauuugagcccguauca

SEQ ID NO: 1546289 - RNA, 19 nt, Artificial Sequence
  Description of Artificial Sequence: Synthetic oligonucleotide
  Antisense strand to SEQ ID NO: 1546288
ugauacgggcucaaaugug

SEQ ID NO: 1546290 - RNA, 19 nt, Artificial Sequence
  Description of Artificial Sequence: Synthetic oligonucleotide
  Sense strand starting at position 2671 of SEQ ID NO: 1245225
cuccgauccgcugcgauau

SEQ ID NO: 1546291 - RNA, 19 nt, Artificial Sequence
  Description of Artificial Sequence: Synthetic oligonucleotide
  Antisense strand to SEQ ID NO: 1546290
auaucgcagcggaucggag

SEQ ID NO: 1546292 - RNA, 19 nt, Artificial Sequence
  Description of Artificial Sequence: Synthetic oligonucleotide
  Sense strand starting at position 2866 of SEQ ID NO: 1245225
ggcgcgauccgccuaggau

SEQ ID NO: 1546293 - RNA, 19 nt, Artificial Sequence
  Description of Artificial Sequence: Synthetic oligonucleotide
  Antisense strand to SEQ ID NO: 1546292
auccuaggcggaucgcgcc

SEQ ID NO: 1546294 - RNA, 19 nt, Artificial Sequence
  Description of Artificial Sequence: Synthetic oligonucleotide
  Sense strand starting at position 3065 of SEQ ID NO: 1245225
gcauuacagcccgaguuaa

SEQ ID NO: 1546295 - RNA, 19 nt, Artificial Sequence
  Description of Artificial Sequence: Synthetic oligonucleotide
  Antisense strand to SEQ ID NO: 1546294
uuaacucgggcuguaaugc

SEQ ID NO: 1546296 - RNA, 19 nt, Artificial Sequence
  Description of Artificial Sequence: Synthetic oligonucleotide
  Sense strand starting at position 3076 of SEQ ID NO: 1245225
cgaguuaaauucuuuaacc

SEQ ID NO: 1546297 - RNA, 19 nt, Artificial Sequence
  Description of Artificial Sequence: Synthetic oligonucleotide
  Antisense strand to SEQ ID NO: 1546296
gguuaaagaauuuaacucg

SEQ ID NO: 1546298 - RNA, 19 nt, Artificial Sequence
  Description of Artificial Sequence: Synthetic oligonucleotide
  Sense strand starting at position 3307 of SEQ ID NO: 1245225
ggcuguguucuucaggaua

SEQ ID NO: 1546299 - RNA, 19 nt, Artificial Sequence
  Description of Artificial Sequence: Synthetic oligonucleotide
  Antisense strand to SEQ ID NO: 1546298
uauccugaagaacacagcc

SEQ ID NO: 1546300 - RNA, 19 nt, Artificial Sequence
  Description of Artificial Sequence: Synthetic oligonucleotide
  Sense strand starting at position 3491 of SEQ ID NO: 1245225
gggaguuuauauucuagaa

SEQ ID NO: 1546301 - RNA, 19 nt, Artificial Sequence
  Description of Artificial Sequence: Synthetic oligonucleotide
  Antisense strand to SEQ ID NO: 1546300
uucuagaauauaaacuccc

SEQ ID NO: 1546302 - RNA, 19 nt, Artificial Sequence
  Description of Artificial Sequence: Synthetic oligonucleotide
  Sense strand starting at position 3503 of SEQ ID NO: 1245225
ucuagaaaucuuugaucag

SEQ ID NO: 1546303 - RNA, 19 nt, Artificial Sequence
  Description of Artificial Sequence: Synthetic oligonucleotide
  Antisense strand to SEQ ID NO: 1546302
cugaucaaagauuucuaga

SEQ ID NO: 1546304 - RNA, 19 nt, Artificial Sequence
  Description of Artificial Sequence: Synthetic oligonucleotide
  Sense strand starting at position 3504 of SEQ ID NO: 1245225
cuagaaaucuuugaucaga

SEQ ID NO: 1546305 - RNA, 19 nt, Artificial Sequence
  Description of Artificial Sequence: Synthetic oligonucleotide
  Antisense strand to SEQ ID NO: 1546304
ucugaucaaagauuucuag

SEQ ID NO: 1546306 - RNA, 19 nt, Artificial Sequence
  Description of Artificial Sequence: Synthetic oligonucleotide
  Sense strand starting at position 3517 of SEQ ID NO: 1245225
aucagaaauuccuagaaga

SEQ ID NO: 1546307 - RNA, 19 nt, Artificial Sequence
  Description of Artificial Sequence: Synthetic oligonucleotide
  Antisense strand to SEQ ID NO: 1546306
ucuucuaggaauuucugau

SEQ ID NO: 1546308 - RNA, 19 nt, Artificial Sequence
  Description of Artificial Sequence: Synthetic oligonucleotide
  Sense strand starting at position 3653 of SEQ ID NO: 1245225
gguggaggauaauucgaau

SEQ ID NO: 1546309 - RNA, 19 nt, Artificial Sequence
  Description of Artificial Sequence: Synthetic oligonucleotide
  Antisense strand to SEQ ID NO: 1546308
auucgaauuauccuccacc

SEQ ID NO: 1546310 - RNA, 19 nt, Artificial Sequence
  Description of Artificial Sequence: Synthetic oligonucleotide
  Sense strand starting at position 3656 of SEQ ID NO: 1245225
ggaggauaauucgaauuuc

SEQ ID NO: 1546311 - RNA, 19 nt, Artificial Sequence
  Description of Artificial Sequence: Synthetic oligonucleotide
  Antisense strand to SEQ ID NO: 1546310
gaaauucgaauuauccucc

SEQ ID NO: 1546312 - RNA, 19 nt, Artificial Sequence
  Description of Artificial Sequence: Synthetic oligonucleotide
  Sense strand starting at position 3724 of SEQ ID NO: 1245225
gcucuaaacgcgguucaua

SEQ ID NO: 1546313 - RNA, 19 nt, Artificial Sequence
  Description of Artificial Sequence: Synthetic oligonucleotide
  Antisense strand to SEQ ID NO: 1546312
uaugaaccgcguuuagagc

SEQ ID NO: 1546314 - RNA, 19 nt, Artificial Sequence
  Description of Artificial Sequence: Synthetic oligonucleotide
  Sense strand starting at position 3735 of SEQ ID NO: 1245225
gguucauaacuguguguau

SEQ ID NO: 1546315 - RNA, 19 nt, Artificial Sequence
  Description of Artificial Sequence: Synthetic oligonucleotide
  Antisense strand to SEQ ID NO: 1546314
auacacacaguuaugaacc

SEQ ID NO: 1546316 - RNA, 19 nt, Artificial Sequence
  Description of Artificial Sequence: Synthetic oligonucleotide
  Sense strand starting at position 3824 of SEQ ID NO: 1245225
uugguucgauagucuaaau

SEQ ID NO: 1546317 - RNA, 19 nt, Artificial Sequence
  Description of Artificial Sequence: Synthetic oligonucleotide
  Antisense strand to SEQ ID NO: 1546316
auuuagacuaucgaaccaa

SEQ ID NO: 1546318 - RNA, 19 nt, Artificial Sequence
  Description of Artificial Sequence: Synthetic oligonucleotide
  Sense strand starting at position 3867 of SEQ ID NO: 1245225
ugugcuguccaauacaauc

SEQ ID NO: 1546319 - RNA, 19 nt, Artificial Sequence
  Description of Artificial Sequence: Synthetic oligonucleotide
  Antisense strand to SEQ ID NO: 1546318
gauuguauuggacagcaca

SEQ ID NO: 1546320 - RNA, 19 nt, Artificial Sequence
  Description of Artificial Sequence: Synthetic oligonucleotide
  Sense strand starting at position 3915 of SEQ ID NO: 1245225
uuuaguuccucaguuguau

SEQ ID NO: 1546321 - RNA, 19 nt, Artificial Sequence
  Description of Artificial Sequence: Synthetic oligonucleotide
  Antisense strand to SEQ ID NO: 1546320
auacaacugaggaacuaaa

SEQ ID NO: 1546322 - RNA, 19 nt, Artificial Sequence
  Description of Artificial Sequence: Synthetic oligonucleotide
  Sense strand starting at position 3981 of SEQ ID NO: 1245225
cuggaaugcacuggcuauu

SEQ ID NO: 1546323 - RNA, 19 nt, Artificial Sequence
  Description of Artificial Sequence: Synthetic oligonucleotide
  Antisense strand to SEQ ID NO: 1546322
aauagccagugcauuccag

SEQ ID NO: 1546324 - RNA, 19 nt, Artificial Sequence
  Description of Artificial Sequence: Synthetic oligonucleotide
  Sense strand starting at position 43 of SEQ ID NO: 1245226
ggguuuauggcacaaucau

SEQ ID NO: 1546325 - RNA, 19 nt, Artificial Sequence
  Description of Artificial Sequence: Synthetic oligonucleotide
  Antisense strand to SEQ ID NO: 1546324
augauugugccauaaaccc

SEQ ID NO: 1546326 - RNA, 19 nt, Artificial Sequence
  Description of Artificial Sequence: Synthetic oligonucleotide
  Sense strand starting at position 367 of SEQ ID NO: 1245226
cauggcaggugcucaaaua

SEQ ID NO: 1546327 - RNA, 19 nt, Artificial Sequence
  Description of Artificial Sequence: Synthetic oligonucleotide
  Antisense strand to SEQ ID NO: 1546326
uauuugagcaccugccaug

SEQ ID NO: 1546328 - RNA, 19 nt, Artificial Sequence
  Description of Artificial Sequence: Synthetic oligonucleotide
  Sense strand starting at position 368 of SEQ ID NO: 1245226
auggcaggugcucaaauaa

SEQ ID NO: 1546329 - RNA, 19 nt, Artificial Sequence
  Description of Artificial Sequence: Synthetic oligonucleotide
  Antisense strand to SEQ ID NO: 1546328
uuauuugagcaccugccau

SEQ ID NO: 1546330 - RNA, 19 nt, Artificial Sequence
  Description of Artificial Sequence: Synthetic oligonucleotide
  Sense strand starting at position 524 of SEQ ID NO: 1245226
ggaucugaauuccaacaug

SEQ ID NO: 1546331 - RNA, 19 nt, Artificial Sequence
  Description of Artificial Sequence: Synthetic oligonucleotide
  Antisense strand to SEQ ID NO: 1546330
cauguuggaauucagaucc

SEQ ID NO: 1546332 - RNA, 19 nt, Artificial Sequence
  Description of Artificial Sequence: Synthetic oligonucleotide
  Sense strand starting at position 596 of SEQ ID NO: 1245226
uaaggaaacuuaguagcua

SEQ ID NO: 1546333 - RNA, 19 nt, Artificial Sequence
  Description of Artificial Sequence: Synthetic oligonucleotide
  Antisense strand to SEQ ID NO: 1546332
uagcuacuaaguuuccuua

SEQ ID NO: 1546334 - RNA, 19 nt, Artificial Sequence
  Description of Artificial Sequence: Synthetic oligonucleotide
  Sense strand starting at position 620 of SEQ ID NO: 1245226
ugcuccauaccuggaagaa

SEQ ID NO: 1546335 - RNA, 19 nt, Artificial Sequence
  Description of Artificial Sequence: Synthetic oligonucleotide
  Antisense strand to SEQ ID NO: 1546334
uucuuccagguauggagca

SEQ ID NO: 1546336 - RNA, 19 nt, Artificial Sequence
  Description of Artificial Sequence: Synthetic oligonucleotide
  Sense strand starting at position 652 of SEQ ID NO: 1245226
gggacaacugggugcuaaa

SEQ ID NO: 1546337 - RNA, 19 nt, Artificial Sequence
  Description of Artificial Sequence: Synthetic oligonucleotide
  Antisense strand to SEQ ID NO: 1546336
uuuagcacccaguuguccc

SEQ ID NO: 1546338 - RNA, 19 nt, Artificial Sequence
  Description of Artificial Sequence: Synthetic oligonucleotide
  Sense strand starting at position 835 of SEQ ID NO: 1245226
caggaucuguacucaggaa

SEQ ID NO: 1546339 - RNA, 19 nt, Artificial Sequence
  Description of Artificial Sequence: Synthetic oligonucleotide
  Antisense strand to SEQ ID NO: 1546338
uuccugaguacagauccug

SEQ ID NO: 1546340 - RNA, 19 nt, Artificial Sequence
  Description of Artificial Sequence: Synthetic oligonucleotide
  Sense strand starting at position 905 of SEQ ID NO: 1245226
gcugaaauucucuaccaug

SEQ ID NO: 1546341 - RNA, 19 nt, Artificial Sequence
  Description of Artificial Sequence: Synthetic oligonucleotide
  Antisense strand to SEQ ID NO: 1546340
caugguagagaauuucagc

SEQ ID NO: 1546342 - RNA, 19 nt, Artificial Sequence
  Description of Artificial Sequence: Synthetic oligonucleotide
  Sense strand starting at position 928 of SEQ ID NO: 1245226
uguggauaccugggcauaa

SEQ ID NO: 1546343 - RNA, 19 nt, Artificial Sequence
  Description of Artificial Sequence: Synthetic oligonucleotide
  Antisense strand to SEQ ID NO: 1546342
uuaugcccagguauccaca

SEQ ID NO: 1546344 - RNA, 19 nt, Artificial Sequence
  Description of Artificial Sequence: Synthetic oligonucleotide
  Sense strand starting at position 962 of SEQ ID NO: 1245226
caaagcuaauguguagaau

SEQ ID NO: 1546345 - RNA, 19 nt, Artificial Sequence
  Description of Artificial Sequence: Synthetic oligonucleotide
  Antisense strand to SEQ ID NO: 1546344
auucuacacauuagcuuug

SEQ ID NO: 1546346 - RNA, 19 nt, Artificial Sequence
  Description of Artificial Sequence: Synthetic oligonucleotide
  Sense strand starting at position 1034 of SEQ ID NO: 1245226
cagauauaccuggagccuu

SEQ ID NO: 1546347 - RNA, 19 nt, Artificial Sequence
  Description of Artificial Sequence: Synthetic oligonucleotide
  Antisense strand to SEQ ID NO: 1546346
aaggcuccagguauaucug

SEQ ID NO: 1546348 - RNA, 19 nt, Artificial Sequence
  Description of Artificial Sequence: Synthetic oligonucleotide
  Sense strand starting at position 1051 of SEQ ID NO: 1245226
uuugaaucuugggagaaag

SEQ ID NO: 1546349 - RNA, 19 nt, Artificial Sequence
  Description of Artificial Sequence: Synthetic oligonucleotide
  Antisense strand to SEQ ID NO: 1546348
cuuucucccaagauucaaa

SEQ ID NO: 1546350 - RNA, 19 nt, Artificial Sequence
  Description of Artificial Sequence: Synthetic oligonucleotide
  Sense strand starting at position 1121 of SEQ ID NO: 1245226
gcaacucuugucuggacau

SEQ ID NO: 1546351 - RNA, 19 nt, Artificial Sequence
  Description of Artificial Sequence: Synthetic oligonucleotide
  Antisense strand to SEQ ID NO: 1546350
auguccagacaagaguugc

SEQ ID NO: 1546352 - RNA, 19 nt, Artificial Sequence
  Description of Artificial Sequence: Synthetic oligonucleotide
  Sense strand starting at position 1472 of SEQ ID NO: 1245226
cuuucuuauuacuccguua

SEQ ID NO: 1546353 - RNA, 19 nt, Artificial Sequence
  Description of Artificial Sequence: Synthetic oligonucleotide
  Antisense strand to SEQ ID NO: 1546352
uaacggaguaauaagaaag

SEQ ID NO: 1546354 - RNA, 19 nt, Artificial Sequence
  Description of Artificial Sequence: Synthetic oligonucleotide
  Sense strand starting at position 1475 of SEQ ID NO: 1245226
ucuuauuacuccguuagug

SEQ ID NO: 1546355 - RNA, 19 nt, Artificial Sequence
  Description of Artificial Sequence: Synthetic oligonucleotide
  Antisense strand to SEQ ID NO: 1546354
cacuaacggaguaauaaga

SEQ ID NO: 1546356 - RNA, 19 nt, Artificial Sequence
  Description of Artificial Sequence: Synthetic oligonucleotide
  Sense strand starting at position 1477 of SEQ ID NO: 1245226
uuauuacuccguuagugaa

SEQ ID NO: 1546357 - RNA, 19 nt, Artificial Sequence
  Description of Artificial Sequence: Synthetic oligonucleotide
  Antisense strand to SEQ ID NO: 1546356
uucacuaacggaguaauaa

SEQ ID NO: 1546358 - RNA, 19 nt, Artificial Sequence
  Description of Artificial Sequence: Synthetic oligonucleotide
  Sense strand starting at position 1479 of SEQ ID NO: 1245226
auuacuccguuagugaaga

SEQ ID NO: 1546359 - RNA, 19 nt, Artificial Sequence
  Description of Artificial Sequence: Synthetic oligonucleotide
  Antisense strand to SEQ ID NO: 1546358
ucuucacuaacggaguaau

SEQ ID NO: 1546360 - RNA, 19 nt, Artificial Sequence
  Description of Artificial Sequence: Synthetic oligonucleotide
  Sense strand starting at position 1511 of SEQ ID NO: 1245226
cucuauggcuucuuagaua

SEQ ID NO: 1546361 - RNA, 19 nt, Artificial Sequence
  Description of Artificial Sequence: Synthetic oligonucleotide
  Antisense strand to SEQ ID NO: 1546360
uaucuaagaagccauagag

SEQ ID NO: 1546362 - RNA, 19 nt, Artificial Sequence
  Description of Artificial Sequence: Synthetic oligonucleotide
  Sense strand starting at position 1570 of SEQ ID NO: 1245226
gguccuacuuaccuaucua

SEQ ID NO: 1546363 - RNA, 19 nt, Artificial Sequence
  Description of Artificial Sequence: Synthetic oligonucleotide
  Antisense strand to SEQ ID NO: 1546362
uagauagguaaguaggacc

SEQ ID NO: 1546364 - RNA, 19 nt, Artificial Sequence
  Description of Artificial Sequence: Synthetic oligonucleotide
  Sense strand starting at position 1596 of SEQ ID NO: 1245226
uuccgacuauuagucauua

SEQ ID NO: 1546365 - RNA, 19 nt, Artificial Sequence
  Description of Artificial Sequence: Synthetic oligonucleotide
  Antisense strand to SEQ ID NO: 1546364
uaaugacuaauagucggaa

SEQ ID NO: 1546366 - RNA, 19 nt, Artificial Sequence
  Description of Artificial Sequence: Synthetic oligonucleotide
  Sense strand starting at position 1601 of SEQ ID NO: 1245226
acuauuagucauuacaguu

SEQ ID NO: 1546367 - RNA, 19 nt, Artificial Sequence
  Description of Artificial Sequence: Synthetic oligonucleotide
  Antisense strand to SEQ ID NO: 1546366
aacuguaaugacuaauagu

SEQ ID NO: 1546368 - RNA, 19 nt, Artificial Sequence
  Description of Artificial Sequence: Synthetic oligonucleotide
  Sense strand starting at position 1704 of SEQ ID NO: 1245226
ccacacaucuagccggaaa

SEQ ID NO: 1546369 - RNA, 19 nt, Artificial Sequence
  Description of Artificial Sequence: Synthetic oligonucleotide
  Antisense strand to SEQ ID NO: 1546368
uuuccggcuagaugugugg

SEQ ID NO: 1546370 - RNA, 19 nt, Artificial Sequence
  Description of Artificial Sequence: Synthetic oligonucleotide
  Sense strand starting at position 1761 of SEQ ID NO: 1245226
cagugaggucacgacucuu

SEQ ID NO: 1546371 - RNA, 19 nt, Artificial Sequence
  Description of Artificial Sequence: Synthetic oligonucleotide
  Antisense strand to SEQ ID NO: 1546370
aagagucgugaccucacug

SEQ ID NO: 1546372 - RNA, 19 nt, Artificial Sequence
  Description of Artificial Sequence: Synthetic oligonucleotide
  Sense strand starting at position 1896 of SEQ ID NO: 1245226
cacauuugagcccguauca

SEQ ID NO: 1546373 - RNA, 19 nt, Artificial Sequence
  Description of Artificial Sequence: Synthetic oligonucleotide
  Antisense strand to SEQ ID NO: 1546372
ugauacgggcucaaaugug

SEQ ID NO: 1546374 - RNA, 19 nt, Artificial Sequence
  Description of Artificial Sequence: Synthetic oligonucleotide
  Sense strand starting at position 2777 of SEQ ID NO: 1245226
cuccgauccgcugcgauau

SEQ ID NO: 1546375 - RNA, 19 nt, Artificial Sequence
  Description of Artificial Sequence: Synthetic oligonucleotide
  Antisense strand to SEQ ID NO: 1546374
auaucgcagcggaucggag

SEQ ID NO: 1546376 - RNA, 19 nt, Artificial Sequence
  Description of Artificial Sequence: Synthetic oligonucleotide
  Sense strand starting at position 2972 of SEQ ID NO: 1245226
ggcgcgauccgccuaggau

SEQ ID NO: 1546377 - RNA, 19 nt, Artificial Sequence
  Description of Artificial Sequence: Synthetic oligonucleotide
  Antisense strand to SEQ ID NO: 1546376
auccuaggcggaucgcgcc

SEQ ID NO: 1546378 - RNA, 19 nt, Artificial Sequence
  Description of Artificial Sequence: Synthetic oligonucleotide
  Sense strand starting at position 3171 of SEQ ID NO: 1245226
gcauuacagcccgaguuaa

SEQ ID NO: 1546379 - RNA, 19 nt, Artificial Sequence
  Description of Artificial Sequence: Synthetic oligonucleotide
  Antisense strand to SEQ ID NO: 1546378
uuaacucgggcuguaaugc

SEQ ID NO: 1546380 - RNA, 19 nt, Artificial Sequence
  Description of Artificial Sequence: Synthetic oligonucleotide
  Sense strand starting at position 3182 of SEQ ID NO: 1245226
cgaguuaaauucuuuaacc

SEQ ID NO: 1546381 - RNA, 19 nt, Artificial Sequence
  Description of Artificial Sequence: Synthetic oligonucleotide
  Antisense strand to SEQ ID NO: 1546380
gguuaaagaauuuaacucg

SEQ ID NO: 1546382 - RNA, 19 nt, Artificial Sequence
  Description of Artificial Sequence: Synthetic oligonucleotide
  Sense strand starting at position 3413 of SEQ ID NO: 1245226
ggcuguguucuucaggaua

SEQ ID NO: 1546383 - RNA, 19 nt, Artificial Sequence
  Description of Artificial Sequence: Synthetic oligonucleotide
  Antisense strand to SEQ ID NO: 1546382
uauccugaagaacacagcc

SEQ ID NO: 1546384 - RNA, 19 nt, Artificial Sequence
  Description of Artificial Sequence: Synthetic oligonucleotide
  Sense strand starting at position 3597 of SEQ ID NO: 1245226
gggaguuuauauucuagaa

SEQ ID NO: 1546385 - RNA, 19 nt, Artificial Sequence
  Description of Artificial Sequence: Synthetic oligonucleotide
  Antisense strand to SEQ ID NO: 1546384
uucuagaauauaaacuccc

SEQ ID NO: 1546386 - RNA, 19 nt, Artificial Sequence
  Description of Artificial Sequence: Synthetic oligonucleotide
  Sense strand starting at position 3609 of SEQ ID NO: 1245226
ucuagaaaucuuugaucag

SEQ ID NO: 1546387 - RNA, 19 nt, Artificial Sequence
  Description of Artificial Sequence: Synthetic oligonucleotide
  Antisense strand to SEQ ID NO: 1546386
cugaucaaagauuucuaga

SEQ ID NO: 1546388 - RNA, 19 nt, Artificial Sequence
  Description of Artificial Sequence: Synthetic oligonucleotide
  Sense strand starting at position 3610 of SEQ ID NO: 1245226
cuagaaaucuuugaucaga

SEQ ID NO: 1546389 - RNA, 19 nt, Artificial Sequence
  Description of Artificial Sequence: Synthetic oligonucleotide
  Antisense strand to SEQ ID NO: 1546388
ucugaucaaagauuucuag

SEQ ID NO: 1546390 - RNA, 19 nt, Artificial Sequence
  Description of Artificial Sequence: Synthetic oligonucleotide
  Sense strand starting at position 3623 of SEQ ID NO: 1245226
aucagaaauuccuagaaga

SEQ ID NO: 1546391 - RNA, 19 nt, Artificial Sequence
  Description of Artificial Sequence: Synthetic oligonucleotide
  Antisense strand to SEQ ID NO: 1546390
ucuucuaggaauuucugau

SEQ ID NO: 1546392 - RNA, 19 nt, Artificial Sequence
  Description of Artificial Sequence: Synthetic oligonucleotide
  Sense strand starting at position 3759 of SEQ ID NO: 1245226
gguggaggauaauucgaau

SEQ ID NO: 1546393 - RNA, 19 nt, Artificial Sequence
  Description of Artificial Sequence: Synthetic oligonucleotide
  Antisense strand to SEQ ID NO: 1546392
auucgaauuauccuccacc

SEQ ID NO: 1546394 - RNA, 19 nt, Artificial Sequence
  Description of Artificial Sequence: Synthetic oligonucleotide
  Sense strand starting at position 3762 of SEQ ID NO: 1245226
ggaggauaauucgaauuuc

SEQ ID NO: 1546395 - RNA, 19 nt, Artificial Sequence
  Description of Artificial Sequence: Synthetic oligonucleotide
  Antisense strand to SEQ ID NO: 1546394
gaaauucgaauuauccucc

SEQ ID NO: 1546396 - RNA, 19 nt, Artificial Sequence
  Description of Artificial Sequence: Synthetic oligonucleotide
  Sense strand starting at position 3830 of SEQ ID NO: 1245226
gcucuaaacgcgguucaua

SEQ ID NO: 1546397 - RNA, 19 nt, Artificial Sequence
  Description of Artificial Sequence: Synthetic oligonucleotide
  Antisense strand to SEQ ID NO: 1546396
uaugaaccgcguuuagagc

SEQ ID NO: 1546398 - RNA, 19 nt, Artificial Sequence
  Description of Artificial Sequence: Synthetic oligonucleotide
  Sense strand starting at position 3841 of SEQ ID NO: 1245226
gguucauaacuguguguau

SEQ ID NO: 1546399 - RNA, 19 nt, Artificial Sequence
  Description of Artificial Sequence: Synthetic oligonucleotide
  Antisense strand to SEQ ID NO: 1546398
auacacacaguuaugaacc

SEQ ID NO: 1546400 - RNA, 19 nt, Artificial Sequence
  Description of Artificial Sequence: Synthetic oligonucleotide
  Sense strand starting at position 3930 of SEQ ID NO: 1245226
uugguucgauagucuaaau

SEQ ID NO: 1546401 - RNA, 19 nt, Artificial Sequence
  Description of Artificial Sequence: Synthetic oligonucleotide
  Antisense strand to SEQ ID NO: 1546400
auuuagacuaucgaaccaa

SEQ ID NO: 1546402 - RNA, 19 nt, Artificial Sequence
  Description of Artificial Sequence: Synthetic oligonucleotide
  Sense strand starting at position 3973 of SEQ ID NO: 1245226
ugugcuguccaauacaauc

SEQ ID NO: 1546403 - RNA, 19 nt, Artificial Sequence
  Description of Artificial Sequence: Synthetic oligonucleotide
  Antisense strand to SEQ ID NO: 1546402
gauuguauuggacagcaca

SEQ ID NO: 1546404 - RNA, 19 nt, Artificial Sequence
  Description of Artificial Sequence: Synthetic oligonucleotide
  Sense strand starting at position 14 of SEQ ID NO: 1245227
ugcuccauaccuggaagaa

SEQ ID NO: 1546405 - RNA, 19 nt, Artificial Sequence
  Description of Artificial Sequence: Synthetic oligonucleotide
  Antisense strand to SEQ ID NO: 1546404
uucuuccagguauggagca

SEQ ID NO: 1546406 - RNA, 19 nt, Artificial Sequence
  Description of Artificial Sequence: Synthetic oligonucleotide
  Sense strand starting at position 46 of SEQ ID NO: 1245227
gggacaacugggugcuaaa

SEQ ID NO: 1546407 - RNA, 19 nt, Artificial Sequence
  Description of Artificial Sequence: Synthetic oligonucleotide
  Antisense strand to SEQ ID NO: 1546406
uuuagcacccaguuguccc

SEQ ID NO: 1546408 - RNA, 19 nt, Artificial Sequence
  Description of Artificial Sequence: Synthetic oligonucleotide
  Sense strand starting at position 229 of SEQ ID NO: 1245227
caggaucuguacucaggaa

SEQ ID NO: 1546409 - RNA, 19 nt, Artificial Sequence
  Description of Artificial Sequence: Synthetic oligonucleotide
  Antisense strand to SEQ ID NO: 1546408
uuccugaguacagauccug

SEQ ID NO: 1546410 - RNA, 19 nt, Artificial Sequence
  Description of Artificial Sequence: Synthetic oligonucleotide
  Sense strand starting at position 299 of SEQ ID NO: 1245227
gcugaaauucucuaccaug

SEQ ID NO: 1546411 - RNA, 19 nt, Artificial Sequence
  Description of Artificial Sequence: Synthetic oligonucleotide
  Antisense strand to SEQ ID NO: 1546410
caugguagagaauuucagc

SEQ ID NO: 1546412 - RNA, 19 nt, Artificial Sequence
  Description of Artificial Sequence: Synthetic oligonucleotide
  Sense strand starting at position 322 of SEQ ID NO: 1245227
uguggauaccugggcauaa

SEQ ID NO: 1546413 - RNA, 19 nt, Artificial Sequence
  Description of Artificial Sequence: Synthetic oligonucleotide
  Antisense strand to SEQ ID NO: 1546412
uuaugcccagguauccaca

SEQ ID NO: 1546414 - RNA, 19 nt, Artificial Sequence
  Description of Artificial Sequence: Synthetic oligonucleotide
  Sense strand starting at position 356 of SEQ ID NO: 1245227
caaagcuaauguguagaau

SEQ ID NO: 1546415 - RNA, 19 nt, Artificial Sequence
  Description of Artificial Sequence: Synthetic oligonucleotide
  Antisense strand to SEQ ID NO: 1546414
auucuacacauuagcuuug

SEQ ID NO: 1546416 - RNA, 19 nt, Artificial Sequence
  Description of Artificial Sequence: Synthetic oligonucleotide
  Sense strand starting at position 428 of SEQ ID NO: 1245227
cagauauaccuggagccuu

SEQ ID NO: 1546417 - RNA, 19 nt, Artificial Sequence
  Description of Artificial Sequence: Synthetic oligonucleotide
  Antisense strand to SEQ ID NO: 1546416
aaggcuccagguauaucug

SEQ ID NO: 1546418 - RNA, 19 nt, Artificial Sequence
  Description of Artificial Sequence: Synthetic oligonucleotide
  Sense strand starting at position 445 of SEQ ID NO: 1245227
uuugaaucuugggagaaag

SEQ ID NO: 1546419 - RNA, 19 nt, Artificial Sequence
  Description of Artificial Sequence: Synthetic oligonucleotide
  Antisense strand to SEQ ID NO: 1546418
cuuucucccaagauucaaa

SEQ ID NO: 1546420 - RNA, 19 nt, Artificial Sequence
  Description of Artificial Sequence: Synthetic oligonucleotide
  Sense strand starting at position 515 of SEQ ID NO: 1245227
gcaacucuugucuggacau

SEQ ID NO: 1546421 - RNA, 19 nt, Artificial Sequence
  Description of Artificial Sequence: Synthetic oligonucleotide
  Antisense strand to SEQ ID NO: 1546420
auguccagacaagaguugc

SEQ ID NO: 1546422 - RNA, 19 nt, Artificial Sequence
  Description of Artificial Sequence: Synthetic oligonucleotide
  Sense strand starting at position 866 of SEQ ID NO: 1245227
cuuucuuauuacuccguua

SEQ ID NO: 1546423 - RNA, 19 nt, Artificial Sequence
  Description of Artificial Sequence: Synthetic oligonucleotide
  Antisense strand to SEQ ID NO: 1546422
uaacggaguaauaagaaag

SEQ ID NO: 1546424 - RNA, 19 nt, Artificial Sequence
  Description of Artificial Sequence: Synthetic oligonucleotide
  Sense strand starting at position 869 of SEQ ID NO: 1245227
ucuuauuacuccguuagug

SEQ ID NO: 1546425 - RNA, 19 nt, Artificial Sequence
  Description of Artificial Sequence: Synthetic oligonucleotide
  Antisense strand to SEQ ID NO: 1546424
cacuaacggaguaauaaga

SEQ ID NO: 1546426 - RNA, 19 nt, Artificial Sequence
  Description of Artificial Sequence: Synthetic oligonucleotide
  Sense strand starting at position 871 of SEQ ID NO: 1245227
uuauuacuccguuagugaa

SEQ ID NO: 1546427 - RNA, 19 nt, Artificial Sequence
  Description of Artificial Sequence: Synthetic oligonucleotide
  Antisense strand to SEQ ID NO: 1546426
uucacuaacggaguaauaa

SEQ ID NO: 1546428 - RNA, 19 nt, Artificial Sequence
  Description of Artificial Sequence: Synthetic oligonucleotide
  Sense strand starting at position 873 of SEQ ID NO: 1245227
auuacuccguuagugaaga

SEQ ID NO: 1546429 - RNA, 19 nt, Artificial Sequence
  Description of Artificial Sequence: Synthetic oligonucleotide
  Antisense strand to SEQ ID NO: 1546428
ucuucacuaacggaguaau

SEQ ID NO: 1546430 - RNA, 19 nt, Artificial Sequence
  Description of Artificial Sequence: Synthetic oligonucleotide
  Sense strand starting at position 905 of SEQ ID NO: 1245227
cucuauggcuucuuagaua

SEQ ID NO: 1546431 - RNA, 19 nt, Artificial Sequence
  Description of Artificial Sequence: Synthetic oligonucleotide
  Antisense strand to SEQ ID NO: 1546430
uaucuaagaagccauagag

SEQ ID NO: 1546432 - RNA, 19 nt, Artificial Sequence
  Description of Artificial Sequence: Synthetic oligonucleotide
  Sense strand starting at position 964 of SEQ ID NO: 1245227
gguccuacuuaccuaucua

SEQ ID NO: 1546433 - RNA, 19 nt, Artificial Sequence
  Description of Artificial Sequence: Synthetic oligonucleotide
  Antisense strand to SEQ ID NO: 1546432
uagauagguaaguaggacc

SEQ ID NO: 1546434 - RNA, 19 nt, Artificial Sequence
  Description of Artificial Sequence: Synthetic oligonucleotide
  Sense strand starting at position 990 of SEQ ID NO: 1245227
uuccgacuauuagucauua

SEQ ID NO: 1546435 - RNA, 19 nt, Artificial Sequence
  Description of Artificial Sequence: Synthetic oligonucleotide
  Antisense strand to SEQ ID NO: 1546434
uaaugacuaauagucggaa

SEQ ID NO: 1546436 - RNA, 19 nt, Artificial Sequence
  Description of Artificial Sequence: Synthetic oligonucleotide
  Sense strand starting at position 995 of SEQ ID NO: 1245227
acuauuagucauuacaguu

SEQ ID NO: 1546437 - RNA, 19 nt, Artificial Sequence
  Description of Artificial Sequence: Synthetic oligonucleotide
  Antisense strand to SEQ ID NO: 1546436
aacuguaaugacuaauagu

SEQ ID NO: 1546438 - RNA, 19 nt, Artificial Sequence
  Description of Artificial Sequence: Synthetic oligonucleotide
  Sense strand starting at position 1098 of SEQ ID NO: 1245227
ccacacaucuagccggaaa

SEQ ID NO: 1546439 - RNA, 19 nt, Artificial Sequence
  Description of Artificial Sequence: Synthetic oligonucleotide
  Antisense strand to SEQ ID NO: 1546438
uuuccggcuagaugugugg

SEQ ID NO: 1546440 - RNA, 19 nt, Artificial Sequence
  Description of Artificial Sequence: Synthetic oligonucleotide
  Sense strand starting at position 1155 of SEQ ID NO: 1245227
cagugaggucacgacucuu

SEQ ID NO: 1546441 - RNA, 19 nt, Artificial Sequence
  Description of Artificial Sequence: Synthetic oligonucleotide
  Antisense strand to SEQ ID NO: 1546440
aagagucgugaccucacug

SEQ ID NO: 1546442 - RNA, 19 nt, Artificial Sequence
  Description of Artificial Sequence: Synthetic oligonucleotide
  Sense strand starting at position 1189 of SEQ ID NO: 1245227
cccuauuucuguuaauggu

SEQ ID NO: 1546443 - RNA, 19 nt, Artificial Sequence
  Description of Artificial Sequence: Synthetic oligonucleotide
  Antisense strand to SEQ ID NO: 1546442
accauuaacagaaauaggg

SEQ ID NO: 1546444 - RNA, 19 nt, Artificial Sequence
  Description of Artificial Sequence: Synthetic oligonucleotide
  Sense strand starting at position 1290 of SEQ ID NO: 1245227
cacauuugagcccguauca

SEQ ID NO: 1546445 - RNA, 19 nt, Artificial Sequence
  Description of Artificial Sequence: Synthetic oligonucleotide
  Antisense strand to SEQ ID NO: 1546444
ugauacgggcucaaaugug

SEQ ID NO: 1546446 - RNA, 19 nt, Artificial Sequence
  Description of Artificial Sequence: Synthetic oligonucleotide
  Sense strand starting at position 2171 of SEQ ID NO: 1245227
cuccgauccgcugcgauau

SEQ ID NO: 1546447 - RNA, 19 nt, Artificial Sequence
  Description of Artificial Sequence: Synthetic oligonucleotide
  Antisense strand to SEQ ID NO: 1546446
auaucgcagcggaucggag

SEQ ID NO: 1546448 - RNA, 19 nt, Artificial Sequence
  Description of Artificial Sequence: Synthetic oligonucleotide
  Sense strand starting at position 2366 of SEQ ID NO: 1245227
ggcgcgauccgccuaggau

SEQ ID NO: 1546449 - RNA, 19 nt, Artificial Sequence
  Description of Artificial Sequence: Synthetic oligonucleotide
  Antisense strand to SEQ ID NO: 1546448
auccuaggcggaucgcgcc

SEQ ID NO: 1546450 - RNA, 19 nt, Artificial Sequence
  Description of Artificial Sequence: Synthetic oligonucleotide
  Sense strand starting at position 2565 of SEQ ID NO: 1245227
gcauuacagcccgaguuaa

SEQ ID NO: 1546451 - RNA, 19 nt, Artificial Sequence
  Description of Artificial Sequence: Synthetic oligonucleotide
  Antisense strand to SEQ ID NO: 1546450
uuaacucgggcuguaaugc

SEQ ID NO: 1546452 - RNA, 19 nt, Artificial Sequence
  Description of Artificial Sequence: Synthetic oligonucleotide
  Sense strand starting at position 2576 of SEQ ID NO: 1245227
cgaguuaaauucuuuaacc

SEQ ID NO: 1546453 - RNA, 19 nt, Artificial Sequence
  Description of Artificial Sequence: Synthetic oligonucleotide
  Antisense strand to SEQ ID NO: 1546452
gguuaaagaauuuaacucg

SEQ ID NO: 1546454 - RNA, 19 nt, Artificial Sequence
  Description of Artificial Sequence: Synthetic oligonucleotide
  Sense strand starting at position 2807 of SEQ ID NO: 1245227
ggcuguguucuucaggaua

SEQ ID NO: 1546455 - RNA, 19 nt, Artificial Sequence
  Description of Artificial Sequence: Synthetic oligonucleotide
  Antisense strand to SEQ ID NO: 1546454
uauccugaagaacacagcc

SEQ ID NO: 1546456 - RNA, 19 nt, Artificial Sequence
  Description of Artificial Sequence: Synthetic oligonucleotide
  Sense strand starting at position 2991 of SEQ ID NO: 1245227
gggaguuuauauucuagaa

SEQ ID NO: 1546457 - RNA, 19 nt, Artificial Sequence
  Description of Artificial Sequence: Synthetic oligonucleotide
  Antisense strand to SEQ ID NO: 1546456
uucuagaauauaaacuccc

SEQ ID NO: 1546458 - RNA, 19 nt, Artificial Sequence
  Description of Artificial Sequence: Synthetic oligonucleotide
  Sense strand starting at position 3003 of SEQ ID NO: 1245227
ucuagaaaucuuugaucag

SEQ ID NO: 1546459 - RNA, 19 nt, Artificial Sequence
  Description of Artificial Sequence: Synthetic oligonucleotide
  Antisense strand to SEQ ID NO: 1546458
cugaucaaagauuucuaga

SEQ ID NO: 1546460 - RNA, 19 nt, Artificial Sequence
  Description of Artificial Sequence: Synthetic oligonucleotide
  Sense strand starting at position 3004 of SEQ ID NO: 1245227
cuagaaaucuuugaucaga

SEQ ID NO: 1546461 - RNA, 19 nt, Artificial Sequence
  Description of Artificial Sequence: Synthetic oligonucleotide
  Antisense strand to SEQ ID NO: 1546460
ucugaucaaagauuucuag

SEQ ID NO: 1546462 - RNA, 19 nt, Artificial Sequence
  Description of Artificial Sequence: Synthetic oligonucleotide
  Sense strand starting at position 3017 of SEQ ID NO: 1245227
aucagaaauuccuagaaga

SEQ ID NO: 1546463 - RNA, 19 nt, Artificial Sequence
  Description of Artificial Sequence: Synthetic oligonucleotide
  Antisense strand to SEQ ID NO: 1546462
ucuucuaggaauuucugau

SEQ ID NO: 1546464 - RNA, 19 nt, Artificial Sequence
  Description of Artificial Sequence: Synthetic oligonucleotide
  Sense strand starting at position 3153 of SEQ ID NO: 1245227
gguggaggauaauucgaau

SEQ ID NO: 1546465 - RNA, 19 nt, Artificial Sequence
  Description of Artificial Sequence: Synthetic oligonucleotide
  Antisense strand to SEQ ID NO: 1546464
auucgaauuauccuccacc

SEQ ID NO: 1546466 - RNA, 19 nt, Artificial Sequence
  Description of Artificial Sequence: Synthetic oligonucleotide
  Sense strand starting at position 3156 of SEQ ID NO: 1245227
ggaggauaauucgaauuuc

SEQ ID NO: 1546467 - RNA, 19 nt, Artificial Sequence
  Description of Artificial Sequence: Synthetic oligonucleotide
  Antisense strand to SEQ ID NO: 1546466
gaaauucgaauuauccucc

SEQ ID NO: 1546468 - RNA, 19 nt, Artificial Sequence
  Description of Artificial Sequence: Synthetic oligonucleotide
  Sense strand starting at position 3224 of SEQ ID NO: 1245227
gcucuaaacgcgguucaua

SEQ ID NO: 1546469 - RNA, 19 nt, Artificial Sequence
  Description of Artificial Sequence: Synthetic oligonucleotide
  Antisense strand to SEQ ID NO: 1546468
uaugaaccgcguuuagagc

SEQ ID NO: 1546470 - RNA, 19 nt, Artificial Sequence
  Description of Artificial Sequence: Synthetic oligonucleotide
  Sense strand starting at position 3235 of SEQ ID NO: 1245227
gguucauaacuguguguau

SEQ ID NO: 1546471 - RNA, 19 nt, Artificial Sequence
  Description of Artificial Sequence: Synthetic oligonucleotide
  Antisense strand to SEQ ID NO: 1546470
auacacacaguuaugaacc

SEQ ID NO: 1546472 - RNA, 19 nt, Artificial Sequence
  Description of Artificial Sequence: Synthetic oligonucleotide
  Sense strand starting at position 3324 of SEQ ID NO: 1245227
uugguucgauagucuaaau

SEQ ID NO: 1546473 - RNA, 19 nt, Artificial Sequence
  Description of Artificial Sequence: Synthetic oligonucleotide
  Antisense strand to SEQ ID NO: 1546472
auuuagacuaucgaaccaa

SEQ ID NO: 1546474 - RNA, 19 nt, Artificial Sequence
  Description of Artificial Sequence: Synthetic oligonucleotide
  Sense strand starting at position 3367 of SEQ ID NO: 1245227
ugugcuguccaauacaauc

SEQ ID NO: 1546475 - RNA, 19 nt, Artificial Sequence
  Description of Artificial Sequence: Synthetic oligonucleotide
  Antisense strand to SEQ ID NO: 1546474
gauuguauuggacagcaca

SEQ ID NO: 1546476 - RNA, 19 nt, Artificial Sequence
  Description of Artificial Sequence: Synthetic oligonucleotide
  Sense strand starting at position 3415 of SEQ ID NO: 1245227
uuuaguuccucaguuguau

SEQ ID NO: 1546477 - RNA, 19 nt, Artificial Sequence
  Description of Artificial Sequence: Synthetic oligonucleotide
  Antisense strand to SEQ ID NO: 1546476
auacaacugaggaacuaaa

SEQ ID NO: 1546478 - RNA, 19 nt, Artificial Sequence
  Description of Artificial Sequence: Synthetic oligonucleotide
  Sense strand starting at position 3481 of SEQ ID NO: 1245227
cuggaaugcacuggcuauu

SEQ ID NO: 1546479 - RNA, 19 nt, Artificial Sequence
  Description of Artificial Sequence: Synthetic oligonucleotide
  Antisense strand to SEQ ID NO: 1546478
aauagccagugcauuccag

SEQ ID NO: 1546480 - RNA, 19 nt, Artificial Sequence
  Description of Artificial Sequence: Synthetic oligonucleotide
  Sense strand starting at position 3608 of SEQ ID NO: 1245227
ugcgucuggcaguauuaga

SEQ ID NO: 1546481 - RNA, 19 nt, Artificial Sequence
  Description of Artificial Sequence: Synthetic oligonucleotide
  Antisense strand to SEQ ID NO: 1546480
ucuaauacugccagacgca

SEQ ID NO: 1546482 - RNA, 19 nt, Artificial Sequence
  Description of Artificial Sequence: Synthetic oligonucleotide
  Sense strand starting at position 3968 of SEQ ID NO: 1245227
guccuuauuguauggcaca

SEQ ID NO: 1546483 - RNA, 19 nt, Artificial Sequence
  Description of Artificial Sequence: Synthetic oligonucleotide
  Antisense strand to SEQ ID NO: 1546482
ugugccauacaauaaggac

SEQ ID NO: 1546484 - RNA, 19 nt, Artificial Sequence
  Description of Artificial Sequence: Synthetic oligonucleotide
  Sense strand starting at position 319 of SEQ ID NO: 1245228
ccaccuuccugagcaugaa

SEQ ID NO: 1546485 - RNA, 19 nt, Artificial Sequence
  Description of Artificial Sequence: Synthetic oligonucleotide
  Antisense strand to SEQ ID NO: 1546484
uucaugcucaggaaggugg

SEQ ID NO: 1546486 - RNA, 19 nt, Artificial Sequence
  Description of Artificial Sequence: Synthetic oligonucleotide
  Sense strand starting at position 453 of SEQ ID NO: 1245228
gugugaucgccagguaagg

SEQ ID NO: 1546487 - RNA, 19 nt, Artificial Sequence
  Description of Artificial Sequence: Synthetic oligonucleotide
  Antisense strand to SEQ ID NO: 1546486
ccuuaccuggcgaucacac

SEQ ID NO: 1546488 - RNA, 19 nt, Artificial Sequence
  Description of Artificial Sequence: Synthetic oligonucleotide
  Sense strand starting at position 581 of SEQ ID NO: 1245228
gcauggaggcgugugcaua

SEQ ID NO: 1546489 - RNA, 19 nt, Artificial Sequence
  Description of Artificial Sequence: Synthetic oligonucleotide
  Antisense strand to SEQ ID NO: 1546488
uaugcacacgccuccaugc

SEQ ID NO: 1546490 - RNA, 19 nt, Artificial Sequence
  Description of Artificial Sequence: Synthetic oligonucleotide
  Sense strand starting at position 593 of SEQ ID NO: 1245228
gugcauaggcacuguuaaa

SEQ ID NO: 1546491 - RNA, 19 nt, Artificial Sequence
  Description of Artificial Sequence: Synthetic oligonucleotide
  Antisense strand to SEQ ID NO: 1546490
uuuaacagugccuaugcac

SEQ ID NO: 1546492 - RNA, 19 nt, Artificial Sequence
  Description of Artificial Sequence: Synthetic oligonucleotide
  Sense strand starting at position 600 of SEQ ID NO: 1245228
ggcacuguuaaacguguuu

SEQ ID NO: 1546493 - RNA, 19 nt, Artificial Sequence
  Description of Artificial Sequence: Synthetic oligonucleotide
  Antisense strand to SEQ ID NO: 1546492
aaacacguuuaacagugcc

SEQ ID NO: 1546494 - RNA, 19 nt, Artificial Sequence
  Description of Artificial Sequence: Synthetic oligonucleotide
  Sense strand starting at position 796 of SEQ ID NO: 1245228
gguggcuugucccuaacuu

SEQ ID NO: 1546495 - RNA, 19 nt, Artificial Sequence
  Description of Artificial Sequence: Synthetic oligonucleotide
  Antisense strand to SEQ ID NO: 1546494
aaguuagggacaagccacc

SEQ ID NO: 1546496 - RNA, 19 nt, Artificial Sequence
  Description of Artificial Sequence: Synthetic oligonucleotide
  Sense strand starting at position 797 of SEQ ID NO: 1245228
guggcuugucccuaacuuu

SEQ ID NO: 1546497 - RNA, 19 nt, Artificial Sequence
  Description of Artificial Sequence: Synthetic oligonucleotide
  Antisense strand to SEQ ID NO: 1546496
aaaguuagggacaagccac

SEQ ID NO: 1546498 - RNA, 19 nt, Artificial Sequence
  Description of Artificial Sequence: Synthetic oligonucleotide
  Sense strand starting at position 1192 of SEQ ID NO: 1245228
guggguaugcgggaggaaa

SEQ ID NO: 1546499 - RNA, 19 nt, Artificial Sequence
  Description of Artificial Sequence: Synthetic oligonucleotide
  Antisense strand to SEQ ID NO: 1546498
uuuccucccgcauacccac

SEQ ID NO: 1546500 - RNA, 19 nt, Artificial Sequence
  Description of Artificial Sequence: Synthetic oligonucleotide
  Sense strand starting at position 1503 of SEQ ID NO: 1245228
gccaaacuuucuccgccaa

SEQ ID NO: 1546501 - RNA, 19 nt, Artificial Sequence
  Description of Artificial Sequence: Synthetic oligonucleotide
  Antisense strand to SEQ ID NO: 1546500
uuggcggagaaaguuuggc

SEQ ID NO: 1546502 - RNA, 19 nt, Artificial Sequence
  Description of Artificial Sequence: Synthetic oligonucleotide
  Sense strand starting at position 2422 of SEQ ID NO: 1245228
caguuacucguagaucguu

SEQ ID NO: 1546503 - RNA, 19 nt, Artificial Sequence
  Description of Artificial Sequence: Synthetic oligonucleotide
  Antisense strand to SEQ ID NO: 1546502
aacgaucuacgaguaacug

SEQ ID NO: 1546504 - RNA, 19 nt, Artificial Sequence
  Description of Artificial Sequence: Synthetic oligonucleotide
  Sense strand starting at position 2425 of SEQ ID NO: 1245228
uuacucguagaucguuauu

SEQ ID NO: 1546505 - RNA, 19 nt, Artificial Sequence
  Description of Artificial Sequence: Synthetic oligonucleotide
  Antisense strand to SEQ ID NO: 1546504
aauaacgaucuacgaguaa

SEQ ID NO: 1546506 - RNA, 19 nt, Artificial Sequence
  Description of Artificial Sequence: Synthetic oligonucleotide
  Sense strand starting at position 2427 of SEQ ID NO: 1245228
acucguagaucguuauuaa

SEQ ID NO: 1546507 - RNA, 19 nt, Artificial Sequence
  Description of Artificial Sequence: Synthetic oligonucleotide
  Antisense strand to SEQ ID NO: 1546506
uuaauaacgaucuacgagu

SEQ ID NO: 1546508 - RNA, 19 nt, Artificial Sequence
  Description of Artificial Sequence: Synthetic oligonucleotide
  Sense strand starting at position 2428 of SEQ ID NO: 1245228
cucguagaucguuauuaag

SEQ ID NO: 1546509 - RNA, 19 nt, Artificial Sequence
  Description of Artificial Sequence: Synthetic oligonucleotide
  Antisense strand to SEQ ID NO: 1546508
cuuaauaacgaucuacgag

SEQ ID NO: 1546510 - RNA, 19 nt, Artificial Sequence
  Description of Artificial Sequence: Synthetic oligonucleotide
  Sense strand starting at position 2445 of SEQ ID NO: 1245228
aggcgaccuggauauacau

SEQ ID NO: 1546511 - RNA, 19 nt, Artificial Sequence
  Description of Artificial Sequence: Synthetic oligonucleotide
  Antisense strand to SEQ ID NO: 1546510
auguauauccaggucgccu

SEQ ID NO: 1546512 - RNA, 19 nt, Artificial Sequence
  Description of Artificial Sequence: Synthetic oligonucleotide
  Sense strand starting at position 2489 of SEQ ID NO: 1245228
ugaacucucugcgcggaaa

SEQ ID NO: 1546513 - RNA, 19 nt, Artificial Sequence
  Description of Artificial Sequence: Synthetic oligonucleotide
  Antisense strand to SEQ ID NO: 1546512
uuuccgcgcagagaguuca

SEQ ID NO: 1546514 - RNA, 19 nt, Artificial Sequence
  Description of Artificial Sequence: Synthetic oligonucleotide
  Sense strand starting at position 2490 of SEQ ID NO: 1245228
gaacucucugcgcggaaau

SEQ ID NO: 1546515 - RNA, 19 nt, Artificial Sequence
  Description of Artificial Sequence: Synthetic oligonucleotide
  Antisense strand to SEQ ID NO: 1546514
auuuccgcgcagagaguuc

SEQ ID NO: 1546516 - RNA, 19 nt, Artificial Sequence
  Description of Artificial Sequence: Synthetic oligonucleotide
  Sense strand starting at position 2502 of SEQ ID NO: 1245228
cggaaauccuugucaguaa

SEQ ID NO: 1546517 - RNA, 19 nt, Artificial Sequence
  Description of Artificial Sequence: Synthetic oligonucleotide
  Antisense strand to SEQ ID NO: 1546516
uuacugacaaggauuuccg

SEQ ID NO: 1546518 - RNA, 19 nt, Artificial Sequence
  Description of Artificial Sequence: Synthetic oligonucleotide
  Sense strand starting at position 2503 of SEQ ID NO: 1245228
ggaaauccuugucaguaaa

SEQ ID NO: 1546519 - RNA, 19 nt, Artificial Sequence
  Description of Artificial Sequence: Synthetic oligonucleotide
  Antisense strand to SEQ ID NO: 1546518
uuuacugacaaggauuucc

SEQ ID NO: 1546520 - RNA, 19 nt, Artificial Sequence
  Description of Artificial Sequence: Synthetic oligonucleotide
  Sense strand starting at position 2506 of SEQ ID NO: 1245228
aauccuugucaguaaagug

SEQ ID NO: 1546521 - RNA, 19 nt, Artificial Sequence
  Description of Artificial Sequence: Synthetic oligonucleotide
  Antisense strand to SEQ ID NO: 1546520
cacuuuacugacaaggauu

SEQ ID NO: 1546522 - RNA, 19 nt, Artificial Sequence
  Description of Artificial Sequence: Synthetic oligonucleotide
  Sense strand starting at position 2518 of SEQ ID NO: 1245228
uaaagugggagucguaacu

SEQ ID NO: 1546523 - RNA, 19 nt, Artificial Sequence
  Description of Artificial Sequence: Synthetic oligonucleotide
  Antisense strand to SEQ ID NO: 1546522
aguuacgacucccacuuua

SEQ ID NO: 1546524 - RNA, 19 nt, Artificial Sequence
  Description of Artificial Sequence: Synthetic oligonucleotide
  Sense strand starting at position 2527 of SEQ ID NO: 1245228
agucguaacuccuucugua

SEQ ID NO: 1546525 - RNA, 19 nt, Artificial Sequence
  Description of Artificial Sequence: Synthetic oligonucleotide
  Antisense strand to SEQ ID NO: 1546524
uacagaaggaguuacgacu

SEQ ID NO: 1546526 - RNA, 19 nt, Artificial Sequence
  Description of Artificial Sequence: Synthetic oligonucleotide
  Sense strand starting at position 2531 of SEQ ID NO: 1245228
guaacuccuucuguacaaa

SEQ ID NO: 1546527 - RNA, 19 nt, Artificial Sequence
  Description of Artificial Sequence: Synthetic oligonucleotide
  Antisense strand to SEQ ID NO: 1546526
uuuguacagaaggaguuac

SEQ ID NO: 1546528 - RNA, 19 nt, Artificial Sequence
  Description of Artificial Sequence: Synthetic oligonucleotide
  Sense strand starting at position 2543 of SEQ ID NO: 1245228
guacaaauauuguccacuu

SEQ ID NO: 1546529 - RNA, 19 nt, Artificial Sequence
  Description of Artificial Sequence: Synthetic oligonucleotide
  Antisense strand to SEQ ID NO: 1546528
aaguggacaauauuuguac

SEQ ID NO: 1546530 - RNA, 19 nt, Artificial Sequence
  Description of Artificial Sequence: Synthetic oligonucleotide
  Sense strand starting at position 2695 of SEQ ID NO: 1245228
guuuauuuguguucccucu

SEQ ID NO: 1546531 - RNA, 19 nt, Artificial Sequence
  Description of Artificial Sequence: Synthetic oligonucleotide
  Antisense strand to SEQ ID NO: 1546530
agagggaacacaaauaaac

SEQ ID NO: 1546532 - RNA, 19 nt, Artificial Sequence
  Description of Artificial Sequence: Synthetic oligonucleotide
  Sense strand starting at position 2904 of SEQ ID NO: 1245228
gugguucucaaccggaaga

SEQ ID NO: 1546533 - RNA, 19 nt, Artificial Sequence
  Description of Artificial Sequence: Synthetic oligonucleotide
  Antisense strand to SEQ ID NO: 1546532
ucuuccgguugagaaccac

SEQ ID NO: 1546534 - RNA, 19 nt, Artificial Sequence
  Description of Artificial Sequence: Synthetic oligonucleotide
  Sense strand starting at position 2905 of SEQ ID NO: 1245228
ugguucucaaccggaagau

SEQ ID NO: 1546535 - RNA, 19 nt, Artificial Sequence
  Description of Artificial Sequence: Synthetic oligonucleotide
  Antisense strand to SEQ ID NO: 1546534
aucuuccgguugagaacca

SEQ ID NO: 1546536 - RNA, 19 nt, Artificial Sequence
  Description of Artificial Sequence: Synthetic oligonucleotide
  Sense strand starting at position 2918 of SEQ ID NO: 1245228
gaagauauaucuguaccag

SEQ ID NO: 1546537 - RNA, 19 nt, Artificial Sequence
  Description of Artificial Sequence: Synthetic oligonucleotide
  Antisense strand to SEQ ID NO: 1546536
cugguacagauauaucuuc

SEQ ID NO: 1546538 - RNA, 19 nt, Artificial Sequence
  Description of Artificial Sequence: Synthetic oligonucleotide
  Sense strand starting at position 2995 of SEQ ID NO: 1245228
ucaagaucccguuguaauu

SEQ ID NO: 1546539 - RNA, 19 nt, Artificial Sequence
  Description of Artificial Sequence: Synthetic oligonucleotide
  Antisense strand to SEQ ID NO: 1546538
aauuacaacgggaucuuga

SEQ ID NO: 1546540 - RNA, 19 nt, Artificial Sequence
  Description of Artificial Sequence: Synthetic oligonucleotide
  Sense strand starting at position 3062 of SEQ ID NO: 1245228
gggagcuuuaagcguucca

SEQ ID NO: 1546541 - RNA, 19 nt, Artificial Sequence
  Description of Artificial Sequence: Synthetic oligonucleotide
  Antisense strand to SEQ ID NO: 1546540
uggaacgcuuaaagcuccc

SEQ ID NO: 1546542 - RNA, 19 nt, Artificial Sequence
  Description of Artificial Sequence: Synthetic oligonucleotide
  Sense strand starting at position 3172 of SEQ ID NO: 1245228
ugguacuuccagggugaca

SEQ ID NO: 1546543 - RNA, 19 nt, Artificial Sequence
  Description of Artificial Sequence: Synthetic oligonucleotide
  Antisense strand to SEQ ID NO: 1546542
ugucacccuggaaguacca

SEQ ID NO: 1546544 - RNA, 19 nt, Artificial Sequence
  Description of Artificial Sequence: Synthetic oligonucleotide
  Sense strand starting at position 3174 of SEQ ID NO: 1245228
guacuuccagggugacaaa

SEQ ID NO: 1546545 - RNA, 19 nt, Artificial Sequence
  Description of Artificial Sequence: Synthetic oligonucleotide
  Antisense strand to SEQ ID NO: 1546544
uuugucacccuggaaguac

SEQ ID NO: 1546546 - RNA, 19 nt, Artificial Sequence
  Description of Artificial Sequence: Synthetic oligonucleotide
  Sense strand starting at position 3186 of SEQ ID NO: 1245228
ugacaaaugcauugaccaa

SEQ ID NO: 1546547 - RNA, 19 nt, Artificial Sequence
  Description of Artificial Sequence: Synthetic oligonucleotide
  Antisense strand to SEQ ID NO: 1546546
uuggucaaugcauuuguca

SEQ ID NO: 1546548 - RNA, 19 nt, Artificial Sequence
  Description of Artificial Sequence: Synthetic oligonucleotide
  Sense strand starting at position 3314 of SEQ ID NO: 1245228
cccggauuccuguagcucu

SEQ ID NO: 1546549 - RNA, 19 nt, Artificial Sequence
  Description of Artificial Sequence: Synthetic oligonucleotide
  Antisense strand to SEQ ID NO: 1546548
agagcuacaggaauccggg

SEQ ID NO: 1546550 - RNA, 19 nt, Artificial Sequence
  Description of Artificial Sequence: Synthetic oligonucleotide
  Sense strand starting at position 3317 of SEQ ID NO: 1245228
ggauuccuguagcucuuaa

SEQ ID NO: 1546551 - RNA, 19 nt, Artificial Sequence
  Description of Artificial Sequence: Synthetic oligonucleotide
  Antisense strand to SEQ ID NO: 1546550
uuaagagcuacaggaaucc

SEQ ID NO: 1546552 - RNA, 19 nt, Artificial Sequence
  Description of Artificial Sequence: Synthetic oligonucleotide
  Sense strand starting at position 3375 of SEQ ID NO: 1245228
ugguaacuguuagaaauac

SEQ ID NO: 1546553 - RNA, 19 nt, Artificial Sequence
  Description of Artificial Sequence: Synthetic oligonucleotide
  Antisense strand to SEQ ID NO: 1546552
guauuucuaacaguuacca

SEQ ID NO: 1546554 - RNA, 19 nt, Artificial Sequence
  Description of Artificial Sequence: Synthetic oligonucleotide
  Sense strand starting at position 3445 of SEQ ID NO: 1245228
gccaguacucauuguucuu

SEQ ID NO: 1546555 - RNA, 19 nt, Artificial Sequence
  Description of Artificial Sequence: Synthetic oligonucleotide
  Antisense strand to SEQ ID NO: 1546554
aagaacaaugaguacuggc

SEQ ID NO: 1546556 - RNA, 19 nt, Artificial Sequence
  Description of Artificial Sequence: Synthetic oligonucleotide
  Sense strand starting at position 3784 of SEQ ID NO: 1245228
ggguguugcccugggugaa

SEQ ID NO: 1546557 - RNA, 19 nt, Artificial Sequence
  Description of Artificial Sequence: Synthetic oligonucleotide
  Antisense strand to SEQ ID NO: 1546556
uucacccagggcaacaccc

SEQ ID NO: 1546558 - RNA, 19 nt, Artificial Sequence
  Description of Artificial Sequence: Synthetic oligonucleotide
  Sense strand starting at position 3785 of SEQ ID NO: 1245228
gguguugcccugggugaaa

SEQ ID NO: 1546559 - RNA, 19 nt, Artificial Sequence
  Description of Artificial Sequence: Synthetic oligonucleotide
  Antisense strand to SEQ ID NO: 1546558
uuucacccagggcaacacc

SEQ ID NO: 1546560 - RNA, 19 nt, Artificial Sequence
  Description of Artificial Sequence: Synthetic oligonucleotide
  Sense strand starting at position 3798 of SEQ ID NO: 1245228
gugaaaggauucugaagag

SEQ ID NO: 1546561 - RNA, 19 nt, Artificial Sequence
  Description of Artificial Sequence: Synthetic oligonucleotide
  Antisense strand to SEQ ID NO: 1546560
cucuucagaauccuuucac

SEQ ID NO: 1546562 - RNA, 19 nt, Artificial Sequence
  Description of Artificial Sequence: Synthetic oligonucleotide
  Sense strand starting at position 3816 of SEQ ID NO: 1245228
gcucccagaugguucuaau

SEQ ID NO: 1546563 - RNA, 19 nt, Artificial Sequence
  Description of Artificial Sequence: Synthetic oligonucleotide
  Antisense strand to SEQ ID NO: 1546562
auuagaaccaucugggagc

SEQ ID NO: 1546564 - RNA, 19 nt, Artificial Sequence
  Description of Artificial Sequence: Synthetic oligonucleotide
  Sense strand starting at position 17 of SEQ ID NO: 1245229
ggagaugucacauggccuu

SEQ ID NO: 1546565 - RNA, 19 nt, Artificial Sequence
  Description of Artificial Sequence: Synthetic oligonucleotide
  Antisense strand to SEQ ID NO: 1546564
aaggccaugugacaucucc

SEQ ID NO: 1546566 - RNA, 19 nt, Artificial Sequence
  Description of Artificial Sequence: Synthetic oligonucleotide
  Sense strand starting at position 33 of SEQ ID NO: 1245229
cuuagcauucuugaauagu

SEQ ID NO: 1546567 - RNA, 19 nt, Artificial Sequence
  Description of Artificial Sequence: Synthetic oligonucleotide
  Antisense strand to SEQ ID NO: 1546566
acuauucaagaaugcuaag

SEQ ID NO: 1546568 - RNA, 19 nt, Artificial Sequence
  Description of Artificial Sequence: Synthetic oligonucleotide
  Sense strand starting at position 36 of SEQ ID NO: 1245229
agcauucuugaauaguuua

SEQ ID NO: 1546569 - RNA, 19 nt, Artificial Sequence
  Description of Artificial Sequence: Synthetic oligonucleotide
  Antisense strand to SEQ ID NO: 1546568
uaaacuauucaagaaugcu

SEQ ID NO: 1546570 - RNA, 19 nt, Artificial Sequence
  Description of Artificial Sequence: Synthetic oligonucleotide
  Sense strand starting at position 44 of SEQ ID NO: 1245229
ugaauaguuuauccacuga

SEQ ID NO: 1546571 - RNA, 19 nt, Artificial Sequence
  Description of Artificial Sequence: Synthetic oligonucleotide
  Antisense strand to SEQ ID NO: 1546570
ucaguggauaaacuauuca

SEQ ID NO: 1546572 - RNA, 19 nt, Artificial Sequence
  Description of Artificial Sequence: Synthetic oligonucleotide
  Sense strand starting at position 81 of SEQ ID NO: 1245229
guugacaacccuggaugaa

SEQ ID NO: 1546573 - RNA, 19 nt, Artificial Sequence
  Description of Artificial Sequence: Synthetic oligonucleotide
  Antisense strand to SEQ ID NO: 1546572
uucauccaggguugucaac

SEQ ID NO: 1546574 - RNA, 19 nt, Artificial Sequence
  Description of Artificial Sequence: Synthetic oligonucleotide
  Sense strand starting at position 365 of SEQ ID NO: 1245229
cagggcauuuccuaaggga

SEQ ID NO: 1546575 - RNA, 19 nt, Artificial Sequence
  Description of Artificial Sequence: Synthetic oligonucleotide
  Antisense strand to SEQ ID NO: 1546574
ucccuuaggaaaugcccug

SEQ ID NO: 1546576 - RNA, 19 nt, Artificial Sequence
  Description of Artificial Sequence: Synthetic oligonucleotide
  Sense strand starting at position 419 of SEQ ID NO: 1245229
ccuuaaauagauggcuauu

SEQ ID NO: 1546577 - RNA, 19 nt, Artificial Sequence
  Description of Artificial Sequence: Synthetic oligonucleotide
  Antisense strand to SEQ ID NO: 1546576
aauagccaucuauuuaagg

SEQ ID NO: 1546578 - RNA, 19 nt, Artificial Sequence
  Description of Artificial Sequence: Synthetic oligonucleotide
  Sense strand starting at position 537 of SEQ ID NO: 1245229
acguuaggcaguuauaaag

SEQ ID NO: 1546579 - RNA, 19 nt, Artificial Sequence
  Description of Artificial Sequence: Synthetic oligonucleotide
  Antisense strand to SEQ ID NO: 1546578
cuuuauaacugccuaacgu

SEQ ID NO: 1546580 - RNA, 19 nt, Artificial Sequence
  Description of Artificial Sequence: Synthetic oligonucleotide
  Sense strand starting at position 561 of SEQ ID NO: 1245229
agagaaguuucuguuauga

SEQ ID NO: 1546581 - RNA, 19 nt, Artificial Sequence
  Description of Artificial Sequence: Synthetic oligonucleotide
  Antisense strand to SEQ ID NO: 1546580
ucauaacagaaacuucucu

SEQ ID NO: 1546582 - RNA, 19 nt, Artificial Sequence
  Description of Artificial Sequence: Synthetic oligonucleotide
  Sense strand starting at position 864 of SEQ ID NO: 1245229
agcccugaccucuggaaca

SEQ ID NO: 1546583 - RNA, 19 nt, Artificial Sequence
  Description of Artificial Sequence: Synthetic oligonucleotide
  Antisense strand to SEQ ID NO: 1546582
uguuccagaggucagggcu

SEQ ID NO: 1546584 - RNA, 19 nt, Artificial Sequence
  Description of Artificial Sequence: Synthetic oligonucleotide
  Sense strand starting at position 949 of SEQ ID NO: 1245229
acacaugacggcuggagua

SEQ ID NO: 1546585 - RNA, 19 nt, Artificial Sequence
  Description of Artificial Sequence: Synthetic oligonucleotide
  Antisense strand to SEQ ID NO: 1546584
uacuccagccgucaugugu

SEQ ID NO: 1546586 - RNA, 19 nt, Artificial Sequence
  Description of Artificial Sequence: Synthetic oligonucleotide
  Sense strand starting at position 1233 of SEQ ID NO: 1245229
acagcaagaucccugaauu

SEQ ID NO: 1546587 - RNA, 19 nt, Artificial Sequence
  Description of Artificial Sequence: Synthetic oligonucleotide
  Antisense strand to SEQ ID NO: 1546586
aauucagggaucuugcugu

SEQ ID NO: 1546588 - RNA, 19 nt, Artificial Sequence
  Description of Artificial Sequence: Synthetic oligonucleotide
  Sense strand starting at position 1296 of SEQ ID NO: 1245229
uuuguaaccagggagcauu

SEQ ID NO: 1546589 - RNA, 19 nt, Artificial Sequence
  Description of Artificial Sequence: Synthetic oligonucleotide
  Antisense strand to SEQ ID NO: 1546588
aaugcucccugguuacaaa

SEQ ID NO: 1546590 - RNA, 19 nt, Artificial Sequence
  Description of Artificial Sequence: Synthetic oligonucleotide
  Sense strand starting at position 1378 of SEQ ID NO: 1245229
caaaccguacuuggaaaua

SEQ ID NO: 1546591 - RNA, 19 nt, Artificial Sequence
  Description of Artificial Sequence: Synthetic oligonucleotide
  Antisense strand to SEQ ID NO: 1546590
uauuuccaaguacgguuug

SEQ ID NO: 1546592 - RNA, 19 nt, Artificial Sequence
  Description of Artificial Sequence: Synthetic oligonucleotide
  Sense strand starting at position 1383 of SEQ ID NO: 1245229
cguacuuggaaauagcauu

SEQ ID NO: 1546593 - RNA, 19 nt, Artificial Sequence
  Description of Artificial Sequence: Synthetic oligonucleotide
  Antisense strand to SEQ ID NO: 1546592
aaugcuauuuccaaguacg

SEQ ID NO: 1546594 - RNA, 19 nt, Artificial Sequence
  Description of Artificial Sequence: Synthetic oligonucleotide
  Sense strand starting at position 1433 of SEQ ID NO: 1245229
auaugaccuccuuacaguu

SEQ ID NO: 1546595 - RNA, 19 nt, Artificial Sequence
  Description of Artificial Sequence: Synthetic oligonucleotide
  Antisense strand to SEQ ID NO: 1546594
aacuguaaggaggucauau

SEQ ID NO: 1546596 - RNA, 19 nt, Artificial Sequence
  Description of Artificial Sequence: Synthetic oligonucleotide
  Sense strand starting at position 1576 of SEQ ID NO: 1245229
ucugacaucucuuugagaa

SEQ ID NO: 1546597 - RNA, 19 nt, Artificial Sequence
  Description of Artificial Sequence: Synthetic oligonucleotide
  Antisense strand to SEQ ID NO: 1546596
uucucaaagagaugucaga

SEQ ID NO: 1546598 - RNA, 19 nt, Artificial Sequence
  Description of Artificial Sequence: Synthetic oligonucleotide
  Sense strand starting at position 1705 of SEQ ID NO: 1245229
aggaguaauggugguggaa

SEQ ID NO: 1546599 - RNA, 19 nt, Artificial Sequence
  Description of Artificial Sequence: Synthetic oligonucleotide
  Antisense strand to SEQ ID NO: 1546598
uuccaccaccauuacuccu

SEQ ID NO: 1546600 - RNA, 19 nt, Artificial Sequence
  Description of Artificial Sequence: Synthetic oligonucleotide
  Sense strand starting at position 1763 of SEQ ID NO: 1245229
gacuccaccuagguugaau

SEQ ID NO: 1546601 - RNA, 19 nt, Artificial Sequence
  Description of Artificial Sequence: Synthetic oligonucleotide
  Antisense strand to SEQ ID NO: 1546600
auucaaccuagguggaguc

SEQ ID NO: 1546602 - RNA, 19 nt, Artificial Sequence
  Description of Artificial Sequence: Synthetic oligonucleotide
  Sense strand starting at position 2007 of SEQ ID NO: 1245229
ugggucuggcccgauuaaa

SEQ ID NO: 1546603 - RNA, 19 nt, Artificial Sequence
  Description of Artificial Sequence: Synthetic oligonucleotide
  Antisense strand to SEQ ID NO: 1546602
uuuaaucgggccagaccca

SEQ ID NO: 1546604 - RNA, 19 nt, Artificial Sequence
  Description of Artificial Sequence: Synthetic oligonucleotide
  Sense strand starting at position 2069 of SEQ ID NO: 1245229
gucacuuuaucaguagaua

SEQ ID NO: 1546605 - RNA, 19 nt, Artificial Sequence
  Description of Artificial Sequence: Synthetic oligonucleotide
  Antisense strand to SEQ ID NO: 1546604
uaucuacugauaaagugac

SEQ ID NO: 1546606 - RNA, 19 nt, Artificial Sequence
  Description of Artificial Sequence: Synthetic oligonucleotide
  Sense strand starting at position 2139 of SEQ ID NO: 1245229
guaguaauaugauucucaa

SEQ ID NO: 1546607 - RNA, 19 nt, Artificial Sequence
  Description of Artificial Sequence: Synthetic oligonucleotide
  Antisense strand to SEQ ID NO: 1546606
uugagaaucauauuacuac

SEQ ID NO: 1546608 - RNA, 19 nt, Artificial Sequence
  Description of Artificial Sequence: Synthetic oligonucleotide
  Sense strand starting at position 2283 of SEQ ID NO: 1245229
gaagaaauggguuacacgu

SEQ ID NO: 1546609 - RNA, 19 nt, Artificial Sequence
  Description of Artificial Sequence: Synthetic oligonucleotide
  Antisense strand to SEQ ID NO: 1546608
acguguaacccauuucuuc

SEQ ID NO: 1546610 - RNA, 19 nt, Artificial Sequence
  Description of Artificial Sequence: Synthetic oligonucleotide
  Sense strand starting at position 2318 of SEQ ID NO: 1245229
ugacaucacggucacuauu

SEQ ID NO: 1546611 - RNA, 19 nt, Artificial Sequence
  Description of Artificial Sequence: Synthetic oligonucleotide
  Antisense strand to SEQ ID NO: 1546610
aauagugaccgugauguca

SEQ ID NO: 1546612 - RNA, 19 nt, Artificial Sequence
  Description of Artificial Sequence: Synthetic oligonucleotide
  Sense strand starting at position 2500 of SEQ ID NO: 1245229
cuuuaaauggugugaccaa

SEQ ID NO: 1546613 - RNA, 19 nt, Artificial Sequence
  Description of Artificial Sequence: Synthetic oligonucleotide
  Antisense strand to SEQ ID NO: 1546612
uuggucacaccauuuaaag

SEQ ID NO: 1546614 - RNA, 19 nt, Artificial Sequence
  Description of Artificial Sequence: Synthetic oligonucleotide
  Sense strand starting at position 2692 of SEQ ID NO: 1245229
gauugcuguggugauuaaa

SEQ ID NO: 1546615 - RNA, 19 nt, Artificial Sequence
  Description of Artificial Sequence: Synthetic oligonucleotide
  Antisense strand to SEQ ID NO: 1546614
uuuaaucaccacagcaauc

SEQ ID NO: 1546616 - RNA, 19 nt, Artificial Sequence
  Description of Artificial Sequence: Synthetic oligonucleotide
  Sense strand starting at position 2701 of SEQ ID NO: 1245229
ggugauuaaaugugauacu

SEQ ID NO: 1546617 - RNA, 19 nt, Artificial Sequence
  Description of Artificial Sequence: Synthetic oligonucleotide
  Antisense strand to SEQ ID NO: 1546616
aguaucacauuuaaucacc

SEQ ID NO: 1546618 - RNA, 19 nt, Artificial Sequence
  Description of Artificial Sequence: Synthetic oligonucleotide
  Sense strand starting at position 2861 of SEQ ID NO: 1245229
auguucugacagugauauu

SEQ ID NO: 1546619 - RNA, 19 nt, Artificial Sequence
  Description of Artificial Sequence: Synthetic oligonucleotide
  Antisense strand to SEQ ID NO: 1546618
aauaucacugucagaacau

SEQ ID NO: 1546620 - RNA, 19 nt, Artificial Sequence
  Description of Artificial Sequence: Synthetic oligonucleotide
  Sense strand starting at position 2889 of SEQ ID NO: 1245229
gaauaaaggucaccugugu

SEQ ID NO: 1546621 - RNA, 19 nt, Artificial Sequence
  Description of Artificial Sequence: Synthetic oligonucleotide
  Antisense strand to SEQ ID NO: 1546620
acacaggugaccuuuauuc

SEQ ID NO: 1546622 - RNA, 19 nt, Artificial Sequence
  Description of Artificial Sequence: Synthetic oligonucleotide
  Sense strand starting at position 2897 of SEQ ID NO: 1245229
gucaccugugucuaucaaa

SEQ ID NO: 1546623 - RNA, 19 nt, Artificial Sequence
  Description of Artificial Sequence: Synthetic oligonucleotide
  Antisense strand to SEQ ID NO: 1546622
uuugauagacacaggugac

SEQ ID NO: 1546624 - RNA, 19 nt, Artificial Sequence
  Description of Artificial Sequence: Synthetic oligonucleotide
  Sense strand starting at position 3137 of SEQ ID NO: 1245229
ccuggacucgaguaaucca

SEQ ID NO: 1546625 - RNA, 19 nt, Artificial Sequence
  Description of Artificial Sequence: Synthetic oligonucleotide
  Antisense strand to SEQ ID NO: 1546624
uggauuacucgaguccagg

SEQ ID NO: 1546626 - RNA, 19 nt, Artificial Sequence
  Description of Artificial Sequence: Synthetic oligonucleotide
  Sense strand starting at position 3264 of SEQ ID NO: 1245229
ucuugaugauaacuacagu

SEQ ID NO: 1546627 - RNA, 19 nt, Artificial Sequence
  Description of Artificial Sequence: Synthetic oligonucleotide
  Antisense strand to SEQ ID NO: 1546626
acuguaguuaucaucaaga

SEQ ID NO: 1546628 - RNA, 19 nt, Artificial Sequence
  Description of Artificial Sequence: Synthetic oligonucleotide
  Sense strand starting at position 3295 of SEQ ID NO: 1245229
ggaccuauccagugccaga

SEQ ID NO: 1546629 - RNA, 19 nt, Artificial Sequence
  Description of Artificial Sequence: Synthetic oligonucleotide
  Antisense strand to SEQ ID NO: 1546628
ucuggcacuggauaggucc

SEQ ID NO: 1546630 - RNA, 19 nt, Artificial Sequence
  Description of Artificial Sequence: Synthetic oligonucleotide
  Sense strand starting at position 3489 of SEQ ID NO: 1245229
gcccguguacuuguaguca

SEQ ID NO: 1546631 - RNA, 19 nt, Artificial Sequence
  Description of Artificial Sequence: Synthetic oligonucleotide
  Antisense strand to SEQ ID NO: 1546630
ugacuacaaguacacgggc

SEQ ID NO: 1546632 - RNA, 19 nt, Artificial Sequence
  Description of Artificial Sequence: Synthetic oligonucleotide
  Sense strand starting at position 3801 of SEQ ID NO: 1245229
uacagaaugcagugauucu

SEQ ID NO: 1546633 - RNA, 19 nt, Artificial Sequence
  Description of Artificial Sequence: Synthetic oligonucleotide
  Antisense strand to SEQ ID NO: 1546632
agaaucacugcauucugua

SEQ ID NO: 1546634 - RNA, 19 nt, Artificial Sequence
  Description of Artificial Sequence: Synthetic oligonucleotide
  Sense strand starting at position 3825 of SEQ ID NO: 1245229
agucuuauccaccagccau

SEQ ID NO: 1546635 - RNA, 19 nt, Artificial Sequence
  Description of Artificial Sequence: Synthetic oligonucleotide
  Antisense strand to SEQ ID NO: 1546634
auggcugguggauaagacu

SEQ ID NO: 1546636 - RNA, 19 nt, Artificial Sequence
  Description of Artificial Sequence: Synthetic oligonucleotide
  Sense strand starting at position 3843 of SEQ ID NO: 1245229
uuaggaugauuccugguga

SEQ ID NO: 1546637 - RNA, 19 nt, Artificial Sequence
  Description of Artificial Sequence: Synthetic oligonucleotide
  Antisense strand to SEQ ID NO: 1546636
ucaccaggaaucauccuaa

SEQ ID NO: 1546638 - RNA, 19 nt, Artificial Sequence
  Description of Artificial Sequence: Synthetic oligonucleotide
  Sense strand starting at position 3862 of SEQ ID NO: 1245229
gcuguuucucuagagaaca

SEQ ID NO: 1546639 - RNA, 19 nt, Artificial Sequence
  Description of Artificial Sequence: Synthetic oligonucleotide
  Antisense strand to SEQ ID NO: 1546638
uguucucuagagaaacagc

SEQ ID NO: 1546640 - RNA, 19 nt, Artificial Sequence
  Description of Artificial Sequence: Synthetic oligonucleotide
  Sense strand starting at position 3870 of SEQ ID NO: 1245229
ucuagagaacauuggucaa

SEQ ID NO: 1546641 - RNA, 19 nt, Artificial Sequence
  Description of Artificial Sequence: Synthetic oligonucleotide
  Antisense strand to SEQ ID NO: 1546640
uugaccaauguucucuaga

SEQ ID NO: 1546642 - RNA, 19 nt, Artificial Sequence
  Description of Artificial Sequence: Synthetic oligonucleotide
  Sense strand starting at position 3872 of SEQ ID NO: 1245229
uagagaacauuggucaauu

SEQ ID NO: 1546643 - RNA, 19 nt, Artificial Sequence
  Description of Artificial Sequence: Synthetic oligonucleotide
  Antisense strand to SEQ ID NO: 1546642
aauugaccaauguucucua

SEQ ID NO: 1546644 - RNA, 19 nt, Artificial Sequence
  Description of Artificial Sequence: Synthetic oligonucleotide
  Sense strand starting at position 18 of SEQ ID NO: 1245230
cugguuggaugccuacaau

SEQ ID NO: 1546645 - RNA, 19 nt, Artificial Sequence
  Description of Artificial Sequence: Synthetic oligonucleotide
  Antisense strand to SEQ ID NO: 1546644
auuguaggcauccaaccag

SEQ ID NO: 1546646 - RNA, 19 nt, Artificial Sequence
  Description of Artificial Sequence: Synthetic oligonucleotide
  Sense strand starting at position 30 of SEQ ID NO: 1245230
cuacaauagccaugugaga

SEQ ID NO: 1546647 - RNA, 19 nt, Artificial Sequence
  Description of Artificial Sequence: Synthetic oligonucleotide
  Antisense strand to SEQ ID NO: 1546646
ucucacauggcuauuguag

SEQ ID NO: 1546648 - RNA, 19 nt, Artificial Sequence
  Description of Artificial Sequence: Synthetic oligonucleotide
  Sense strand starting at position 32 of SEQ ID NO: 1245230
acaauagccaugugagaag

SEQ ID NO: 1546649 - RNA, 19 nt, Artificial Sequence
  Description of Artificial Sequence: Synthetic oligonucleotide
  Antisense strand to SEQ ID NO: 1546648
cuucucacauggcuauugu

SEQ ID NO: 1546650 - RNA, 19 nt, Artificial Sequence
  Description of Artificial Sequence: Synthetic oligonucleotide
  Sense strand starting at position 295 of SEQ ID NO: 1245230
ggguuaccuaugcacaguu

SEQ ID NO: 1546651 - RNA, 19 nt, Artificial Sequence
  Description of Artificial Sequence: Synthetic oligonucleotide
  Antisense strand to SEQ ID NO: 1546650
aacugugcauagguaaccc

SEQ ID NO: 1546652 - RNA, 19 nt, Artificial Sequence
  Description of Artificial Sequence: Synthetic oligonucleotide
  Sense strand starting at position 297 of SEQ ID NO: 1245230
guuaccuaugcacaguuaa

SEQ ID NO: 1546653 - RNA, 19 nt, Artificial Sequence
  Description of Artificial Sequence: Synthetic oligonucleotide
  Antisense strand to SEQ ID NO: 1546652
uuaacugugcauagguaac

SEQ ID NO: 1546654 - RNA, 19 nt, Artificial Sequence
  Description of Artificial Sequence: Synthetic oligonucleotide
  Sense strand starting at position 369 of SEQ ID NO: 1245230
guuugcucccacuagaaag

SEQ ID NO: 1546655 - RNA, 19 nt, Artificial Sequence
  Description of Artificial Sequence: Synthetic oligonucleotide
  Antisense strand to SEQ ID NO: 1546654
cuuucuagugggagcaaac

SEQ ID NO: 1546656 - RNA, 19 nt, Artificial Sequence
  Description of Artificial Sequence: Synthetic oligonucleotide
  Sense strand starting at position 446 of SEQ ID NO: 1245230
ccucgagucaugugauaga

SEQ ID NO: 1546657 - RNA, 19 nt, Artificial Sequence
  Description of Artificial Sequence: Synthetic oligonucleotide
  Antisense strand to SEQ ID NO: 1546656
ucuaucacaugacucgagg

SEQ ID NO: 1546658 - RNA, 19 nt, Artificial Sequence
  Description of Artificial Sequence: Synthetic oligonucleotide
  Sense strand starting at position 533 of SEQ ID NO: 1245230
uuaugaggcuucccugagu

SEQ ID NO: 1546659 - RNA, 19 nt, Artificial Sequence
  Description of Artificial Sequence: Synthetic oligonucleotide
  Antisense strand to SEQ ID NO: 1546658
acucagggaagccucauaa

SEQ ID NO: 1546660 - RNA, 19 nt, Artificial Sequence
  Description of Artificial Sequence: Synthetic oligonucleotide
  Sense strand starting at position 576 of SEQ ID NO: 1245230
gaaucucuauuuggaaagu

SEQ ID NO: 1546661 - RNA, 19 nt, Artificial Sequence
  Description of Artificial Sequence: Synthetic oligonucleotide
  Antisense strand to SEQ ID NO: 1546660
acuuuccaaauagagauuc

SEQ ID NO: 1546662 - RNA, 19 nt, Artificial Sequence
  Description of Artificial Sequence: Synthetic oligonucleotide
  Sense strand starting at position 585 of SEQ ID NO: 1245230
uuuggaaaguuauugugaa

SEQ ID NO: 1546663 - RNA, 19 nt, Artificial Sequence
  Description of Artificial Sequence: Synthetic oligonucleotide
  Antisense strand to SEQ ID NO: 1546662
uucacaauaacuuuccaaa

SEQ ID NO: 1546664 - RNA, 19 nt, Artificial Sequence
  Description of Artificial Sequence: Synthetic oligonucleotide
  Sense strand starting at position 592 of SEQ ID NO: 1245230
aguuauugugaagaucuca

SEQ ID NO: 1546665 - RNA, 19 nt, Artificial Sequence
  Description of Artificial Sequence: Synthetic oligonucleotide
  Antisense strand to SEQ ID NO: 1546664
ugagaucuucacaauaacu

SEQ ID NO: 1546666 - RNA, 19 nt, Artificial Sequence
  Description of Artificial Sequence: Synthetic oligonucleotide
  Sense strand starting at position 616 of SEQ ID NO: 1245230
ugaaauuauguaugugaag

SEQ ID NO: 1546667 - RNA, 19 nt, Artificial Sequence
  Description of Artificial Sequence: Synthetic oligonucleotide
  Antisense strand to SEQ ID NO: 1546666
cuucacauacauaauuuca

SEQ ID NO: 1546668 - RNA, 19 nt, Artificial Sequence
  Description of Artificial Sequence: Synthetic oligonucleotide
  Sense strand starting at position 1699 of SEQ ID NO: 1245230
cccggaagguucucacuca

SEQ ID NO: 1546669 - RNA, 19 nt, Artificial Sequence
  Description of Artificial Sequence: Synthetic oligonucleotide
  Antisense strand to SEQ ID NO: 1546668
ugagugagaaccuuccggg

SEQ ID NO: 1546670 - RNA, 19 nt, Artificial Sequence
  Description of Artificial Sequence: Synthetic oligonucleotide
  Sense strand starting at position 2192 of SEQ ID NO: 1245230
uaggguuaauuggcuuuau

SEQ ID NO: 1546671 - RNA, 19 nt, Artificial Sequence
  Description of Artificial Sequence: Synthetic oligonucleotide
  Antisense strand to SEQ ID NO: 1546670
auaaagccaauuaacccua

SEQ ID NO: 1546672 - RNA, 19 nt, Artificial Sequence
  Description of Artificial Sequence: Synthetic oligonucleotide
  Sense strand starting at position 2193 of SEQ ID NO: 1245230
aggguuaauuggcuuuaua

SEQ ID NO: 1546673 - RNA, 19 nt, Artificial Sequence
  Description of Artificial Sequence: Synthetic oligonucleotide
  Antisense strand to SEQ ID NO: 1546672
uauaaagccaauuaacccu

SEQ ID NO: 1546674 - RNA, 19 nt, Artificial Sequence
  Description of Artificial Sequence: Synthetic oligonucleotide
  Sense strand starting at position 2221 of SEQ ID NO: 1245230
aucugaaguuucucuguau

SEQ ID NO: 1546675 - RNA, 19 nt, Artificial Sequence
  Description of Artificial Sequence: Synthetic oligonucleotide
  Antisense strand to SEQ ID NO: 1546674
auacagagaaacuucagau

SEQ ID NO: 1546676 - RNA, 19 nt, Artificial Sequence
  Description of Artificial Sequence: Synthetic oligonucleotide
  Sense strand starting at position 2222 of SEQ ID NO: 1245230
ucugaaguuucucuguaug

SEQ ID NO: 1546677 - RNA, 19 nt, Artificial Sequence
  Description of Artificial Sequence: Synthetic oligonucleotide
  Antisense strand to SEQ ID NO: 1546676
cauacagagaaacuucaga

SEQ ID NO: 1546678 - RNA, 19 nt, Artificial Sequence
  Description of Artificial Sequence: Synthetic oligonucleotide
  Sense strand starting at position 2224 of SEQ ID NO: 1245230
ugaaguuucucuguaugac

SEQ ID NO: 1546679 - RNA, 19 nt, Artificial Sequence
  Description of Artificial Sequence: Synthetic oligonucleotide
  Antisense strand to SEQ ID NO: 1546678
gucauacagagaaacuuca

SEQ ID NO: 1546680 - RNA, 19 nt, Artificial Sequence
  Description of Artificial Sequence: Synthetic oligonucleotide
  Sense strand starting at position 2225 of SEQ ID NO: 1245230
gaaguuucucuguaugaca

SEQ ID NO: 1546681 - RNA, 19 nt, Artificial Sequence
  Description of Artificial Sequence: Synthetic oligonucleotide
  Antisense strand to SEQ ID NO: 1546680
ugucauacagagaaacuuc

SEQ ID NO: 1546682 - RNA, 19 nt, Artificial Sequence
  Description of Artificial Sequence: Synthetic oligonucleotide
  Sense strand starting at position 2227 of SEQ ID NO: 1245230
aguuucucuguaugacaga

SEQ ID NO: 1546683 - RNA, 19 nt, Artificial Sequence
  Description of Artificial Sequence: Synthetic oligonucleotide
  Antisense strand to SEQ ID NO: 1546682
ucugucauacagagaaacu

SEQ ID NO: 1546684 - RNA, 19 nt, Artificial Sequence
  Description of Artificial Sequence: Synthetic oligonucleotide
  Sense strand starting at position 2286 of SEQ ID NO: 1245230
aauuguaugucagucaaga

SEQ ID NO: 1546685 - RNA, 19 nt, Artificial Sequence
  Description of Artificial Sequence: Synthetic oligonucleotide
  Antisense strand to SEQ ID NO: 1546684
ucuugacugacauacaauu

SEQ ID NO: 1546686 - RNA, 19 nt, Artificial Sequence
  Description of Artificial Sequence: Synthetic oligonucleotide
  Sense strand starting at position 2385 of SEQ ID NO: 1245230
ugauaagugcucuaaaugg

SEQ ID NO: 1546687 - RNA, 19 nt, Artificial Sequence
  Description of Artificial Sequence: Synthetic oligonucleotide
  Antisense strand to SEQ ID NO: 1546686
ccauuuagagcacuuauca

SEQ ID NO: 1546688 - RNA, 19 nt, Artificial Sequence
  Description of Artificial Sequence: Synthetic oligonucleotide
  Sense strand starting at position 2391 of SEQ ID NO: 1245230
gugcucuaaaugggaaguu

SEQ ID NO: 1546689 - RNA, 19 nt, Artificial Sequence
  Description of Artificial Sequence: Synthetic oligonucleotide
  Antisense strand to SEQ ID NO: 1546688
aacuucccauuuagagcac

SEQ ID NO: 1546690 - RNA, 19 nt, Artificial Sequence
  Description of Artificial Sequence: Synthetic oligonucleotide
  Sense strand starting at position 2425 of SEQ ID NO: 1245230
gcguacaguggucugguaa

SEQ ID NO: 1546691 - RNA, 19 nt, Artificial Sequence
  Description of Artificial Sequence: Synthetic oligonucleotide
  Antisense strand to SEQ ID NO: 1546690
uuaccagaccacuguacgc

SEQ ID NO: 1546692 - RNA, 19 nt, Artificial Sequence
  Description of Artificial Sequence: Synthetic oligonucleotide
  Sense strand starting at position 2509 of SEQ ID NO: 1245230
ugauuccugcaaugacuau

SEQ ID NO: 1546693 - RNA, 19 nt, Artificial Sequence
  Description of Artificial Sequence: Synthetic oligonucleotide
  Antisense strand to SEQ ID NO: 1546692
auagucauugcaggaauca

SEQ ID NO: 1546694 - RNA, 19 nt, Artificial Sequence
  Description of Artificial Sequence: Synthetic oligonucleotide
  Sense strand starting at position 2551 of SEQ ID NO: 1245230
cugugaucuuucccacacu

SEQ ID NO: 1546695 - RNA, 19 nt, Artificial Sequence
  Description of Artificial Sequence: Synthetic oligonucleotide
  Antisense strand to SEQ ID NO: 1546694
agugugggaaagaucacag

SEQ ID NO: 1546696 - RNA, 19 nt, Artificial Sequence
  Description of Artificial Sequence: Synthetic oligonucleotide
  Sense strand starting at position 2577 of SEQ ID NO: 1245230
ccacacauuccugggauca

SEQ ID NO: 1546697 - RNA, 19 nt, Artificial Sequence
  Description of Artificial Sequence: Synthetic oligonucleotide
  Antisense strand to SEQ ID NO: 1546696
ugaucccaggaaugugugg

SEQ ID NO: 1546698 - RNA, 19 nt, Artificial Sequence
  Description of Artificial Sequence: Synthetic oligonucleotide
  Sense strand starting at position 2590 of SEQ ID NO: 1245230
ggaucacacccuugaccuu

SEQ ID NO: 1546699 - RNA, 19 nt, Artificial Sequence
  Description of Artificial Sequence: Synthetic oligonucleotide
  Antisense strand to SEQ ID NO: 1546698
aaggucaagggugugaucc

SEQ ID NO: 1546700 - RNA, 19 nt, Artificial Sequence
  Description of Artificial Sequence: Synthetic oligonucleotide
  Sense strand starting at position 2889 of SEQ ID NO: 1245230
gcaagugaauuugacugga

SEQ ID NO: 1546701 - RNA, 19 nt, Artificial Sequence
  Description of Artificial Sequence: Synthetic oligonucleotide
  Antisense strand to SEQ ID NO: 1546700
uccagucaaauucacuugc

SEQ ID NO: 1546702 - RNA, 19 nt, Artificial Sequence
  Description of Artificial Sequence: Synthetic oligonucleotide
  Sense strand starting at position 2921 of SEQ ID NO: 1245230
ggaugcuaacauuacucau

SEQ ID NO: 1546703 - RNA, 19 nt, Artificial Sequence
  Description of Artificial Sequence: Synthetic oligonucleotide
  Antisense strand to SEQ ID NO: 1546702
augaguaauguuagcaucc

SEQ ID NO: 1546704 - RNA, 19 nt, Artificial Sequence
  Description of Artificial Sequence: Synthetic oligonucleotide
  Sense strand starting at position 2991 of SEQ ID NO: 1245230
cuauguuuccauggucaaa

SEQ ID NO: 1546705 - RNA, 19 nt, Artificial Sequence
  Description of Artificial Sequence: Synthetic oligonucleotide
  Antisense strand to SEQ ID NO: 1546704
uuugaccauggaaacauag

SEQ ID NO: 1546706 - RNA, 19 nt, Artificial Sequence
  Description of Artificial Sequence: Synthetic oligonucleotide
  Sense strand starting at position 2993 of SEQ ID NO: 1245230
auguuuccauggucaaauc

SEQ ID NO: 1546707 - RNA, 19 nt, Artificial Sequence
  Description of Artificial Sequence: Synthetic oligonucleotide
  Antisense strand to SEQ ID NO: 1546706
gauuugaccauggaaacau

SEQ ID NO: 1546708 - RNA, 19 nt, Artificial Sequence
  Description of Artificial Sequence: Synthetic oligonucleotide
  Sense strand starting at position 3090 of SEQ ID NO: 1245230
ucacuuauuguugaauaug

SEQ ID NO: 1546709 - RNA, 19 nt, Artificial Sequence
  Description of Artificial Sequence: Synthetic oligonucleotide
  Antisense strand to SEQ ID NO: 1546708
cauauucaacaauaaguga

SEQ ID NO: 1546710 - RNA, 19 nt, Artificial Sequence
  Description of Artificial Sequence: Synthetic oligonucleotide
  Sense strand starting at position 3112 of SEQ ID NO: 1245230
uaacuauucgaagaguucu

SEQ ID NO: 1546711 - RNA, 19 nt, Artificial Sequence
  Description of Artificial Sequence: Synthetic oligonucleotide
  Antisense strand to SEQ ID NO: 1546710
agaacucuucgaauaguua

SEQ ID NO: 1546712 - RNA, 19 nt, Artificial Sequence
  Description of Artificial Sequence: Synthetic oligonucleotide
  Sense strand starting at position 3157 of SEQ ID NO: 1245230
ucgaucuuccugcaucuau

SEQ ID NO: 1546713 - RNA, 19 nt, Artificial Sequence
  Description of Artificial Sequence: Synthetic oligonucleotide
  Antisense strand to SEQ ID NO: 1546712
auagaugcaggaagaucga

SEQ ID NO: 1546714 - RNA, 19 nt, Artificial Sequence
  Description of Artificial Sequence: Synthetic oligonucleotide
  Sense strand starting at position 3301 of SEQ ID NO: 1245230
cugggcuuccuuuauagga

SEQ ID NO: 1546715 - RNA, 19 nt, Artificial Sequence
  Description of Artificial Sequence: Synthetic oligonucleotide
  Antisense strand to SEQ ID NO: 1546714
uccuauaaaggaagcccag

SEQ ID NO: 1546716 - RNA, 19 nt, Artificial Sequence
  Description of Artificial Sequence: Synthetic oligonucleotide
  Sense strand starting at position 3532 of SEQ ID NO: 1245230
gacuguuaccaguggaaag

SEQ ID NO: 1546717 - RNA, 19 nt, Artificial Sequence
  Description of Artificial Sequence: Synthetic oligonucleotide
  Antisense strand to SEQ ID NO: 1546716
cuuuccacugguaacaguc

SEQ ID NO: 1546718 - RNA, 19 nt, Artificial Sequence
  Description of Artificial Sequence: Synthetic oligonucleotide
  Sense strand starting at position 3542 of SEQ ID NO: 1245230
aguggaaagccuuauguuu

SEQ ID NO: 1546719 - RNA, 19 nt, Artificial Sequence
  Description of Artificial Sequence: Synthetic oligonucleotide
  Antisense strand to SEQ ID NO: 1546718
aaacauaaggcuuuccacu

SEQ ID NO: 1546720 - RNA, 19 nt, Artificial Sequence
  Description of Artificial Sequence: Synthetic oligonucleotide
  Sense strand starting at position 3611 of SEQ ID NO: 1245230
cauugaaagugcccagaaa

SEQ ID NO: 1546721 - RNA, 19 nt, Artificial Sequence
  Description of Artificial Sequence: Synthetic oligonucleotide
  Antisense strand to SEQ ID NO: 1546720
uuucugggcacuuucaaug

SEQ ID NO: 1546722 - RNA, 19 nt, Artificial Sequence
  Description of Artificial Sequence: Synthetic oligonucleotide
  Sense strand starting at position 3864 of SEQ ID NO: 1245230
acgauagugauauagcagu

SEQ ID NO: 1546723 - RNA, 19 nt, Artificial Sequence
  Description of Artificial Sequence: Synthetic oligonucleotide
  Antisense strand to SEQ ID NO: 1546722
acugcuauaucacuaucgu

SEQ ID NO: 1546724 - RNA, 19 nt, Artificial Sequence
  Description of Artificial Sequence: Synthetic oligonucleotide
  Sense strand starting at position 98 of SEQ ID NO: 1245231
ucuagauccugagaaauaa

SEQ ID NO: 1546725 - RNA, 19 nt, Artificial Sequence
  Description of Artificial Sequence: Synthetic oligonucleotide
  Antisense strand to SEQ ID NO: 1546724
uuauuucucaggaucuaga

SEQ ID NO: 1546726 - RNA, 19 nt, Artificial Sequence
  Description of Artificial Sequence: Synthetic oligonucleotide
  Sense strand starting at position 152 of SEQ ID NO: 1245231
uuggcauucuagcuugaag

SEQ ID NO: 1546727 - RNA, 19 nt, Artificial Sequence
  Description of Artificial Sequence: Synthetic oligonucleotide
  Antisense strand to SEQ ID NO: 1546726
cuucaagcuagaaugccaa

SEQ ID NO: 1546728 - RNA, 19 nt, Artificial Sequence
  Description of Artificial Sequence: Synthetic oligonucleotide
  Sense strand starting at position 164 of SEQ ID NO: 1245231
cuugaagcuccagacucau

SEQ ID NO: 1546729 - RNA, 19 nt, Artificial Sequence
  Description of Artificial Sequence: Synthetic oligonucleotide
  Antisense strand to SEQ ID NO: 1546728
augagucuggagcuucaag

SEQ ID NO: 1546730 - RNA, 19 nt, Artificial Sequence
  Description of Artificial Sequence: Synthetic oligonucleotide
  Sense strand starting at position 177 of SEQ ID NO: 1245231
acucaugagucagcucuga

SEQ ID NO: 1546731 - RNA, 19 nt, Artificial Sequence
  Description of Artificial Sequence: Synthetic oligonucleotide
  Antisense strand to SEQ ID NO: 1546730
ucagagcugacucaugagu

SEQ ID NO: 1546732 - RNA, 19 nt, Artificial Sequence
  Description of Artificial Sequence: Synthetic oligonucleotide
  Sense strand starting at position 181 of SEQ ID NO: 1245231
augagucagcucugacaaa

SEQ ID NO: 1546733 - RNA, 19 nt, Artificial Sequence
  Description of Artificial Sequence: Synthetic oligonucleotide
  Antisense strand to SEQ ID NO: 1546732
uuugucagagcugacucau

SEQ ID NO: 1546734 - RNA, 19 nt, Artificial Sequence
  Description of Artificial Sequence: Synthetic oligonucleotide
  Sense strand starting at position 215 of SEQ ID NO: 1245231
uggucuuggagucaaaucu

SEQ ID NO: 1546735 - RNA, 19 nt, Artificial Sequence
  Description of Artificial Sequence: Synthetic oligonucleotide
  Antisense strand to SEQ ID NO: 1546734
agauuugacuccaagacca

SEQ ID NO: 1546736 - RNA, 19 nt, Artificial Sequence
  Description of Artificial Sequence: Synthetic oligonucleotide
  Sense strand starting at position 289 of SEQ ID NO: 1245231
uggucaugagcucacugua

SEQ ID NO: 1546737 - RNA, 19 nt, Artificial Sequence
  Description of Artificial Sequence: Synthetic oligonucleotide
  Antisense strand to SEQ ID NO: 1546736
uacagugagcucaugacca

SEQ ID NO: 1546738 - RNA, 19 nt, Artificial Sequence
  Description of Artificial Sequence: Synthetic oligonucleotide
  Sense strand starting at position 292 of SEQ ID NO: 1245231
ucaugagcucacuguaacu

SEQ ID NO: 1546739 - RNA, 19 nt, Artificial Sequence
  Description of Artificial Sequence: Synthetic oligonucleotide
  Antisense strand to SEQ ID NO: 1546738
aguuacagugagcucauga

SEQ ID NO: 1546740 - RNA, 19 nt, Artificial Sequence
  Description of Artificial Sequence: Synthetic oligonucleotide
  Sense strand starting at position 349 of SEQ ID NO: 1245231
ccagcaaucugacucaaug

SEQ ID NO: 1546741 - RNA, 19 nt, Artificial Sequence
  Description of Artificial Sequence: Synthetic oligonucleotide
  Antisense strand to SEQ ID NO: 1546740
cauugagucagauugcugg

SEQ ID NO: 1546742 - RNA, 19 nt, Artificial Sequence
  Description of Artificial Sequence: Synthetic oligonucleotide
  Sense strand starting at position 472 of SEQ ID NO: 1245231
gucacauaucuguaugcau

SEQ ID NO: 1546743 - RNA, 19 nt, Artificial Sequence
  Description of Artificial Sequence: Synthetic oligonucleotide
  Antisense strand to SEQ ID NO: 1546742
augcauacagauaugugac

SEQ ID NO: 1546744 - RNA, 19 nt, Artificial Sequence
  Description of Artificial Sequence: Synthetic oligonucleotide
  Sense strand starting at position 524 of SEQ ID NO: 1245231
gaaccuaguguuugaaauu

SEQ ID NO: 1546745 - RNA, 19 nt, Artificial Sequence
  Description of Artificial Sequence: Synthetic oligonucleotide
  Antisense strand to SEQ ID NO: 1546744
aauuucaaacacuagguuc

SEQ ID NO: 1546746 - RNA, 19 nt, Artificial Sequence
  Description of Artificial Sequence: Synthetic oligonucleotide
  Sense strand starting at position 539 of SEQ ID NO: 1245231
aauuaaguucuuggcaagu

SEQ ID NO: 1546747 - RNA, 19 nt, Artificial Sequence
  Description of Artificial Sequence: Synthetic oligonucleotide
  Antisense strand to SEQ ID NO: 1546746
acuugccaagaacuuaauu

SEQ ID NO: 1546748 - RNA, 19 nt, Artificial Sequence
  Description of Artificial Sequence: Synthetic oligonucleotide
  Sense strand starting at position 733 of SEQ ID NO: 1245231
uggucuggccauuaacuau

SEQ ID NO: 1546749 - RNA, 19 nt, Artificial Sequence
  Description of Artificial Sequence: Synthetic oligonucleotide
  Antisense strand to SEQ ID NO: 1546748
auaguuaauggccagacca

SEQ ID NO: 1546750 - RNA, 19 nt, Artificial Sequence
  Description of Artificial Sequence: Synthetic oligonucleotide
  Sense strand starting at position 818 of SEQ ID NO: 1245231
ugagguccauaaguaauua

SEQ ID NO: 1546751 - RNA, 19 nt, Artificial Sequence
  Description of Artificial Sequence: Synthetic oligonucleotide
  Antisense strand to SEQ ID NO: 1546750
uaauuacuuauggaccuca

SEQ ID NO: 1546752 - RNA, 19 nt, Artificial Sequence
  Description of Artificial Sequence: Synthetic oligonucleotide
  Sense strand starting at position 982 of SEQ ID NO: 1245231
ggcuuugaaguugaucaga

SEQ ID NO: 1546753 - RNA, 19 nt, Artificial Sequence
  Description of Artificial Sequence: Synthetic oligonucleotide
  Antisense strand to SEQ ID NO: 1546752
ucugaucaacuucaaagcc

SEQ ID NO: 1546754 - RNA, 19 nt, Artificial Sequence
  Description of Artificial Sequence: Synthetic oligonucleotide
  Sense strand starting at position 984 of SEQ ID NO: 1245231
cuuugaaguugaucagaca

SEQ ID NO: 1546755 - RNA, 19 nt, Artificial Sequence
  Description of Artificial Sequence: Synthetic oligonucleotide
  Antisense strand to SEQ ID NO: 1546754
ugucugaucaacuucaaag

SEQ ID NO: 1546756 - RNA, 19 nt, Artificial Sequence
  Description of Artificial Sequence: Synthetic oligonucleotide
  Sense strand starting at position 997 of SEQ ID NO: 1245231
cagacauacgcuggaaugu

SEQ ID NO: 1546757 - RNA, 19 nt, Artificial Sequence
  Description of Artificial Sequence: Synthetic oligonucleotide
  Antisense strand to SEQ ID NO: 1546756
acauuccagcguaugucug

SEQ ID NO: 1546758 - RNA, 19 nt, Artificial Sequence
  Description of Artificial Sequence: Synthetic oligonucleotide
  Sense strand starting at position 998 of SEQ ID NO: 1245231
agacauacgcuggaauguu

SEQ ID NO: 1546759 - RNA, 19 nt, Artificial Sequence
  Description of Artificial Sequence: Synthetic oligonucleotide
  Antisense strand to SEQ ID NO: 1546758
aacauuccagcguaugucu

SEQ ID NO: 1546760 - RNA, 19 nt, Artificial Sequence
  Description of Artificial Sequence: Synthetic oligonucleotide
  Sense strand starting at position 1121 of SEQ ID NO: 1245231
ggcugugcugaggaugaaa

SEQ ID NO: 1546761 - RNA, 19 nt, Artificial Sequence
  Description of Artificial Sequence: Synthetic oligonucleotide
  Antisense strand to SEQ ID NO: 1546760
uuucauccucagcacagcc

SEQ ID NO: 1546762 - RNA, 19 nt, Artificial Sequence
  Description of Artificial Sequence: Synthetic oligonucleotide
  Sense strand starting at position 1123 of SEQ ID NO: 1245231
cugugcugaggaugaaaua

SEQ ID NO: 1546763 - RNA, 19 nt, Artificial Sequence
  Description of Artificial Sequence: Synthetic oligonucleotide
  Antisense strand to SEQ ID NO: 1546762
uauuucauccucagcacag

SEQ ID NO: 1546764 - RNA, 19 nt, Artificial Sequence
  Description of Artificial Sequence: Synthetic oligonucleotide
  Sense strand starting at position 1409 of SEQ ID NO: 1245231
uccugacgaucacuuugaa

SEQ ID NO: 1546765 - RNA, 19 nt, Artificial Sequence
  Description of Artificial Sequence: Synthetic oligonucleotide
  Antisense strand to SEQ ID NO: 1546764
uucaaagugaucgucagga

SEQ ID NO: 1546766 - RNA, 19 nt, Artificial Sequence
  Description of Artificial Sequence: Synthetic oligonucleotide
  Sense strand starting at position 1412 of SEQ ID NO: 1245231
ugacgaucacuuugaagaa

SEQ ID NO: 1546767 - RNA, 19 nt, Artificial Sequence
  Description of Artificial Sequence: Synthetic oligonucleotide
  Antisense strand to SEQ ID NO: 1546766
uucuucaaagugaucguca

SEQ ID NO: 1546768 - RNA, 19 nt, Artificial Sequence
  Description of Artificial Sequence: Synthetic oligonucleotide
  Sense strand starting at position 1924 of SEQ ID NO: 1245231
gguuccauugguuacgaga

SEQ ID NO: 1546769 - RNA, 19 nt, Artificial Sequence
  Description of Artificial Sequence: Synthetic oligonucleotide
  Antisense strand to SEQ ID NO: 1546768
ucucguaaccaauggaacc

SEQ ID NO: 1546770 - RNA, 19 nt, Artificial Sequence
  Description of Artificial Sequence: Synthetic oligonucleotide
  Sense strand starting at position 2021 of SEQ ID NO: 1245231
gcguuugugcagcucggaa

SEQ ID NO: 1546771 - RNA, 19 nt, Artificial Sequence
  Description of Artificial Sequence: Synthetic oligonucleotide
  Antisense strand to SEQ ID NO: 1546770
uuccgagcugcacaaacgc

SEQ ID NO: 1546772 - RNA, 19 nt, Artificial Sequence
  Description of Artificial Sequence: Synthetic oligonucleotide
  Sense strand starting at position 2222 of SEQ ID NO: 1245231
gcugguugaguucauguca

SEQ ID NO: 1546773 - RNA, 19 nt, Artificial Sequence
  Description of Artificial Sequence: Synthetic oligonucleotide
  Antisense strand to SEQ ID NO: 1546772
ugacaugaacucaaccagc

SEQ ID NO: 1546774 - RNA, 19 nt, Artificial Sequence
  Description of Artificial Sequence: Synthetic oligonucleotide
  Sense strand starting at position 2610 of SEQ ID NO: 1245231
cggccagaugcguuaacuu

SEQ ID NO: 1546775 - RNA, 19 nt, Artificial Sequence
  Description of Artificial Sequence: Synthetic oligonucleotide
  Antisense strand to SEQ ID NO: 1546774
aaguuaacgcaucuggccg

SEQ ID NO: 1546776 - RNA, 19 nt, Artificial Sequence
  Description of Artificial Sequence: Synthetic oligonucleotide
  Sense strand starting at position 2719 of SEQ ID NO: 1245231
gccauaauaauguggugga

SEQ ID NO: 1546777 - RNA, 19 nt, Artificial Sequence
  Description of Artificial Sequence: Synthetic oligonucleotide
  Antisense strand to SEQ ID NO: 1546776
uccaccacauuauuauggc

SEQ ID NO: 1546778 - RNA, 19 nt, Artificial Sequence
  Description of Artificial Sequence: Synthetic oligonucleotide
  Sense strand starting at position 2740 of SEQ ID NO: 1245231
gaacgagggcuucggaaua

SEQ ID NO: 1546779 - RNA, 19 nt, Artificial Sequence
  Description of Artificial Sequence: Synthetic oligonucleotide
  Antisense strand to SEQ ID NO: 1546778
uauuccgaagcccucguuc

SEQ ID NO: 1546780 - RNA, 19 nt, Artificial Sequence
  Description of Artificial Sequence: Synthetic oligonucleotide
  Sense strand starting at position 2985 of SEQ ID NO: 1245231
ccgauugcgccgagaguca

SEQ ID NO: 1546781 - RNA, 19 nt, Artificial Sequence
  Description of Artificial Sequence: Synthetic oligonucleotide
  Antisense strand to SEQ ID NO: 1546780
ugacucucggcgcaaucgg

SEQ ID NO: 1546782 - RNA, 19 nt, Artificial Sequence
  Description of Artificial Sequence: Synthetic oligonucleotide
  Sense strand starting at position 3042 of SEQ ID NO: 1245231
accuaaucugaaugagcuu

SEQ ID NO: 1546783 - RNA, 19 nt, Artificial Sequence
  Description of Artificial Sequence: Synthetic oligonucleotide
  Antisense strand to SEQ ID NO: 1546782
aagcucauucagauuaggu

SEQ ID NO: 1546784 - RNA, 19 nt, Artificial Sequence
  Description of Artificial Sequence: Synthetic oligonucleotide
  Sense strand starting at position 3119 of SEQ ID NO: 1245231
uaauaaagggucugucauc

SEQ ID NO: 1546785 - RNA, 19 nt, Artificial Sequence
  Description of Artificial Sequence: Synthetic oligonucleotide
  Antisense strand to SEQ ID NO: 1546784
gaugacagacccuuuauua

SEQ ID NO: 1546786 - RNA, 19 nt, Artificial Sequence
  Description of Artificial Sequence: Synthetic oligonucleotide
  Sense strand starting at position 3120 of SEQ ID NO: 1245231
aauaaagggucugucauca

SEQ ID NO: 1546787 - RNA, 19 nt, Artificial Sequence
  Description of Artificial Sequence: Synthetic oligonucleotide
  Antisense strand to SEQ ID NO: 1546786
ugaugacagacccuuuauu

SEQ ID NO: 1546788 - RNA, 19 nt, Artificial Sequence
  Description of Artificial Sequence: Synthetic oligonucleotide
  Sense strand starting at position 3475 of SEQ ID NO: 1245231
uucucaauuuaguggaaua

SEQ ID NO: 1546789 - RNA, 19 nt, Artificial Sequence
  Description of Artificial Sequence: Synthetic oligonucleotide
  Antisense strand to SEQ ID NO: 1546788
uauuccacuaaauugagaa

SEQ ID NO: 1546790 - RNA, 19 nt, Artificial Sequence
  Description of Artificial Sequence: Synthetic oligonucleotide
  Sense strand starting at position 3493 of SEQ ID NO: 1245231
accagaguuugucccugaa

SEQ ID NO: 1546791 - RNA, 19 nt, Artificial Sequence
  Description of Artificial Sequence: Synthetic oligonucleotide
  Antisense strand to SEQ ID NO: 1546790
uucagggacaaacucuggu

SEQ ID NO: 1546792 - RNA, 19 nt, Artificial Sequence
  Description of Artificial Sequence: Synthetic oligonucleotide
  Sense strand starting at position 3495 of SEQ ID NO: 1245231
cagaguuugucccugaagc

SEQ ID NO: 1546793 - RNA, 19 nt, Artificial Sequence
  Description of Artificial Sequence: Synthetic oligonucleotide
  Antisense strand to SEQ ID NO: 1546792
gcuucagggacaaacucug

SEQ ID NO: 1546794 - RNA, 19 nt, Artificial Sequence
  Description of Artificial Sequence: Synthetic oligonucleotide
  Sense strand starting at position 3496 of SEQ ID NO: 1245231
agaguuugucccugaagca

SEQ ID NO: 1546795 - RNA, 19 nt, Artificial Sequence
  Description of Artificial Sequence: Synthetic oligonucleotide
  Antisense strand to SEQ ID NO: 1546794
ugcuucagggacaaacucu

SEQ ID NO: 1546796 - RNA, 19 nt, Artificial Sequence
  Description of Artificial Sequence: Synthetic oligonucleotide
  Sense strand starting at position 3497 of SEQ ID NO: 1245231
gaguuugucccugaagcaa

SEQ ID NO: 1546797 - RNA, 19 nt, Artificial Sequence
  Description of Artificial Sequence: Synthetic oligonucleotide
  Antisense strand to SEQ ID NO: 1546796
uugcuucagggacaaacuc

SEQ ID NO: 1546798 - RNA, 19 nt, Artificial Sequence
  Description of Artificial Sequence: Synthetic oligonucleotide
  Sense strand starting at position 3607 of SEQ ID NO: 1245231
aguggcucaugauuguuau

SEQ ID NO: 1546799 - RNA, 19 nt, Artificial Sequence
  Description of Artificial Sequence: Synthetic oligonucleotide
  Antisense strand to SEQ ID NO: 1546798
auaacaaucaugagccacu

SEQ ID NO: 1546800 - RNA, 19 nt, Artificial Sequence
  Description of Artificial Sequence: Synthetic oligonucleotide
  Sense strand starting at position 3610 of SEQ ID NO: 1245231
ggcucaugauuguuaucaa

SEQ ID NO: 1546801 - RNA, 19 nt, Artificial Sequence
  Description of Artificial Sequence: Synthetic oligonucleotide
  Antisense strand to SEQ ID NO: 1546800
uugauaacaaucaugagcc

SEQ ID NO: 1546802 - RNA, 19 nt, Artificial Sequence
  Description of Artificial Sequence: Synthetic oligonucleotide
  Sense strand starting at position 3754 of SEQ ID NO: 1245231
gcgccaguaaucccgguua

SEQ ID NO: 1546803 - RNA, 19 nt, Artificial Sequence
  Description of Artificial Sequence: Synthetic oligonucleotide
  Antisense strand to SEQ ID NO: 1546802
uaaccgggauuacuggcgc

SEQ ID NO: 1546804 - RNA, 19 nt, Artificial Sequence
  Description of Artificial Sequence: Synthetic oligonucleotide
  Sense strand starting at position 46 of SEQ ID NO: 1245232
uugcucugauuugauugaa

SEQ ID NO: 1546805 - RNA, 19 nt, Artificial Sequence
  Description of Artificial Sequence: Synthetic oligonucleotide
  Antisense strand to SEQ ID NO: 1546804
uucaaucaaaucagagcaa

SEQ ID NO: 1546806 - RNA, 19 nt, Artificial Sequence
  Description of Artificial Sequence: Synthetic oligonucleotide
  Sense strand starting at position 77 of SEQ ID NO: 1245232
ggaaauaucucagugaacu

SEQ ID NO: 1546807 - RNA, 19 nt, Artificial Sequence
  Description of Artificial Sequence: Synthetic oligonucleotide
  Antisense strand to SEQ ID NO: 1546806
aguucacugagauauuucc

SEQ ID NO: 1546808 - RNA, 19 nt, Artificial Sequence
  Description of Artificial Sequence: Synthetic oligonucleotide
  Sense strand starting at position 85 of SEQ ID NO: 1245232
cucagugaacucuaaguua

SEQ ID NO: 1546809 - RNA, 19 nt, Artificial Sequence
  Description of Artificial Sequence: Synthetic oligonucleotide
  Antisense strand to SEQ ID NO: 1546808
uaacuuagaguucacugag

SEQ ID NO: 1546810 - RNA, 19 nt, Artificial Sequence
  Description of Artificial Sequence: Synthetic oligonucleotide
  Sense strand starting at position 88 of SEQ ID NO: 1245232
agugaacucuaaguuacag

SEQ ID NO: 1546811 - RNA, 19 nt, Artificial Sequence
  Description of Artificial Sequence: Synthetic oligonucleotide
  Antisense strand to SEQ ID NO: 1546810
cuguaacuuagaguucacu

SEQ ID NO: 1546812 - RNA, 19 nt, Artificial Sequence
  Description of Artificial Sequence: Synthetic oligonucleotide
  Sense strand starting at position 213 of SEQ ID NO: 1245232
uuuggaaauuugugaaaca

SEQ ID NO: 1546813 - RNA, 19 nt, Artificial Sequence
  Description of Artificial Sequence: Synthetic oligonucleotide
  Antisense strand to SEQ ID NO: 1546812
uguuucacaaauuuccaaa

SEQ ID NO: 1546814 - RNA, 19 nt, Artificial Sequence
  Description of Artificial Sequence: Synthetic oligonucleotide
  Sense strand starting at position 254 of SEQ ID NO: 1245232
agaguaucaugcccacuuu

SEQ ID NO: 1546815 - RNA, 19 nt, Artificial Sequence
  Description of Artificial Sequence: Synthetic oligonucleotide
  Antisense strand to SEQ ID NO: 1546814
aaagugggcaugauacucu

SEQ ID NO: 1546816 - RNA, 19 nt, Artificial Sequence
  Description of Artificial Sequence: Synthetic oligonucleotide
  Sense strand starting at position 694 of SEQ ID NO: 1245232
aguucucauuugcaaggaa

SEQ ID NO: 1546817 - RNA, 19 nt, Artificial Sequence
  Description of Artificial Sequence: Synthetic oligonucleotide
  Antisense strand to SEQ ID NO: 1546816
uuccuugcaaaugagaacu

SEQ ID NO: 1546818 - RNA, 19 nt, Artificial Sequence
  Description of Artificial Sequence: Synthetic oligonucleotide
  Sense strand starting at position 805 of SEQ ID NO: 1245232
ugcaaagacgaguaaguua

SEQ ID NO: 1546819 - RNA, 19 nt, Artificial Sequence
  Description of Artificial Sequence: Synthetic oligonucleotide
  Antisense strand to SEQ ID NO: 1546818
uaacuuacucgucuuugca

SEQ ID NO: 1546820 - RNA, 19 nt, Artificial Sequence
  Description of Artificial Sequence: Synthetic oligonucleotide
  Sense strand starting at position 810 of SEQ ID NO: 1245232
agacgaguaaguuacgguu

SEQ ID NO: 1546821 - RNA, 19 nt, Artificial Sequence
  Description of Artificial Sequence: Synthetic oligonucleotide
  Antisense strand to SEQ ID NO: 1546820
aaccguaacuuacucgucu

SEQ ID NO: 1546822 - RNA, 19 nt, Artificial Sequence
  Description of Artificial Sequence: Synthetic oligonucleotide
  Sense strand starting at position 867 of SEQ ID NO: 1245232
gucuguuacccagaccaca

SEQ ID NO: 1546823 - RNA, 19 nt, Artificial Sequence
  Description of Artificial Sequence: Synthetic oligonucleotide
  Antisense strand to SEQ ID NO: 1546822
uguggucuggguaacagac

SEQ ID NO: 1546824 - RNA, 19 nt, Artificial Sequence
  Description of Artificial Sequence: Synthetic oligonucleotide
  Sense strand starting at position 1088 of SEQ ID NO: 1245232
ggauaaaucauccggucca

SEQ ID NO: 1546825 - RNA, 19 nt, Artificial Sequence
  Description of Artificial Sequence: Synthetic oligonucleotide
  Antisense strand to SEQ ID NO: 1546824
uggaccggaugauuuaucc

SEQ ID NO: 1546826 - RNA, 19 nt, Artificial Sequence
  Description of Artificial Sequence: Synthetic oligonucleotide
  Sense strand starting at position 1293 of SEQ ID NO: 1245232
cuggguacuccuuagucuu

SEQ ID NO: 1546827 - RNA, 19 nt, Artificial Sequence
  Description of Artificial Sequence: Synthetic oligonucleotide
  Antisense strand to SEQ ID NO: 1546826
aagacuaaggaguacccag

SEQ ID NO: 1546828 - RNA, 19 nt, Artificial Sequence
  Description of Artificial Sequence: Synthetic oligonucleotide
  Sense strand starting at position 1318 of SEQ ID NO: 1245232
ugauuagacucuucuugau

SEQ ID NO: 1546829 - RNA, 19 nt, Artificial Sequence
  Description of Artificial Sequence: Synthetic oligonucleotide
  Antisense strand to SEQ ID NO: 1546828
aucaagaagagucuaauca

SEQ ID NO: 1546830 - RNA, 19 nt, Artificial Sequence
  Description of Artificial Sequence: Synthetic oligonucleotide
  Sense strand starting at position 1399 of SEQ ID NO: 1245232
cuguguguccacguuuaau

SEQ ID NO: 1546831 - RNA, 19 nt, Artificial Sequence
  Description of Artificial Sequence: Synthetic oligonucleotide
  Antisense strand to SEQ ID NO: 1546830
auuaaacguggacacacag

SEQ ID NO: 1546832 - RNA, 19 nt, Artificial Sequence
  Description of Artificial Sequence: Synthetic oligonucleotide
  Sense strand starting at position 1401 of SEQ ID NO: 1245232
guguguccacguuuaaucu

SEQ ID NO: 1546833 - RNA, 19 nt, Artificial Sequence
  Description of Artificial Sequence: Synthetic oligonucleotide
  Antisense strand to SEQ ID NO: 1546832
agauuaaacguggacacac

SEQ ID NO: 1546834 - RNA, 19 nt, Artificial Sequence
  Description of Artificial Sequence: Synthetic oligonucleotide
  Sense strand starting at position 1616 of SEQ ID NO: 1245232
cccuuuccuccuugggaaa

SEQ ID NO: 1546835 - RNA, 19 nt, Artificial Sequence
  Description of Artificial Sequence: Synthetic oligonucleotide
  Antisense strand to SEQ ID NO: 1546834
uuucccaaggaggaaaggg

SEQ ID NO: 1546836 - RNA, 19 nt, Artificial Sequence
  Description of Artificial Sequence: Synthetic oligonucleotide
  Sense strand starting at position 1617 of SEQ ID NO: 1245232
ccuuuccuccuugggaaau

SEQ ID NO: 1546837 - RNA, 19 nt, Artificial Sequence
  Description of Artificial Sequence: Synthetic oligonucleotide
  Antisense strand to SEQ ID NO: 1546836
auuucccaaggaggaaagg

SEQ ID NO: 1546838 - RNA, 19 nt, Artificial Sequence
  Description of Artificial Sequence: Synthetic oligonucleotide
  Sense strand starting at position 1629 of SEQ ID NO: 1245232
gggaaaucguugccacuag

SEQ ID NO: 1546839 - RNA, 19 nt, Artificial Sequence
  Description of Artificial Sequence: Synthetic oligonucleotide
  Antisense strand to SEQ ID NO: 1546838
cuaguggcaacgauuuccc

SEQ ID NO: 1546840 - RNA, 19 nt, Artificial Sequence
  Description of Artificial Sequence: Synthetic oligonucleotide
  Sense strand starting at position 1633 of SEQ ID NO: 1245232
aaucguugccacuagaaau

SEQ ID NO: 1546841 - RNA, 19 nt, Artificial Sequence
  Description of Artificial Sequence: Synthetic oligonucleotide
  Antisense strand to SEQ ID NO: 1546840
auuucuaguggcaacgauu

SEQ ID NO: 1546842 - RNA, 19 nt, Artificial Sequence
  Description of Artificial Sequence: Synthetic oligonucleotide
  Sense strand starting at position 1781 of SEQ ID NO: 1245232
ccagaacagcucugcagaa

SEQ ID NO: 1546843 - RNA, 19 nt, Artificial Sequence
  Description of Artificial Sequence: Synthetic oligonucleotide
  Antisense strand to SEQ ID NO: 1546842
uucugcagagcuguucugg

SEQ ID NO: 1546844 - RNA, 19 nt, Artificial Sequence
  Description of Artificial Sequence: Synthetic oligonucleotide
  Sense strand starting at position 1803 of SEQ ID NO: 1245232
aaguuaauccgaugucauu

SEQ ID NO: 1546845 - RNA, 19 nt, Artificial Sequence
  Description of Artificial Sequence: Synthetic oligonucleotide
  Antisense strand to SEQ ID NO: 1546844
aaugacaucggauuaacuu

SEQ ID NO: 1546846 - RNA, 19 nt, Artificial Sequence
  Description of Artificial Sequence: Synthetic oligonucleotide
  Sense strand starting at position 2293 of SEQ ID NO: 1245232
uauuuagaugggugcuguu

SEQ ID NO: 1546847 - RNA, 19 nt, Artificial Sequence
  Description of Artificial Sequence: Synthetic oligonucleotide
  Antisense strand to SEQ ID NO: 1546846
aacagcacccaucuaaaua

SEQ ID NO: 1546848 - RNA, 19 nt, Artificial Sequence
  Description of Artificial Sequence: Synthetic oligonucleotide
  Sense strand starting at position 2430 of SEQ ID NO: 1245232
gaaauucgggcucaguauu

SEQ ID NO: 1546849 - RNA, 19 nt, Artificial Sequence
  Description of Artificial Sequence: Synthetic oligonucleotide
  Antisense strand to SEQ ID NO: 1546848
aauacugagcccgaauuuc

SEQ ID NO: 1546850 - RNA, 19 nt, Artificial Sequence
  Description of Artificial Sequence: Synthetic oligonucleotide
  Sense strand starting at position 2436 of SEQ ID NO: 1245232
cgggcucaguauuugauca

SEQ ID NO: 1546851 - RNA, 19 nt, Artificial Sequence
  Description of Artificial Sequence: Synthetic oligonucleotide
  Antisense strand to SEQ ID NO: 1546850
ugaucaaauacugagcccg

SEQ ID NO: 1546852 - RNA, 19 nt, Artificial Sequence
  Description of Artificial Sequence: Synthetic oligonucleotide
  Sense strand starting at position 2591 of SEQ ID NO: 1245232
aguagaucacuuugcuaaa

SEQ ID NO: 1546853 - RNA, 19 nt, Artificial Sequence
  Description of Artificial Sequence: Synthetic oligonucleotide
  Antisense strand to SEQ ID NO: 1546852
uuuagcaaagugaucuacu

SEQ ID NO: 1546854 - RNA, 19 nt, Artificial Sequence
  Description of Artificial Sequence: Synthetic oligonucleotide
  Sense strand starting at position 2610 of SEQ ID NO: 1245232
auaggauuuccucgcugcu

SEQ ID NO: 1546855 - RNA, 19 nt, Artificial Sequence
  Description of Artificial Sequence: Synthetic oligonucleotide
  Antisense strand to SEQ ID NO: 1546854
agcagcgaggaaauccuau

SEQ ID NO: 1546856 - RNA, 19 nt, Artificial Sequence
  Description of Artificial Sequence: Synthetic oligonucleotide
  Sense strand starting at position 2622 of SEQ ID NO: 1245232
cgcugcugugaguuugaau

SEQ ID NO: 1546857 - RNA, 19 nt, Artificial Sequence
  Description of Artificial Sequence: Synthetic oligonucleotide
  Antisense strand to SEQ ID NO: 1546856
auucaaacucacagcagcg

SEQ ID NO: 1546858 - RNA, 19 nt, Artificial Sequence
  Description of Artificial Sequence: Synthetic oligonucleotide
  Sense strand starting at position 2769 of SEQ ID NO: 1245232
ugccuuucugcucugaguu

SEQ ID NO: 1546859 - RNA, 19 nt, Artificial Sequence
  Description of Artificial Sequence: Synthetic oligonucleotide
  Antisense strand to SEQ ID NO: 1546858
aacucagagcagaaaggca

SEQ ID NO: 1546860 - RNA, 19 nt, Artificial Sequence
  Description of Artificial Sequence: Synthetic oligonucleotide
  Sense strand starting at position 2914 of SEQ ID NO: 1245232
uaggcaaccgucugauaau

SEQ ID NO: 1546861 - RNA, 19 nt, Artificial Sequence
  Description of Artificial Sequence: Synthetic oligonucleotide
  Antisense strand to SEQ ID NO: 1546860
auuaucagacgguugccua

SEQ ID NO: 1546862 - RNA, 19 nt, Artificial Sequence
  Description of Artificial Sequence: Synthetic oligonucleotide
  Sense strand starting at position 3121 of SEQ ID NO: 1245232
gcuuguauuucgguauaca

SEQ ID NO: 1546863 - RNA, 19 nt, Artificial Sequence
  Description of Artificial Sequence: Synthetic oligonucleotide
  Antisense strand to SEQ ID NO: 1546862
uguauaccgaaauacaagc

SEQ ID NO: 1546864 - RNA, 19 nt, Artificial Sequence
  Description of Artificial Sequence: Synthetic oligonucleotide
  Sense strand starting at position 3171 of SEQ ID NO: 1245232
gcuagcaauuugccaggaa

SEQ ID NO: 1546865 - RNA, 19 nt, Artificial Sequence
  Description of Artificial Sequence: Synthetic oligonucleotide
  Antisense strand to SEQ ID NO: 1546864
uuccuggcaaauugcuagc

SEQ ID NO: 1546866 - RNA, 19 nt, Artificial Sequence
  Description of Artificial Sequence: Synthetic oligonucleotide
  Sense strand starting at position 3186 of SEQ ID NO: 1245232
ggaagucaagccugccaau

SEQ ID NO: 1546867 - RNA, 19 nt, Artificial Sequence
  Description of Artificial Sequence: Synthetic oligonucleotide
  Antisense strand to SEQ ID NO: 1546866
auuggcaggcuugacuucc

SEQ ID NO: 1546868 - RNA, 19 nt, Artificial Sequence
  Description of Artificial Sequence: Synthetic oligonucleotide
  Sense strand starting at position 3195 of SEQ ID NO: 1245232
gccugccaauuuccugaua

SEQ ID NO: 1546869 - RNA, 19 nt, Artificial Sequence
  Description of Artificial Sequence: Synthetic oligonucleotide
  Antisense strand to SEQ ID NO: 1546868
uaucaggaaauuggcaggc

SEQ ID NO: 1546870 - RNA, 19 nt, Artificial Sequence
  Description of Artificial Sequence: Synthetic oligonucleotide
  Sense strand starting at position 3360 of SEQ ID NO: 1245232
acaugugagcccuguuuaa

SEQ ID NO: 1546871 - RNA, 19 nt, Artificial Sequence
  Description of Artificial Sequence: Synthetic oligonucleotide
  Antisense strand to SEQ ID NO: 1546870
uuaaacagggcucacaugu

SEQ ID NO: 1546872 - RNA, 19 nt, Artificial Sequence
  Description of Artificial Sequence: Synthetic oligonucleotide
  Sense strand starting at position 3439 of SEQ ID NO: 1245232
gugugcuuacaguugucuu

SEQ ID NO: 1546873 - RNA, 19 nt, Artificial Sequence
  Description of Artificial Sequence: Synthetic oligonucleotide
  Antisense strand to SEQ ID NO: 1546872
aagacaacuguaagcacac

SEQ ID NO: 1546874 - RNA, 19 nt, Artificial Sequence
  Description of Artificial Sequence: Synthetic oligonucleotide
  Sense strand starting at position 3615 of SEQ ID NO: 1245232
gcugguggagagugaauaa

SEQ ID NO: 1546875 - RNA, 19 nt, Artificial Sequence
  Description of Artificial Sequence: Synthetic oligonucleotide
  Antisense strand to SEQ ID NO: 1546874
uuauucacucuccaccagc

SEQ ID NO: 1546876 - RNA, 19 nt, Artificial Sequence
  Description of Artificial Sequence: Synthetic oligonucleotide
  Sense strand starting at position 3626 of SEQ ID NO: 1245232
gugaauaaauguucuucca

SEQ ID NO: 1546877 - RNA, 19 nt, Artificial Sequence
  Description of Artificial Sequence: Synthetic oligonucleotide
  Antisense strand to SEQ ID NO: 1546876
uggaagaacauuuauucac

SEQ ID NO: 1546878 - RNA, 19 nt, Artificial Sequence
  Description of Artificial Sequence: Synthetic oligonucleotide
  Sense strand starting at position 3675 of SEQ ID NO: 1245232
agaagugucguggaaagug

SEQ ID NO: 1546879 - RNA, 19 nt, Artificial Sequence
  Description of Artificial Sequence: Synthetic oligonucleotide
  Antisense strand to SEQ ID NO: 1546878
cacuuuccacgacacuucu

SEQ ID NO: 1546880 - RNA, 19 nt, Artificial Sequence
  Description of Artificial Sequence: Synthetic oligonucleotide
  Sense strand starting at position 3732 of SEQ ID NO: 1245232
ggagcagcaucucuugaua

SEQ ID NO: 1546881 - RNA, 19 nt, Artificial Sequence
  Description of Artificial Sequence: Synthetic oligonucleotide
  Antisense strand to SEQ ID NO: 1546880
uaucaagagaugcugcucc

SEQ ID NO: 1546882 - RNA, 19 nt, Artificial Sequence
  Description of Artificial Sequence: Synthetic oligonucleotide
  Sense strand starting at position 3735 of SEQ ID NO: 1245232
gcagcaucucuugauaaag

SEQ ID NO: 1546883 - RNA, 19 nt, Artificial Sequence
  Description of Artificial Sequence: Synthetic oligonucleotide
  Antisense strand to SEQ ID NO: 1546882
cuuuaucaagagaugcugc

SEQ ID NO: 1546884 - RNA, 19 nt, Artificial Sequence
  Description of Artificial Sequence: Synthetic oligonucleotide
  Sense strand starting at position 126 of SEQ ID NO: 1245233
uucuuucuaccaugucuga

SEQ ID NO: 1546885 - RNA, 19 nt, Artificial Sequence
  Description of Artificial Sequence: Synthetic oligonucleotide
  Antisense strand to SEQ ID NO: 1546884
ucagacaugguagaaagaa

SEQ ID NO: 1546886 - RNA, 19 nt, Artificial Sequence
  Description of Artificial Sequence: Synthetic oligonucleotide
  Sense strand starting at position 137 of SEQ ID NO: 1245233
augucugauccucaucauc

SEQ ID NO: 1546887 - RNA, 19 nt, Artificial Sequence
  Description of Artificial Sequence: Synthetic oligonucleotide
  Antisense strand to SEQ ID NO: 1546886
gaugaugaggaucagacau

SEQ ID NO: 1546888 - RNA, 19 nt, Artificial Sequence
  Description of Artificial Sequence: Synthetic oligonucleotide
  Sense strand starting at position 139 of SEQ ID NO: 1245233
gucugauccucaucaucuu

SEQ ID NO: 1546889 - RNA, 19 nt, Artificial Sequence
  Description of Artificial Sequence: Synthetic oligonucleotide
  Antisense strand to SEQ ID NO: 1546888
aagaugaugaggaucagac

SEQ ID NO: 1546890 - RNA, 19 nt, Artificial Sequence
  Description of Artificial Sequence: Synthetic oligonucleotide
  Sense strand starting at position 236 of SEQ ID NO: 1245233
aguccuauccagugaccua

SEQ ID NO: 1546891 - RNA, 19 nt, Artificial Sequence
  Description of Artificial Sequence: Synthetic oligonucleotide
  Antisense strand to SEQ ID NO: 1546890
uaggucacuggauaggacu

SEQ ID NO: 1546892 - RNA, 19 nt, Artificial Sequence
  Description of Artificial Sequence: Synthetic oligonucleotide
  Sense strand starting at position 417 of SEQ ID NO: 1245233
gaggguggcuucucauaca

SEQ ID NO: 1546893 - RNA, 19 nt, Artificial Sequence
  Description of Artificial Sequence: Synthetic oligonucleotide
  Antisense strand to SEQ ID NO: 1546892
uguaugagaagccacccuc

SEQ ID NO: 1546894 - RNA, 19 nt, Artificial Sequence
  Description of Artificial Sequence: Synthetic oligonucleotide
  Sense strand starting at position 599 of SEQ ID NO: 1245233
uugucucaaccuuaaaguu

SEQ ID NO: 1546895 - RNA, 19 nt, Artificial Sequence
  Description of Artificial Sequence: Synthetic oligonucleotide
  Antisense strand to SEQ ID NO: 1546894
aacuuuaagguugagacaa

SEQ ID NO: 1546896 - RNA, 19 nt, Artificial Sequence
  Description of Artificial Sequence: Synthetic oligonucleotide
  Sense strand starting at position 649 of SEQ ID NO: 1245233
acgggaacugucuaaaucu

SEQ ID NO: 1546897 - RNA, 19 nt, Artificial Sequence
  Description of Artificial Sequence: Synthetic oligonucleotide
  Antisense strand to SEQ ID NO: 1546896
agauuuagacaguucccgu

SEQ ID NO: 1546898 - RNA, 19 nt, Artificial Sequence
  Description of Artificial Sequence: Synthetic oligonucleotide
  Sense strand starting at position 714 of SEQ ID NO: 1245233
ugagauguggaauguagau

SEQ ID NO: 1546899 - RNA, 19 nt, Artificial Sequence
  Description of Artificial Sequence: Synthetic oligonucleotide
  Antisense strand to SEQ ID NO: 1546898
aucuacauuccacaucuca

SEQ ID NO: 1546900 - RNA, 19 nt, Artificial Sequence
  Description of Artificial Sequence: Synthetic oligonucleotide
  Sense strand starting at position 729 of SEQ ID NO: 1245233
agauauuuaacucggugcu

SEQ ID NO: 1546901 - RNA, 19 nt, Artificial Sequence
  Description of Artificial Sequence: Synthetic oligonucleotide
  Antisense strand to SEQ ID NO: 1546900
agcaccgaguuaaauaucu

SEQ ID NO: 1546902 - RNA, 19 nt, Artificial Sequence
  Description of Artificial Sequence: Synthetic oligonucleotide
  Sense strand starting at position 730 of SEQ ID NO: 1245233
gauauuuaacucggugcuu

SEQ ID NO: 1546903 - RNA, 19 nt, Artificial Sequence
  Description of Artificial Sequence: Synthetic oligonucleotide
  Antisense strand to SEQ ID NO: 1546902
aagcaccgaguuaaauauc

SEQ ID NO: 1546904 - RNA, 19 nt, Artificial Sequence
  Description of Artificial Sequence: Synthetic oligonucleotide
  Sense strand starting at position 741 of SEQ ID NO: 1245233
cggugcuuggcauacagaa

SEQ ID NO: 1546905 - RNA, 19 nt, Artificial Sequence
  Description of Artificial Sequence: Synthetic oligonucleotide
  Antisense strand to SEQ ID NO: 1546904
uucuguaugccaagcaccg

SEQ ID NO: 1546906 - RNA, 19 nt, Artificial Sequence
  Description of Artificial Sequence: Synthetic oligonucleotide
  Sense strand starting at position 961 of SEQ ID NO: 1245233
acucgagucuaacucuaaa

SEQ ID NO: 1546907 - RNA, 19 nt, Artificial Sequence
  Description of Artificial Sequence: Synthetic oligonucleotide
  Antisense strand to SEQ ID NO: 1546906
uuuagaguuagacucgagu

SEQ ID NO: 1546908 - RNA, 19 nt, Artificial Sequence
  Description of Artificial Sequence: Synthetic oligonucleotide
  Sense strand starting at position 1013 of SEQ ID NO: 1245233
cucccucuugcugagaacu

SEQ ID NO: 1546909 - RNA, 19 nt, Artificial Sequence
  Description of Artificial Sequence: Synthetic oligonucleotide
  Antisense strand to SEQ ID NO: 1546908
aguucucagcaagagggag

SEQ ID NO: 1546910 - RNA, 19 nt, Artificial Sequence
  Description of Artificial Sequence: Synthetic oligonucleotide
  Sense strand starting at position 1073 of SEQ ID NO: 1245233
gcuucuuuccaguauuacu

SEQ ID NO: 1546911 - RNA, 19 nt, Artificial Sequence
  Description of Artificial Sequence: Synthetic oligonucleotide
  Antisense strand to SEQ ID NO: 1546910
aguaauacuggaaagaagc

SEQ ID NO: 1546912 - RNA, 19 nt, Artificial Sequence
  Description of Artificial Sequence: Synthetic oligonucleotide
  Sense strand starting at position 1083 of SEQ ID NO: 1245233
aguauuacuuguguaacag

SEQ ID NO: 1546913 - RNA, 19 nt, Artificial Sequence
  Description of Artificial Sequence: Synthetic oligonucleotide
  Antisense strand to SEQ ID NO: 1546912
cuguuacacaaguaauacu

SEQ ID NO: 1546914 - RNA, 19 nt, Artificial Sequence
  Description of Artificial Sequence: Synthetic oligonucleotide
  Sense strand starting at position 1141 of SEQ ID NO: 1245233
uuuagauuaacgugaagga

SEQ ID NO: 1546915 - RNA, 19 nt, Artificial Sequence
  Description of Artificial Sequence: Synthetic oligonucleotide
  Antisense strand to SEQ ID NO: 1546914
uccuucacguuaaucuaaa

SEQ ID NO: 1546916 - RNA, 19 nt, Artificial Sequence
  Description of Artificial Sequence: Synthetic oligonucleotide
  Sense strand starting at position 1199 of SEQ ID NO: 1245233
augagauguacuuggaucu

SEQ ID NO: 1546917 - RNA, 19 nt, Artificial Sequence
  Description of Artificial Sequence: Synthetic oligonucleotide
  Antisense strand to SEQ ID NO: 1546916
agauccaaguacaucucau

SEQ ID NO: 1546918 - RNA, 19 nt, Artificial Sequence
  Description of Artificial Sequence: Synthetic oligonucleotide
  Sense strand starting at position 1315 of SEQ ID NO: 1245233
uagccagcauuuccgauau

SEQ ID NO: 1546919 - RNA, 19 nt, Artificial Sequence
  Description of Artificial Sequence: Synthetic oligonucleotide
  Antisense strand to SEQ ID NO: 1546918
auaucggaaaugcuggcua

SEQ ID NO: 1546920 - RNA, 19 nt, Artificial Sequence
  Description of Artificial Sequence: Synthetic oligonucleotide
  Sense strand starting at position 1321 of SEQ ID NO: 1245233
gcauuuccgauaugcaaag

SEQ ID NO: 1546921 - RNA, 19 nt, Artificial Sequence
  Description of Artificial Sequence: Synthetic oligonucleotide
  Antisense strand to SEQ ID NO: 1546920
cuuugcauaucggaaaugc

SEQ ID NO: 1546922 - RNA, 19 nt, Artificial Sequence
  Description of Artificial Sequence: Synthetic oligonucleotide
  Sense strand starting at position 1386 of SEQ ID NO: 1245233
ugaaguucucccuaagccu

SEQ ID NO: 1546923 - RNA, 19 nt, Artificial Sequence
  Description of Artificial Sequence: Synthetic oligonucleotide
  Antisense strand to SEQ ID NO: 1546922
aggcuuagggagaacuuca

SEQ ID NO: 1546924 - RNA, 19 nt, Artificial Sequence
  Description of Artificial Sequence: Synthetic oligonucleotide
  Sense strand starting at position 1426 of SEQ ID NO: 1245233
uccaguaugcugcaaccua

SEQ ID NO: 1546925 - RNA, 19 nt, Artificial Sequence
  Description of Artificial Sequence: Synthetic oligonucleotide
  Antisense strand to SEQ ID NO: 1546924
uagguugcagcauacugga

SEQ ID NO: 1546926 - RNA, 19 nt, Artificial Sequence
  Description of Artificial Sequence: Synthetic oligonucleotide
  Sense strand starting at position 1452 of SEQ ID NO: 1245233
cgaggucacuaggcuugaa

SEQ ID NO: 1546927 - RNA, 19 nt, Artificial Sequence
  Description of Artificial Sequence: Synthetic oligonucleotide
  Antisense strand to SEQ ID NO: 1546926
uucaagccuagugaccucg

SEQ ID NO: 1546928 - RNA, 19 nt, Artificial Sequence
  Description of Artificial Sequence: Synthetic oligonucleotide
  Sense strand starting at position 1456 of SEQ ID NO: 1245233
gucacuaggcuugaaacga

SEQ ID NO: 1546929 - RNA, 19 nt, Artificial Sequence
  Description of Artificial Sequence: Synthetic oligonucleotide
  Antisense strand to SEQ ID NO: 1546928
ucguuucaagccuagugac

SEQ ID NO: 1546930 - RNA, 19 nt, Artificial Sequence
  Description of Artificial Sequence: Synthetic oligonucleotide
  Sense strand starting at position 1506 of SEQ ID NO: 1245233
aacugaucuggccagagca

SEQ ID NO: 1546931 - RNA, 19 nt, Artificial Sequence
  Description of Artificial Sequence: Synthetic oligonucleotide
  Antisense strand to SEQ ID NO: 1546930
ugcucuggccagaucaguu

SEQ ID NO: 1546932 - RNA, 19 nt, Artificial Sequence
  Description of Artificial Sequence: Synthetic oligonucleotide
  Sense strand starting at position 1624 of SEQ ID NO: 1245233
ggaguacacuucccaguau

SEQ ID NO: 1546933 - RNA, 19 nt, Artificial Sequence
  Description of Artificial Sequence: Synthetic oligonucleotide
  Antisense strand to SEQ ID NO: 1546932
auacugggaaguguacucc

SEQ ID NO: 1546934 - RNA, 19 nt, Artificial Sequence
  Description of Artificial Sequence: Synthetic oligonucleotide
  Sense strand starting at position 2388 of SEQ ID NO: 1245233
ccaaaugucuugguuccca

SEQ ID NO: 1546935 - RNA, 19 nt, Artificial Sequence
  Description of Artificial Sequence: Synthetic oligonucleotide
  Antisense strand to SEQ ID NO: 1546934
ugggaaccaagacauuugg

SEQ ID NO: 1546936 - RNA, 19 nt, Artificial Sequence
  Description of Artificial Sequence: Synthetic oligonucleotide
  Sense strand starting at position 2416 of SEQ ID NO: 1245233
auuagagauaugugcgaca

SEQ ID NO: 1546937 - RNA, 19 nt, Artificial Sequence
  Description of Artificial Sequence: Synthetic oligonucleotide
  Antisense strand to SEQ ID NO: 1546936
ugucgcacauaucucuaau

SEQ ID NO: 1546938 - RNA, 19 nt, Artificial Sequence
  Description of Artificial Sequence: Synthetic oligonucleotide
  Sense strand starting at position 2418 of SEQ ID NO: 1245233
uagagauaugugcgacaua

SEQ ID NO: 1546939 - RNA, 19 nt, Artificial Sequence
  Description of Artificial Sequence: Synthetic oligonucleotide
  Antisense strand to SEQ ID NO: 1546938
uaugucgcacauaucucua

SEQ ID NO: 1546940 - RNA, 19 nt, Artificial Sequence
  Description of Artificial Sequence: Synthetic oligonucleotide
  Sense strand starting at position 2443 of SEQ ID NO: 1245233
gguuaaaugguaugauguc

SEQ ID NO: 1546941 - RNA, 19 nt, Artificial Sequence
  Description of Artificial Sequence: Synthetic oligonucleotide
  Antisense strand to SEQ ID NO: 1546940
gacaucauaccauuuaacc

SEQ ID NO: 1546942 - RNA, 19 nt, Artificial Sequence
  Description of Artificial Sequence: Synthetic oligonucleotide
  Sense strand starting at position 2464 of SEQ ID NO: 1245233
gaauuugcuugagaauagu

SEQ ID NO: 1546943 - RNA, 19 nt, Artificial Sequence
  Description of Artificial Sequence: Synthetic oligonucleotide
  Antisense strand to SEQ ID NO: 1546942
acuauucucaagcaaauuc

SEQ ID NO: 1546944 - RNA, 19 nt, Artificial Sequence
  Description of Artificial Sequence: Synthetic oligonucleotide
  Sense strand starting at position 2507 of SEQ ID NO: 1245233
gcaaguuggccguuaagua

SEQ ID NO: 1546945 - RNA, 19 nt, Artificial Sequence
  Description of Artificial Sequence: Synthetic oligonucleotide
  Antisense strand to SEQ ID NO: 1546944
uacuuaacggccaacuugc

SEQ ID NO: 1546946 - RNA, 19 nt, Artificial Sequence
  Description of Artificial Sequence: Synthetic oligonucleotide
  Sense strand starting at position 2538 of SEQ ID NO: 1245233
cugcauggucguucuuauu

SEQ ID NO: 1546947 - RNA, 19 nt, Artificial Sequence
  Description of Artificial Sequence: Synthetic oligonucleotide
  Antisense strand to SEQ ID NO: 1546946
aauaagaacgaccaugcag

SEQ ID NO: 1546948 - RNA, 19 nt, Artificial Sequence
  Description of Artificial Sequence: Synthetic oligonucleotide
  Sense strand starting at position 2544 of SEQ ID NO: 1245233
ggucguucuuauuuacuau

SEQ ID NO: 1546949 - RNA, 19 nt, Artificial Sequence
  Description of Artificial Sequence: Synthetic oligonucleotide
  Antisense strand to SEQ ID NO: 1546948
auaguaaauaagaacgacc

SEQ ID NO: 1546950 - RNA, 19 nt, Artificial Sequence
  Description of Artificial Sequence: Synthetic oligonucleotide
  Sense strand starting at position 2639 of SEQ ID NO: 1245233
uuugguuaucucuggaaau

SEQ ID NO: 1546951 - RNA, 19 nt, Artificial Sequence
  Description of Artificial Sequence: Synthetic oligonucleotide
  Antisense strand to SEQ ID NO: 1546950
auuuccagagauaaccaaa

SEQ ID NO: 1546952 - RNA, 19 nt, Artificial Sequence
  Description of Artificial Sequence: Synthetic oligonucleotide
  Sense strand starting at position 2641 of SEQ ID NO: 1245233
ugguuaucucuggaaauuc

SEQ ID NO: 1546953 - RNA, 19 nt, Artificial Sequence
  Description of Artificial Sequence: Synthetic oligonucleotide
  Antisense strand to SEQ ID NO: 1546952
gaauuuccagagauaacca

SEQ ID NO: 1546954 - RNA, 19 nt, Artificial Sequence
  Description of Artificial Sequence: Synthetic oligonucleotide
  Sense strand starting at position 2817 of SEQ ID NO: 1245233
gugaauaauuucuagaaca

SEQ ID NO: 1546955 - RNA, 19 nt, Artificial Sequence
  Description of Artificial Sequence: Synthetic oligonucleotide
  Antisense strand to SEQ ID NO: 1546954
uguucuagaaauuauucac

SEQ ID NO: 1546956 - RNA, 19 nt, Artificial Sequence
  Description of Artificial Sequence: Synthetic oligonucleotide
  Sense strand starting at position 2959 of SEQ ID NO: 1245233
ugcccagugagcuagaaau

SEQ ID NO: 1546957 - RNA, 19 nt, Artificial Sequence
  Description of Artificial Sequence: Synthetic oligonucleotide
  Antisense strand to SEQ ID NO: 1546956
auuucuagcucacugggca

SEQ ID NO: 1546958 - RNA, 19 nt, Artificial Sequence
  Description of Artificial Sequence: Synthetic oligonucleotide
  Sense strand starting at position 3076 of SEQ ID NO: 1245233
cagucuggcccuuaaugua

SEQ ID NO: 1546959 - RNA, 19 nt, Artificial Sequence
  Description of Artificial Sequence: Synthetic oligonucleotide
  Antisense strand to SEQ ID NO: 1546958
uacauuaagggccagacug

SEQ ID NO: 1546960 - RNA, 19 nt, Artificial Sequence
  Description of Artificial Sequence: Synthetic oligonucleotide
  Sense strand starting at position 3588 of SEQ ID NO: 1245233
ggcauucucugacucccaa

SEQ ID NO: 1546961 - RNA, 19 nt, Artificial Sequence
  Description of Artificial Sequence: Synthetic oligonucleotide
  Antisense strand to SEQ ID NO: 1546960
uugggagucagagaaugcc

SEQ ID NO: 1546962 - RNA, 19 nt, Artificial Sequence
  Description of Artificial Sequence: Synthetic oligonucleotide
  Sense strand starting at position 3608 of SEQ ID NO: 1245233
ccagauuaguccucaagau

SEQ ID NO: 1546963 - RNA, 19 nt, Artificial Sequence
  Description of Artificial Sequence: Synthetic oligonucleotide
  Antisense strand to SEQ ID NO: 1546962
aucuugaggacuaaucugg

SEQ ID NO: 1546964 - RNA, 19 nt, Artificial Sequence
  Description of Artificial Sequence: Synthetic oligonucleotide
  Sense strand starting at position 24 of SEQ ID NO: 1245234
cagaaaucugacuacucgu

SEQ ID NO: 1546965 - RNA, 19 nt, Artificial Sequence
  Description of Artificial Sequence: Synthetic oligonucleotide
  Antisense strand to SEQ ID NO: 1546964
acgaguagucagauuucug

SEQ ID NO: 1546966 - RNA, 19 nt, Artificial Sequence
  Description of Artificial Sequence: Synthetic oligonucleotide
  Sense strand starting at position 27 of SEQ ID NO: 1245234
aaaucugacuacucguuga

SEQ ID NO: 1546967 - RNA, 19 nt, Artificial Sequence
  Description of Artificial Sequence: Synthetic oligonucleotide
  Antisense strand to SEQ ID NO: 1546966
ucaacgaguagucagauuu

SEQ ID NO: 1546968 - RNA, 19 nt, Artificial Sequence
  Description of Artificial Sequence: Synthetic oligonucleotide
  Sense strand starting at position 32 of SEQ ID NO: 1245234
ugacuacucguugacuuaa

SEQ ID NO: 1546969 - RNA, 19 nt, Artificial Sequence
  Description of Artificial Sequence: Synthetic oligonucleotide
  Antisense strand to SEQ ID NO: 1546968
uuaagucaacgaguaguca

SEQ ID NO: 1546970 - RNA, 19 nt, Artificial Sequence
  Description of Artificial Sequence: Synthetic oligonucleotide
  Sense strand starting at position 77 of SEQ ID NO: 1245234
aacugauggcauggaguuu

SEQ ID NO: 1546971 - RNA, 19 nt, Artificial Sequence
  Description of Artificial Sequence: Synthetic oligonucleotide
  Antisense strand to SEQ ID NO: 1546970
aaacuccaugccaucaguu

SEQ ID NO: 1546972 - RNA, 19 nt, Artificial Sequence
  Description of Artificial Sequence: Synthetic oligonucleotide
  Sense strand starting at position 184 of SEQ ID NO: 1245234
gauggacaguaugucauaa

SEQ ID NO: 1546973 - RNA, 19 nt, Artificial Sequence
  Description of Artificial Sequence: Synthetic oligonucleotide
  Antisense strand to SEQ ID NO: 1546972
uuaugacauacuguccauc

SEQ ID NO: 1546974 - RNA, 19 nt, Artificial Sequence
  Description of Artificial Sequence: Synthetic oligonucleotide
  Sense strand starting at position 194 of SEQ ID NO: 1245234
augucauaacuugacagca

SEQ ID NO: 1546975 - RNA, 19 nt, Artificial Sequence
  Description of Artificial Sequence: Synthetic oligonucleotide
  Antisense strand to SEQ ID NO: 1546974
ugcugucaaguuaugacau

SEQ ID NO: 1546976 - RNA, 19 nt, Artificial Sequence
  Description of Artificial Sequence: Synthetic oligonucleotide
  Sense strand starting at position 218 of SEQ ID NO: 1245234
uucuucgugguacaugaaa

SEQ ID NO: 1546977 - RNA, 19 nt, Artificial Sequence
  Description of Artificial Sequence: Synthetic oligonucleotide
  Antisense strand to SEQ ID NO: 1546976
uuucauguaccacgaagaa

SEQ ID NO: 1546978 - RNA, 19 nt, Artificial Sequence
  Description of Artificial Sequence: Synthetic oligonucleotide
  Sense strand starting at position 296 of SEQ ID NO: 1245234
aaagguuagccuuaaaggu

SEQ ID NO: 1546979 - RNA, 19 nt, Artificial Sequence
  Description of Artificial Sequence: Synthetic oligonucleotide
  Antisense strand to SEQ ID NO: 1546978
accuuuaaggcuaaccuuu

SEQ ID NO: 1546980 - RNA, 19 nt, Artificial Sequence
  Description of Artificial Sequence: Synthetic oligonucleotide
  Sense strand starting at position 305 of SEQ ID NO: 1245234
ccuuaaagguuuguuauga

SEQ ID NO: 1546981 - RNA, 19 nt, Artificial Sequence
  Description of Artificial Sequence: Synthetic oligonucleotide
  Antisense strand to SEQ ID NO: 1546980
ucauaacaaaccuuuaagg

SEQ ID NO: 1546982 - RNA, 19 nt, Artificial Sequence
  Description of Artificial Sequence: Synthetic oligonucleotide
  Sense strand starting at position 306 of SEQ ID NO: 1245234
cuuaaagguuuguuaugaa

SEQ ID NO: 1546983 - RNA, 19 nt, Artificial Sequence
  Description of Artificial Sequence: Synthetic oligonucleotide
  Antisense strand to SEQ ID NO: 1546982
uucauaacaaaccuuuaag

SEQ ID NO: 1546984 - RNA, 19 nt, Artificial Sequence
  Description of Artificial Sequence: Synthetic oligonucleotide
  Sense strand starting at position 314 of SEQ ID NO: 1245234
uuuguuaugaaguggauaa

SEQ ID NO: 1546985 - RNA, 19 nt, Artificial Sequence
  Description of Artificial Sequence: Synthetic oligonucleotide
  Antisense strand to SEQ ID NO: 1546984
uuauccacuucauaacaaa

SEQ ID NO: 1546986 - RNA, 19 nt, Artificial Sequence
  Description of Artificial Sequence: Synthetic oligonucleotide
  Sense strand starting at position 315 of SEQ ID NO: 1245234
uuguuaugaaguggauaau

SEQ ID NO: 1546987 - RNA, 19 nt, Artificial Sequence
  Description of Artificial Sequence: Synthetic oligonucleotide
  Antisense strand to SEQ ID NO: 1546986
auuauccacuucauaacaa

SEQ ID NO: 1546988 - RNA, 19 nt, Artificial Sequence
  Description of Artificial Sequence: Synthetic oligonucleotide
  Sense strand starting at position 439 of SEQ ID NO: 1245234
gacuguaacuagguuagaa

SEQ ID NO: 1546989 - RNA, 19 nt, Artificial Sequence
  Description of Artificial Sequence: Synthetic oligonucleotide
  Antisense strand to SEQ ID NO: 1546988
uucuaaccuaguuacaguc

SEQ ID NO: 1546990 - RNA, 19 nt, Artificial Sequence
  Description of Artificial Sequence: Synthetic oligonucleotide
  Sense strand starting at position 586 of SEQ ID NO: 1245234
guguuuauuucucuuacau

SEQ ID NO: 1546991 - RNA, 19 nt, Artificial Sequence
  Description of Artificial Sequence: Synthetic oligonucleotide
  Antisense strand to SEQ ID NO: 1546990
auguaagagaaauaaacac

SEQ ID NO: 1546992 - RNA, 19 nt, Artificial Sequence
  Description of Artificial Sequence: Synthetic oligonucleotide
  Sense strand starting at position 655 of SEQ ID NO: 1245234
ggaggauauucagcauguu

SEQ ID NO: 1546993 - RNA, 19 nt, Artificial Sequence
  Description of Artificial Sequence: Synthetic oligonucleotide
  Antisense strand to SEQ ID NO: 1546992
aacaugcugaauauccucc

SEQ ID NO: 1546994 - RNA, 19 nt, Artificial Sequence
  Description of Artificial Sequence: Synthetic oligonucleotide
  Sense strand starting at position 923 of SEQ ID NO: 1245234
cuuaaugguugauuaagaa

SEQ ID NO: 1546995 - RNA, 19 nt, Artificial Sequence
  Description of Artificial Sequence: Synthetic oligonucleotide
  Antisense strand to SEQ ID NO: 1546994
uucuuaaucaaccauuaag

SEQ ID NO: 1546996 - RNA, 19 nt, Artificial Sequence
  Description of Artificial Sequence: Synthetic oligonucleotide
  Sense strand starting at position 1051 of SEQ ID NO: 1245234
acugauugugacuaggcua

SEQ ID NO: 1546997 - RNA, 19 nt, Artificial Sequence
  Description of Artificial Sequence: Synthetic oligonucleotide
  Antisense strand to SEQ ID NO: 1546996
uagccuagucacaaucagu

SEQ ID NO: 1546998 - RNA, 19 nt, Artificial Sequence
  Description of Artificial Sequence: Synthetic oligonucleotide
  Sense strand starting at position 1054 of SEQ ID NO: 1245234
gauugugacuaggcuagaa

SEQ ID NO: 1546999 - RNA, 19 nt, Artificial Sequence
  Description of Artificial Sequence: Synthetic oligonucleotide
  Antisense strand to SEQ ID NO: 1546998
uucuagccuagucacaauc

SEQ ID NO: 1547000 - RNA, 19 nt, Artificial Sequence
  Description of Artificial Sequence: Synthetic oligonucleotide
  Sense strand starting at position 1170 of SEQ ID NO: 1245234
ccauuuauccuaugucagc

SEQ ID NO: 1547001 - RNA, 19 nt, Artificial Sequence
  Description of Artificial Sequence: Synthetic oligonucleotide
  Antisense strand to SEQ ID NO: 1547000
gcugacauaggauaaaugg

SEQ ID NO: 1547002 - RNA, 19 nt, Artificial Sequence
  Description of Artificial Sequence: Synthetic oligonucleotide
  Sense strand starting at position 1352 of SEQ ID NO: 1245234
gaaaguuagcgguaacauu

SEQ ID NO: 1547003 - RNA, 19 nt, Artificial Sequence
  Description of Artificial Sequence: Synthetic oligonucleotide
  Antisense strand to SEQ ID NO: 1547002
aauguuaccgcuaacuuuc

SEQ ID NO: 1547004 - RNA, 19 nt, Artificial Sequence
  Description of Artificial Sequence: Synthetic oligonucleotide
  Sense strand starting at position 1492 of SEQ ID NO: 1245234
aucugaucuugggccauga

SEQ ID NO: 1547005 - RNA, 19 nt, Artificial Sequence
  Description of Artificial Sequence: Synthetic oligonucleotide
  Antisense strand to SEQ ID NO: 1547004
ucauggcccaagaucagau

SEQ ID NO: 1547006 - RNA, 19 nt, Artificial Sequence
  Description of Artificial Sequence: Synthetic oligonucleotide
  Sense strand starting at position 1494 of SEQ ID NO: 1245234
cugaucuugggccaugaau

SEQ ID NO: 1547007 - RNA, 19 nt, Artificial Sequence
  Description of Artificial Sequence: Synthetic oligonucleotide
  Antisense strand to SEQ ID NO: 1547006
auucauggcccaagaucag

SEQ ID NO: 1547008 - RNA, 19 nt, Artificial Sequence
  Description of Artificial Sequence: Synthetic oligonucleotide
  Sense strand starting at position 1496 of SEQ ID NO: 1245234
gaucuugggccaugaauca

SEQ ID NO: 1547009 - RNA, 19 nt, Artificial Sequence
  Description of Artificial Sequence: Synthetic oligonucleotide
  Antisense strand to SEQ ID NO: 1547008
ugauucauggcccaagauc

SEQ ID NO: 1547010 - RNA, 19 nt, Artificial Sequence
  Description of Artificial Sequence: Synthetic oligonucleotide
  Sense strand starting at position 1570 of SEQ ID NO: 1245234
uuugaaucuggcuaccuaa

SEQ ID NO: 1547011 - RNA, 19 nt, Artificial Sequence
  Description of Artificial Sequence: Synthetic oligonucleotide
  Antisense strand to SEQ ID NO: 1547010
uuagguagccagauucaaa

SEQ ID NO: 1547012 - RNA, 19 nt, Artificial Sequence
  Description of Artificial Sequence: Synthetic oligonucleotide
  Sense strand starting at position 1573 of SEQ ID NO: 1245234
gaaucuggcuaccuaaagu

SEQ ID NO: 1547013 - RNA, 19 nt, Artificial Sequence
  Description of Artificial Sequence: Synthetic oligonucleotide
  Antisense strand to SEQ ID NO: 1547012
acuuuagguagccagauuc

SEQ ID NO: 1547014 - RNA, 19 nt, Artificial Sequence
  Description of Artificial Sequence: Synthetic oligonucleotide
  Sense strand starting at position 2058 of SEQ ID NO: 1245234
uuuaauacgccuuggaaga

SEQ ID NO: 1547015 - RNA, 19 nt, Artificial Sequence
  Description of Artificial Sequence: Synthetic oligonucleotide
  Antisense strand to SEQ ID NO: 1547014
ucuuccaaggcguauuaaa

SEQ ID NO: 1547016 - RNA, 19 nt, Artificial Sequence
  Description of Artificial Sequence: Synthetic oligonucleotide
  Sense strand starting at position 2059 of SEQ ID NO: 1245234
uuaauacgccuuggaagaa

SEQ ID NO: 1547017 - RNA, 19 nt, Artificial Sequence
  Description of Artificial Sequence: Synthetic oligonucleotide
  Antisense strand to SEQ ID NO: 1547016
uucuuccaaggcguauuaa

SEQ ID NO: 1547018 - RNA, 19 nt, Artificial Sequence
  Description of Artificial Sequence: Synthetic oligonucleotide
  Sense strand starting at position 2251 of SEQ ID NO: 1245234
gcaugaaacugcccaugaa

SEQ ID NO: 1547019 - RNA, 19 nt, Artificial Sequence
  Description of Artificial Sequence: Synthetic oligonucleotide
  Antisense strand to SEQ ID NO: 1547018
uucaugggcaguuucaugc

SEQ ID NO: 1547020 - RNA, 19 nt, Artificial Sequence
  Description of Artificial Sequence: Synthetic oligonucleotide
  Sense strand starting at position 2405 of SEQ ID NO: 1245234
gcgacauggcaauaaauag

SEQ ID NO: 1547021 - RNA, 19 nt, Artificial Sequence
  Description of Artificial Sequence: Synthetic oligonucleotide
  Antisense strand to SEQ ID NO: 1547020
cuauuuauugccaugucgc

SEQ ID NO: 1547022 - RNA, 19 nt, Artificial Sequence
  Description of Artificial Sequence: Synthetic oligonucleotide
  Sense strand starting at position 2568 of SEQ ID NO: 1245234
aucaguuaugaugauuagu

SEQ ID NO: 1547023 - RNA, 19 nt, Artificial Sequence
  Description of Artificial Sequence: Synthetic oligonucleotide
  Antisense strand to SEQ ID NO: 1547022
acuaaucaucauaacugau

SEQ ID NO: 1547024 - RNA, 19 nt, Artificial Sequence
  Description of Artificial Sequence: Synthetic oligonucleotide
  Sense strand starting at position 2570 of SEQ ID NO: 1245234
caguuaugaugauuaguag

SEQ ID NO: 1547025 - RNA, 19 nt, Artificial Sequence
  Description of Artificial Sequence: Synthetic oligonucleotide
  Antisense strand to SEQ ID NO: 1547024
cuacuaaucaucauaacug

SEQ ID NO: 1547026 - RNA, 19 nt, Artificial Sequence
  Description of Artificial Sequence: Synthetic oligonucleotide
  Sense strand starting at position 2571 of SEQ ID NO: 1245234
aguuaugaugauuaguagu

SEQ ID NO: 1547027 - RNA, 19 nt, Artificial Sequence
  Description of Artificial Sequence: Synthetic oligonucleotide
  Antisense strand to SEQ ID NO: 1547026
acuacuaaucaucauaacu

SEQ ID NO: 1547028 - RNA, 19 nt, Artificial Sequence
  Description of Artificial Sequence: Synthetic oligonucleotide
  Sense strand starting at position 2573 of SEQ ID NO: 1245234
uuaugaugauuaguaguga

SEQ ID NO: 1547029 - RNA, 19 nt, Artificial Sequence
  Description of Artificial Sequence: Synthetic oligonucleotide
  Antisense strand to SEQ ID NO: 1547028
ucacuacuaaucaucauaa

SEQ ID NO: 1547030 - RNA, 19 nt, Artificial Sequence
  Description of Artificial Sequence: Synthetic oligonucleotide
  Sense strand starting at position 2586 of SEQ ID NO: 1245234
uagugacuccuguggacaa

SEQ ID NO: 1547031 - RNA, 19 nt, Artificial Sequence
  Description of Artificial Sequence: Synthetic oligonucleotide
  Antisense strand to SEQ ID NO: 1547030
uuguccacaggagucacua

SEQ ID NO: 1547032 - RNA, 19 nt, Artificial Sequence
  Description of Artificial Sequence: Synthetic oligonucleotide
  Sense strand starting at position 2611 of SEQ ID NO: 1245234
caagaugugcucuagguag

SEQ ID NO: 1547033 - RNA, 19 nt, Artificial Sequence
  Description of Artificial Sequence: Synthetic oligonucleotide
  Antisense strand to SEQ ID NO: 1547032
cuaccuagagcacaucuug

SEQ ID NO: 1547034 - RNA, 19 nt, Artificial Sequence
  Description of Artificial Sequence: Synthetic oligonucleotide
  Sense strand starting at position 3085 of SEQ ID NO: 1245234
uuauuugcacugugaucau

SEQ ID NO: 1547035 - RNA, 19 nt, Artificial Sequence
  Description of Artificial Sequence: Synthetic oligonucleotide
  Antisense strand to SEQ ID NO: 1547034
augaucacagugcaaauaa

SEQ ID NO: 1547036 - RNA, 19 nt, Artificial Sequence
  Description of Artificial Sequence: Synthetic oligonucleotide
  Sense strand starting at position 3095 of SEQ ID NO: 1245234
ugugaucauucuuugauca

SEQ ID NO: 1547037 - RNA, 19 nt, Artificial Sequence
  Description of Artificial Sequence: Synthetic oligonucleotide
  Antisense strand to SEQ ID NO: 1547036
ugaucaaagaaugaucaca

SEQ ID NO: 1547038 - RNA, 19 nt, Artificial Sequence
  Description of Artificial Sequence: Synthetic oligonucleotide
  Sense strand starting at position 3096 of SEQ ID NO: 1245234
gugaucauucuuugaucaa

SEQ ID NO: 1547039 - RNA, 19 nt, Artificial Sequence
  Description of Artificial Sequence: Synthetic oligonucleotide
  Antisense strand to SEQ ID NO: 1547038
uugaucaaagaaugaucac

SEQ ID NO: 1547040 - RNA, 19 nt, Artificial Sequence
  Description of Artificial Sequence: Synthetic oligonucleotide
  Sense strand starting at position 3431 of SEQ ID NO: 1245234
ggaaauaccucccugcuga

SEQ ID NO: 1547041 - RNA, 19 nt, Artificial Sequence
  Description of Artificial Sequence: Synthetic oligonucleotide
  Antisense strand to SEQ ID NO: 1547040
ucagcagggagguauuucc

SEQ ID NO: 1547042 - RNA, 19 nt, Artificial Sequence
  Description of Artificial Sequence: Synthetic oligonucleotide
  Sense strand starting at position 3833 of SEQ ID NO: 1245234
cuuugaauccucgggagga

SEQ ID NO: 1547043 - RNA, 19 nt, Artificial Sequence
  Description of Artificial Sequence: Synthetic oligonucleotide
  Antisense strand to SEQ ID NO: 1547042
uccucccgaggauucaaag

SEQ ID NO: 1547044 - RNA, 19 nt, Artificial Sequence
  Description of Artificial Sequence: Synthetic oligonucleotide
  Sense strand starting at position 109 of SEQ ID NO: 1245235
gcauguuucuuucccuuga

SEQ ID NO: 1547045 - RNA, 19 nt, Artificial Sequence
  Description of Artificial Sequence: Synthetic oligonucleotide
  Antisense strand to SEQ ID NO: 1547044
ucaagggaaagaaacaugc

SEQ ID NO: 1547046 - RNA, 19 nt, Artificial Sequence
  Description of Artificial Sequence: Synthetic oligonucleotide
  Sense strand starting at position 111 of SEQ ID NO: 1245235
auguuucuuucccuugaca

SEQ ID NO: 1547047 - RNA, 19 nt, Artificial Sequence
  Description of Artificial Sequence: Synthetic oligonucleotide
  Antisense strand to SEQ ID NO: 1547046
ugucaagggaaagaaacau

SEQ ID NO: 1547048 - RNA, 19 nt, Artificial Sequence
  Description of Artificial Sequence: Synthetic oligonucleotide
  Sense strand starting at position 168 of SEQ ID NO: 1245235
gcauauugugaagaaucau

SEQ ID NO: 1547049 - RNA, 19 nt, Artificial Sequence
  Description of Artificial Sequence: Synthetic oligonucleotide
  Antisense strand to SEQ ID NO: 1547048
augauucuucacaauaugc

SEQ ID NO: 1547050 - RNA, 19 nt, Artificial Sequence
  Description of Artificial Sequence: Synthetic oligonucleotide
  Sense strand starting at position 198 of SEQ ID NO: 1245235
accugaggaaugcauguuu

SEQ ID NO: 1547051 - RNA, 19 nt, Artificial Sequence
  Description of Artificial Sequence: Synthetic oligonucleotide
  Antisense strand to SEQ ID NO: 1547050
aaacaugcauuccucaggu

SEQ ID NO: 1547052 - RNA, 19 nt, Artificial Sequence
  Description of Artificial Sequence: Synthetic oligonucleotide
  Sense strand starting at position 271 of SEQ ID NO: 1245235
caggaaaguuaugaaauuc

SEQ ID NO: 1547053 - RNA, 19 nt, Artificial Sequence
  Description of Artificial Sequence: Synthetic oligonucleotide
  Antisense strand to SEQ ID NO: 1547052
gaauuucauaacuuuccug

SEQ ID NO: 1547054 - RNA, 19 nt, Artificial Sequence
  Description of Artificial Sequence: Synthetic oligonucleotide
  Sense strand starting at position 279 of SEQ ID NO: 1245235
uuaugaaauucccuguaga

SEQ ID NO: 1547055 - RNA, 19 nt, Artificial Sequence
  Description of Artificial Sequence: Synthetic oligonucleotide
  Antisense strand to SEQ ID NO: 1547054
ucuacagggaauuucauaa

SEQ ID NO: 1547056 - RNA, 19 nt, Artificial Sequence
  Description of Artificial Sequence: Synthetic oligonucleotide
  Sense strand starting at position 280 of SEQ ID NO: 1245235
uaugaaauucccuguagag

SEQ ID NO: 1547057 - RNA, 19 nt, Artificial Sequence
  Description of Artificial Sequence: Synthetic oligonucleotide
  Antisense strand to SEQ ID NO: 1547056
cucuacagggaauuucaua

SEQ ID NO: 1547058 - RNA, 19 nt, Artificial Sequence
  Description of Artificial Sequence: Synthetic oligonucleotide
  Sense strand starting at position 322 of SEQ ID NO: 1245235
ccaaucucugccugguuga

SEQ ID NO: 1547059 - RNA, 19 nt, Artificial Sequence
  Description of Artificial Sequence: Synthetic oligonucleotide
  Antisense strand to SEQ ID NO: 1547058
ucaaccaggcagagauugg

SEQ ID NO: 1547060 - RNA, 19 nt, Artificial Sequence
  Description of Artificial Sequence: Synthetic oligonucleotide
  Sense strand starting at position 597 of SEQ ID NO: 1245235
gggucagucaccugaugga

SEQ ID NO: 1547061 - RNA, 19 nt, Artificial Sequence
  Description of Artificial Sequence: Synthetic oligonucleotide
  Antisense strand to SEQ ID NO: 1547060
uccaucaggugacugaccc

SEQ ID NO: 1547062 - RNA, 19 nt, Artificial Sequence
  Description of Artificial Sequence: Synthetic oligonucleotide
  Sense strand starting at position 1156 of SEQ ID NO: 1245235
ugcauugauuuagaacuga

SEQ ID NO: 1547063 - RNA, 19 nt, Artificial Sequence
  Description of Artificial Sequence: Synthetic oligonucleotide
  Antisense strand to SEQ ID NO: 1547062
ucaguucuaaaucaaugca

SEQ ID NO: 1547064 - RNA, 19 nt, Artificial Sequence
  Description of Artificial Sequence: Synthetic oligonucleotide
  Sense strand starting at position 1217 of SEQ ID NO: 1245235
gguuaauuacauugaaauc

SEQ ID NO: 1547065 - RNA, 19 nt, Artificial Sequence
  Description of Artificial Sequence: Synthetic oligonucleotide
  Antisense strand to SEQ ID NO: 1547064
gauuucaauguaauuaacc

SEQ ID NO: 1547066 - RNA, 19 nt, Artificial Sequence
  Description of Artificial Sequence: Synthetic oligonucleotide
  Sense strand starting at position 1312 of SEQ ID NO: 1245235
accuaagaguucuacucag

SEQ ID NO: 1547067 - RNA, 19 nt, Artificial Sequence
  Description of Artificial Sequence: Synthetic oligonucleotide
  Antisense strand to SEQ ID NO: 1547066
cugaguagaacucuuaggu

SEQ ID NO: 1547068 - RNA, 19 nt, Artificial Sequence
  Description of Artificial Sequence: Synthetic oligonucleotide
  Sense strand starting at position 1390 of SEQ ID NO: 1245235
agcagagugucauuucuca

SEQ ID NO: 1547069 - RNA, 19 nt, Artificial Sequence
  Description of Artificial Sequence: Synthetic oligonucleotide
  Antisense strand to SEQ ID NO: 1547068
ugagaaaugacacucugcu

SEQ ID NO: 1547070 - RNA, 19 nt, Artificial Sequence
  Description of Artificial Sequence: Synthetic oligonucleotide
  Sense strand starting at position 1395 of SEQ ID NO: 1245235
agugucauuucucacuaua

SEQ ID NO: 1547071 - RNA, 19 nt, Artificial Sequence
  Description of Artificial Sequence: Synthetic oligonucleotide
  Antisense strand to SEQ ID NO: 1547070
uauagugagaaaugacacu

SEQ ID NO: 1547072 - RNA, 19 nt, Artificial Sequence
  Description of Artificial Sequence: Synthetic oligonucleotide
  Sense strand starting at position 1551 of SEQ ID NO: 1245235
ccaaucaggccugguuaga

SEQ ID NO: 1547073 - RNA, 19 nt, Artificial Sequence
  Description of Artificial Sequence: Synthetic oligonucleotide
  Antisense strand to SEQ ID NO: 1547072
ucuaaccaggccugauugg

SEQ ID NO: 1547074 - RNA, 19 nt, Artificial Sequence
  Description of Artificial Sequence: Synthetic oligonucleotide
  Sense strand starting at position 1562 of SEQ ID NO: 1245235
ugguuagacuuguuccuaa

SEQ ID NO: 1547075 - RNA, 19 nt, Artificial Sequence
  Description of Artificial Sequence: Synthetic oligonucleotide
  Antisense strand to SEQ ID NO: 1547074
uuaggaacaagucuaacca

SEQ ID NO: 1547076 - RNA, 19 nt, Artificial Sequence
  Description of Artificial Sequence: Synthetic oligonucleotide
  Sense strand starting at position 1577 of SEQ ID NO: 1245235
cuaaauaaacccugagguu

SEQ ID NO: 1547077 - RNA, 19 nt, Artificial Sequence
  Description of Artificial Sequence: Synthetic oligonucleotide
  Antisense strand to SEQ ID NO: 1547076
aaccucaggguuuauuuag

SEQ ID NO: 1547078 - RNA, 19 nt, Artificial Sequence
  Description of Artificial Sequence: Synthetic oligonucleotide
  Sense strand starting at position 1627 of SEQ ID NO: 1245235
ggucaauuauguuaaagau

SEQ ID NO: 1547079 - RNA, 19 nt, Artificial Sequence
  Description of Artificial Sequence: Synthetic oligonucleotide
  Antisense strand to SEQ ID NO: 1547078
aucuuuaacauaauugacc

SEQ ID NO: 1547080 - RNA, 19 nt, Artificial Sequence
  Description of Artificial Sequence: Synthetic oligonucleotide
  Sense strand starting at position 1661 of SEQ ID NO: 1245235
gcaucuugaggucauauaa

SEQ ID NO: 1547081 - RNA, 19 nt, Artificial Sequence
  Description of Artificial Sequence: Synthetic oligonucleotide
  Antisense strand to SEQ ID NO: 1547080
uuauaugaccucaagaugc

SEQ ID NO: 1547082 - RNA, 19 nt, Artificial Sequence
  Description of Artificial Sequence: Synthetic oligonucleotide
  Sense strand starting at position 1702 of SEQ ID NO: 1245235
uguggagagcuucagaaug

SEQ ID NO: 1547083 - RNA, 19 nt, Artificial Sequence
  Description of Artificial Sequence: Synthetic oligonucleotide
  Antisense strand to SEQ ID NO: 1547082
cauucugaagcucuccaca

SEQ ID NO: 1547084 - RNA, 19 nt, Artificial Sequence
  Description of Artificial Sequence: Synthetic oligonucleotide
  Sense strand starting at position 1996 of SEQ ID NO: 1245235
aauggcuuccucugugacu

SEQ ID NO: 1547085 - RNA, 19 nt, Artificial Sequence
  Description of Artificial Sequence: Synthetic oligonucleotide
  Antisense strand to SEQ ID NO: 1547084
agucacagaggaagccauu

SEQ ID NO: 1547086 - RNA, 19 nt, Artificial Sequence
  Description of Artificial Sequence: Synthetic oligonucleotide
  Sense strand starting at position 2123 of SEQ ID NO: 1245235
cccagauaacgccacauaa

SEQ ID NO: 1547087 - RNA, 19 nt, Artificial Sequence
  Description of Artificial Sequence: Synthetic oligonucleotide
  Antisense strand to SEQ ID NO: 1547086
uuauguggcguuaucuggg

SEQ ID NO: 1547088 - RNA, 19 nt, Artificial Sequence
  Description of Artificial Sequence: Synthetic oligonucleotide
  Sense strand starting at position 2263 of SEQ ID NO: 1245235
caguuuacguaaucagaca

SEQ ID NO: 1547089 - RNA, 19 nt, Artificial Sequence
  Description of Artificial Sequence: Synthetic oligonucleotide
  Antisense strand to SEQ ID NO: 1547088
ugucugauuacguaaacug

SEQ ID NO: 1547090 - RNA, 19 nt, Artificial Sequence
  Description of Artificial Sequence: Synthetic oligonucleotide
  Sense strand starting at position 2388 of SEQ ID NO: 1245235
aagugacacugagauucuu

SEQ ID NO: 1547091 - RNA, 19 nt, Artificial Sequence
  Description of Artificial Sequence: Synthetic oligonucleotide
  Antisense strand to SEQ ID NO: 1547090
aagaaucucagugucacuu

SEQ ID NO: 1547092 - RNA, 19 nt, Artificial Sequence
  Description of Artificial Sequence: Synthetic oligonucleotide
  Sense strand starting at position 2396 of SEQ ID NO: 1245235
cugagauucuuaccaacug

SEQ ID NO: 1547093 - RNA, 19 nt, Artificial Sequence
  Description of Artificial Sequence: Synthetic oligonucleotide
  Antisense strand to SEQ ID NO: 1547092
caguugguaagaaucucag

SEQ ID NO: 1547094 - RNA, 19 nt, Artificial Sequence
  Description of Artificial Sequence: Synthetic oligonucleotide
  Sense strand starting at position 2498 of SEQ ID NO: 1245235
auuggucuauucuuccaua

SEQ ID NO: 1547095 - RNA, 19 nt, Artificial Sequence
  Description of Artificial Sequence: Synthetic oligonucleotide
  Antisense strand to SEQ ID NO: 1547094
uauggaagaauagaccaau

SEQ ID NO: 1547096 - RNA, 19 nt, Artificial Sequence
  Description of Artificial Sequence: Synthetic oligonucleotide
  Sense strand starting at position 2521 of SEQ ID NO: 1245235
uuaauaugacauugguguu

SEQ ID NO: 1547097 - RNA, 19 nt, Artificial Sequence
  Description of Artificial Sequence: Synthetic oligonucleotide
  Antisense strand to SEQ ID NO: 1547096
aacaccaaugucauauuaa

SEQ ID NO: 1547098 - RNA, 19 nt, Artificial Sequence
  Description of Artificial Sequence: Synthetic oligonucleotide
  Sense strand starting at position 2533 of SEQ ID NO: 1245235
ugguguuauggguagaagu

SEQ ID NO: 1547099 - RNA, 19 nt, Artificial Sequence
  Description of Artificial Sequence: Synthetic oligonucleotide
  Antisense strand to SEQ ID NO: 1547098
acuucuacccauaacacca

SEQ ID NO: 1547100 - RNA, 19 nt, Artificial Sequence
  Description of Artificial Sequence: Synthetic oligonucleotide
  Sense strand starting at position 2535 of SEQ ID NO: 1245235
guguuauggguagaagugu

SEQ ID NO: 1547101 - RNA, 19 nt, Artificial Sequence
  Description of Artificial Sequence: Synthetic oligonucleotide
  Antisense strand to SEQ ID NO: 1547100
acacuucuacccauaacac

SEQ ID NO: 1547102 - RNA, 19 nt, Artificial Sequence
  Description of Artificial Sequence: Synthetic oligonucleotide
  Sense strand starting at position 2590 of SEQ ID NO: 1245235
ccuggaaugugacuguauu

SEQ ID NO: 1547103 - RNA, 19 nt, Artificial Sequence
  Description of Artificial Sequence: Synthetic oligonucleotide
  Antisense strand to SEQ ID NO: 1547102
aauacagucacauuccagg

SEQ ID NO: 1547104 - RNA, 19 nt, Artificial Sequence
  Description of Artificial Sequence: Synthetic oligonucleotide
  Sense strand starting at position 2624 of SEQ ID NO: 1245235
gaaagagguuauuaaggua

SEQ ID NO: 1547105 - RNA, 19 nt, Artificial Sequence
  Description of Artificial Sequence: Synthetic oligonucleotide
  Antisense strand to SEQ ID NO: 1547104
uaccuuaauaaccucuuuc

SEQ ID NO: 1547106 - RNA, 19 nt, Artificial Sequence
  Description of Artificial Sequence: Synthetic oligonucleotide
  Sense strand starting at position 2850 of SEQ ID NO: 1245235
cagaacugugcgggaucau

SEQ ID NO: 1547107 - RNA, 19 nt, Artificial Sequence
  Description of Artificial Sequence: Synthetic oligonucleotide
  Antisense strand to SEQ ID NO: 1547106
augaucccgcacaguucug

SEQ ID NO: 1547108 - RNA, 19 nt, Artificial Sequence
  Description of Artificial Sequence: Synthetic oligonucleotide
  Sense strand starting at position 3065 of SEQ ID NO: 1245235
ugcucaaaccugggaaaca

SEQ ID NO: 1547109 - RNA, 19 nt, Artificial Sequence
  Description of Artificial Sequence: Synthetic oligonucleotide
  Antisense strand to SEQ ID NO: 1547108
uguuucccagguuugagca

SEQ ID NO: 1547110 - RNA, 19 nt, Artificial Sequence
  Description of Artificial Sequence: Synthetic oligonucleotide
  Sense strand starting at position 3242 of SEQ ID NO: 1245235
cuaguagaauuggaaagaa

SEQ ID NO: 1547111 - RNA, 19 nt, Artificial Sequence
  Description of Artificial Sequence: Synthetic oligonucleotide
  Antisense strand to SEQ ID NO: 1547110
uucuuuccaauucuacuag

SEQ ID NO: 1547112 - RNA, 19 nt, Artificial Sequence
  Description of Artificial Sequence: Synthetic oligonucleotide
  Sense strand starting at position 3308 of SEQ ID NO: 1245235
ccuugaguccuguguccuu

SEQ ID NO: 1547113 - RNA, 19 nt, Artificial Sequence
  Description of Artificial Sequence: Synthetic oligonucleotide
  Antisense strand to SEQ ID NO: 1547112
aaggacacaggacucaagg

SEQ ID NO: 1547114 - RNA, 19 nt, Artificial Sequence
  Description of Artificial Sequence: Synthetic oligonucleotide
  Sense strand starting at position 3476 of SEQ ID NO: 1245235
gagauuugcuggcagagaa

SEQ ID NO: 1547115 - RNA, 19 nt, Artificial Sequence
  Description of Artificial Sequence: Synthetic oligonucleotide
  Antisense strand to SEQ ID NO: 1547114
uucucugccagcaaaucuc

SEQ ID NO: 1547116 - RNA, 19 nt, Artificial Sequence
  Description of Artificial Sequence: Synthetic oligonucleotide
  Sense strand starting at position 3687 of SEQ ID NO: 1245235
ccucuuauauuagcagaga

SEQ ID NO: 1547117 - RNA, 19 nt, Artificial Sequence
  Description of Artificial Sequence: Synthetic oligonucleotide
  Antisense strand to SEQ ID NO: 1547116
ucucugcuaauauaagagg

SEQ ID NO: 1547118 - RNA, 19 nt, Artificial Sequence
  Description of Artificial Sequence: Synthetic oligonucleotide
  Sense strand starting at position 3714 of SEQ ID NO: 1245235
uuaacauuagcugauguuu

SEQ ID NO: 1547119 - RNA, 19 nt, Artificial Sequence
  Description of Artificial Sequence: Synthetic oligonucleotide
  Antisense strand to SEQ ID NO: 1547118
aaacaucagcuaauguuaa

SEQ ID NO: 1547120 - RNA, 19 nt, Artificial Sequence
  Description of Artificial Sequence: Synthetic oligonucleotide
  Sense strand starting at position 3720 of SEQ ID NO: 1245235
uuagcugauguuuaugcaa

SEQ ID NO: 1547121 - RNA, 19 nt, Artificial Sequence
  Description of Artificial Sequence: Synthetic oligonucleotide
  Antisense strand to SEQ ID NO: 1547120
uugcauaaacaucagcuaa

SEQ ID NO: 1547122 - RNA, 19 nt, Artificial Sequence
  Description of Artificial Sequence: Synthetic oligonucleotide
  Sense strand starting at position 3875 of SEQ ID NO: 1245235
aggacacuguguuccaaua

SEQ ID NO: 1547123 - RNA, 19 nt, Artificial Sequence
  Description of Artificial Sequence: Synthetic oligonucleotide
  Antisense strand to SEQ ID NO: 1547122
uauuggaacacaguguccu

SEQ ID NO: 1547124 - RNA, 19 nt, Artificial Sequence
  Description of Artificial Sequence: Synthetic oligonucleotide
  Sense strand starting at position 324 of SEQ ID NO: 1245236
ggcauaacaucuguaacua

SEQ ID NO: 1547125 - RNA, 19 nt, Artificial Sequence
  Description of Artificial Sequence: Synthetic oligonucleotide
  Antisense strand to SEQ ID NO: 1547124
uaguuacagauguuaugcc

SEQ ID NO: 1547126 - RNA, 19 nt, Artificial Sequence
  Description of Artificial Sequence: Synthetic oligonucleotide
  Sense strand starting at position 438 of SEQ ID NO: 1245236
ccuuguauuccuuacagac

SEQ ID NO: 1547127 - RNA, 19 nt, Artificial Sequence
  Description of Artificial Sequence: Synthetic oligonucleotide
  Antisense strand to SEQ ID NO: 1547126
gucuguaaggaauacaagg

SEQ ID NO: 1547128 - RNA, 19 nt, Artificial Sequence
  Description of Artificial Sequence: Synthetic oligonucleotide
  Sense strand starting at position 512 of SEQ ID NO: 1245236
cuuucucuuccuggucauu

SEQ ID NO: 1547129 - RNA, 19 nt, Artificial Sequence
  Description of Artificial Sequence: Synthetic oligonucleotide
  Antisense strand to SEQ ID NO: 1547128
aaugaccaggaagagaaag

SEQ ID NO: 1547130 - RNA, 19 nt, Artificial Sequence
  Description of Artificial Sequence: Synthetic oligonucleotide
  Sense strand starting at position 517 of SEQ ID NO: 1245236
ucuuccuggucauugcuaa

SEQ ID NO: 1547131 - RNA, 19 nt, Artificial Sequence
  Description of Artificial Sequence: Synthetic oligonucleotide
  Antisense strand to SEQ ID NO: 1547130
uuagcaaugaccaggaaga

SEQ ID NO: 1547132 - RNA, 19 nt, Artificial Sequence
  Description of Artificial Sequence: Synthetic oligonucleotide
  Sense strand starting at position 592 of SEQ ID NO: 1245236
cuuauagaguuauuugcuu

SEQ ID NO: 1547133 - RNA, 19 nt, Artificial Sequence
  Description of Artificial Sequence: Synthetic oligonucleotide
  Antisense strand to SEQ ID NO: 1547132
aagcaaauaacucuauaag

SEQ ID NO: 1547134 - RNA, 19 nt, Artificial Sequence
  Description of Artificial Sequence: Synthetic oligonucleotide
  Sense strand starting at position 597 of SEQ ID NO: 1245236
agaguuauuugcuuccuuu

SEQ ID NO: 1547135 - RNA, 19 nt, Artificial Sequence
  Description of Artificial Sequence: Synthetic oligonucleotide
  Antisense strand to SEQ ID NO: 1547134
aaaggaagcaaauaacucu

SEQ ID NO: 1547136 - RNA, 19 nt, Artificial Sequence
  Description of Artificial Sequence: Synthetic oligonucleotide
  Sense strand starting at position 740 of SEQ ID NO: 1245236
gacuguaggcuuugauauu

SEQ ID NO: 1547137 - RNA, 19 nt, Artificial Sequence
  Description of Artificial Sequence: Synthetic oligonucleotide
  Antisense strand to SEQ ID NO: 1547136
aauaucaaagccuacaguc

SEQ ID NO: 1547138 - RNA, 19 nt, Artificial Sequence
  Description of Artificial Sequence: Synthetic oligonucleotide
  Sense strand starting at position 839 of SEQ ID NO: 1245236
aguaacccggcucauuaau

SEQ ID NO: 1547139 - RNA, 19 nt, Artificial Sequence
  Description of Artificial Sequence: Synthetic oligonucleotide
  Antisense strand to SEQ ID NO: 1547138
auuaaugagccggguuacu

SEQ ID NO: 1547140 - RNA, 19 nt, Artificial Sequence
  Description of Artificial Sequence: Synthetic oligonucleotide
  Sense strand starting at position 847 of SEQ ID NO: 1245236
ggcucauuaauacgaaggu

SEQ ID NO: 1547141 - RNA, 19 nt, Artificial Sequence
  Description of Artificial Sequence: Synthetic oligonucleotide
  Antisense strand to SEQ ID NO: 1547140
accuucguauuaaugagcc

SEQ ID NO: 1547142 - RNA, 19 nt, Artificial Sequence
  Description of Artificial Sequence: Synthetic oligonucleotide
  Sense strand starting at position 934 of SEQ ID NO: 1245236
guuuaugaaucaccaugaa

SEQ ID NO: 1547143 - RNA, 19 nt, Artificial Sequence
  Description of Artificial Sequence: Synthetic oligonucleotide
  Antisense strand to SEQ ID NO: 1547142
uucauggugauucauaaac

SEQ ID NO: 1547144 - RNA, 19 nt, Artificial Sequence
  Description of Artificial Sequence: Synthetic oligonucleotide
  Sense strand starting at position 1000 of SEQ ID NO: 1245236
ucacauguaugaguaggaa

SEQ ID NO: 1547145 - RNA, 19 nt, Artificial Sequence
  Description of Artificial Sequence: Synthetic oligonucleotide
  Antisense strand to SEQ ID NO: 1547144
uuccuacucauacauguga

SEQ ID NO: 1547146 - RNA, 19 nt, Artificial Sequence
  Description of Artificial Sequence: Synthetic oligonucleotide
  Sense strand starting at position 1287 of SEQ ID NO: 1245236
ggagguuucuaagucagaa

SEQ ID NO: 1547147 - RNA, 19 nt, Artificial Sequence
  Description of Artificial Sequence: Synthetic oligonucleotide
  Antisense strand to SEQ ID NO: 1547146
uucugacuuagaaaccucc

SEQ ID NO: 1547148 - RNA, 19 nt, Artificial Sequence
  Description of Artificial Sequence: Synthetic oligonucleotide
  Sense strand starting at position 1434 of SEQ ID NO: 1245236
aaguauuauugcuuugguu

SEQ ID NO: 1547149 - RNA, 19 nt, Artificial Sequence
  Description of Artificial Sequence: Synthetic oligonucleotide
  Antisense strand to SEQ ID NO: 1547148
aaccaaagcaauaauacuu

SEQ ID NO: 1547150 - RNA, 19 nt, Artificial Sequence
  Description of Artificial Sequence: Synthetic oligonucleotide
  Sense strand starting at position 1605 of SEQ ID NO: 1245236
gcuaacugugaacaccaaa

SEQ ID NO: 1547151 - RNA, 19 nt, Artificial Sequence
  Description of Artificial Sequence: Synthetic oligonucleotide
  Antisense strand to SEQ ID NO: 1547150
uuugguguucacaguuagc

SEQ ID NO: 1547152 - RNA, 19 nt, Artificial Sequence
  Description of Artificial Sequence: Synthetic oligonucleotide
  Sense strand starting at position 1646 of SEQ ID NO: 1245236
ugguacaugcuagaacuau

SEQ ID NO: 1547153 - RNA, 19 nt, Artificial Sequence
  Description of Artificial Sequence: Synthetic oligonucleotide
  Antisense strand to SEQ ID NO: 1547152
auaguucuagcauguacca

SEQ ID NO: 1547154 - RNA, 19 nt, Artificial Sequence
  Description of Artificial Sequence: Synthetic oligonucleotide
  Sense strand starting at position 1658 of SEQ ID NO: 1245236
gaacuaugccgcugacaua

SEQ ID NO: 1547155 - RNA, 19 nt, Artificial Sequence
  Description of Artificial Sequence: Synthetic oligonucleotide
  Antisense strand to SEQ ID NO: 1547154
uaugucagcggcauaguuc

SEQ ID NO: 1547156 - RNA, 19 nt, Artificial Sequence
  Description of Artificial Sequence: Synthetic oligonucleotide
  Sense strand starting at position 2006 of SEQ ID NO: 1245236
gguagaaagaaaugcuugu

SEQ ID NO: 1547157 - RNA, 19 nt, Artificial Sequence
  Description of Artificial Sequence: Synthetic oligonucleotide
  Antisense strand to SEQ ID NO: 1547156
acaagcauuucuuucuacc

SEQ ID NO: 1547158 - RNA, 19 nt, Artificial Sequence
  Description of Artificial Sequence: Synthetic oligonucleotide
  Sense strand starting at position 2010 of SEQ ID NO: 1245236
gaaagaaaugcuuguuggu

SEQ ID NO: 1547159 - RNA, 19 nt, Artificial Sequence
  Description of Artificial Sequence: Synthetic oligonucleotide
  Antisense strand to SEQ ID NO: 1547158
accaacaagcauuucuuuc

SEQ ID NO: 1547160 - RNA, 19 nt, Artificial Sequence
  Description of Artificial Sequence: Synthetic oligonucleotide
  Sense strand starting at position 2015 of SEQ ID NO: 1245236
aaaugcuuguugguggaaa

SEQ ID NO: 1547161 - RNA, 19 nt, Artificial Sequence
  Description of Artificial Sequence: Synthetic oligonucleotide
  Antisense strand to SEQ ID NO: 1547160
uuuccaccaacaagcauuu

SEQ ID NO: 1547162 - RNA, 19 nt, Artificial Sequence
  Description of Artificial Sequence: Synthetic oligonucleotide
  Sense strand starting at position 2138 of SEQ ID NO: 1245236
gcaguuguuccugcagcau

SEQ ID NO: 1547163 - RNA, 19 nt, Artificial Sequence
  Description of Artificial Sequence: Synthetic oligonucleotide
  Antisense strand to SEQ ID NO: 1547162
augcugcaggaacaacugc

SEQ ID NO: 1547164 - RNA, 19 nt, Artificial Sequence
  Description of Artificial Sequence: Synthetic oligonucleotide
  Sense strand starting at position 2164 of SEQ ID NO: 1245236
ugaaguucucagugggcuu

SEQ ID NO: 1547165 - RNA, 19 nt, Artificial Sequence
  Description of Artificial Sequence: Synthetic oligonucleotide
  Antisense strand to SEQ ID NO: 1547164
aagcccacugagaacuuca

SEQ ID NO: 1547166 - RNA, 19 nt, Artificial Sequence
  Description of Artificial Sequence: Synthetic oligonucleotide
  Sense strand starting at position 2195 of SEQ ID NO: 1245236
ggcaauaacagaggucaug

SEQ ID NO: 1547167 - RNA, 19 nt, Artificial Sequence
  Description of Artificial Sequence: Synthetic oligonucleotide
  Antisense strand to SEQ ID NO: 1547166
caugaccucuguuauugcc

SEQ ID NO: 1547168 - RNA, 19 nt, Artificial Sequence
  Description of Artificial Sequence: Synthetic oligonucleotide
  Sense strand starting at position 2220 of SEQ ID NO: 1245236
uguggaugacucuaugucu

SEQ ID NO: 1547169 - RNA, 19 nt, Artificial Sequence
  Description of Artificial Sequence: Synthetic oligonucleotide
  Antisense strand to SEQ ID NO: 1547168
agacauagagucauccaca

SEQ ID NO: 1547170 - RNA, 19 nt, Artificial Sequence
  Description of Artificial Sequence: Synthetic oligonucleotide
  Sense strand starting at position 2406 of SEQ ID NO: 1245236
aaagcuuauugucuugaag

SEQ ID NO: 1547171 - RNA, 19 nt, Artificial Sequence
  Description of Artificial Sequence: Synthetic oligonucleotide
  Antisense strand to SEQ ID NO: 1547170
cuucaagacaauaagcuuu

SEQ ID NO: 1547172 - RNA, 19 nt, Artificial Sequence
  Description of Artificial Sequence: Synthetic oligonucleotide
  Sense strand starting at position 2409 of SEQ ID NO: 1245236
gcuuauugucuugaagagg

SEQ ID NO: 1547173 - RNA, 19 nt, Artificial Sequence
  Description of Artificial Sequence: Synthetic oligonucleotide
  Antisense strand to SEQ ID NO: 1547172
ccucuucaagacaauaagc

SEQ ID NO: 1547174 - RNA, 19 nt, Artificial Sequence
  Description of Artificial Sequence: Synthetic oligonucleotide
  Sense strand starting at position 2480 of SEQ ID NO: 1245236
aaucaauagucagaugaga

SEQ ID NO: 1547175 - RNA, 19 nt, Artificial Sequence
  Description of Artificial Sequence: Synthetic oligonucleotide
  Antisense strand to SEQ ID NO: 1547174
ucucaucugacuauugauu

SEQ ID NO: 1547176 - RNA, 19 nt, Artificial Sequence
  Description of Artificial Sequence: Synthetic oligonucleotide
  Sense strand starting at position 2563 of SEQ ID NO: 1245236
ugcccuuagguguaaauca

SEQ ID NO: 1547177 - RNA, 19 nt, Artificial Sequence
  Description of Artificial Sequence: Synthetic oligonucleotide
  Antisense strand to SEQ ID NO: 1547176
ugauuuacaccuaagggca

SEQ ID NO: 1547178 - RNA, 19 nt, Artificial Sequence
  Description of Artificial Sequence: Synthetic oligonucleotide
  Sense strand starting at position 2742 of SEQ ID NO: 1245236
uuuccucuugcuggaagaa

SEQ ID NO: 1547179 - RNA, 19 nt, Artificial Sequence
  Description of Artificial Sequence: Synthetic oligonucleotide
  Antisense strand to SEQ ID NO: 1547178
uucuuccagcaagaggaaa

SEQ ID NO: 1547180 - RNA, 19 nt, Artificial Sequence
  Description of Artificial Sequence: Synthetic oligonucleotide
  Sense strand starting at position 2886 of SEQ ID NO: 1245236
ucgcgaaguguuccuggca

SEQ ID NO: 1547181 - RNA, 19 nt, Artificial Sequence
  Description of Artificial Sequence: Synthetic oligonucleotide
  Antisense strand to SEQ ID NO: 1547180
ugccaggaacacuucgcga

SEQ ID NO: 1547182 - RNA, 19 nt, Artificial Sequence
  Description of Artificial Sequence: Synthetic oligonucleotide
  Sense strand starting at position 2900 of SEQ ID NO: 1245236
uggcaucucagcugagaaa

SEQ ID NO: 1547183 - RNA, 19 nt, Artificial Sequence
  Description of Artificial Sequence: Synthetic oligonucleotide
  Antisense strand to SEQ ID NO: 1547182
uuucucagcugagaugcca

SEQ ID NO: 1547184 - RNA, 19 nt, Artificial Sequence
  Description of Artificial Sequence: Synthetic oligonucleotide
  Sense strand starting at position 2950 of SEQ ID NO: 1245236
cguucaaacgcugggauuu

SEQ ID NO: 1547185 - RNA, 19 nt, Artificial Sequence
  Description of Artificial Sequence: Synthetic oligonucleotide
  Antisense strand to SEQ ID NO: 1547184
aaaucccagcguuugaacg

SEQ ID NO: 1547186 - RNA, 19 nt, Artificial Sequence
  Description of Artificial Sequence: Synthetic oligonucleotide
  Sense strand starting at position 3460 of SEQ ID NO: 1245236
caaguugcugaauagacua

SEQ ID NO: 1547187 - RNA, 19 nt, Artificial Sequence
  Description of Artificial Sequence: Synthetic oligonucleotide
  Antisense strand to SEQ ID NO: 1547186
uagucuauucagcaacuug

SEQ ID NO: 1547188 - RNA, 19 nt, Artificial Sequence
  Description of Artificial Sequence: Synthetic oligonucleotide
  Sense strand starting at position 3650 of SEQ ID NO: 1245236
cgauuugccuauucccuua

SEQ ID NO: 1547189 - RNA, 19 nt, Artificial Sequence
  Description of Artificial Sequence: Synthetic oligonucleotide
  Antisense strand to SEQ ID NO: 1547188
uaagggaauaggcaaaucg

SEQ ID NO: 1547190 - RNA, 19 nt, Artificial Sequence
  Description of Artificial Sequence: Synthetic oligonucleotide
  Sense strand starting at position 3698 of SEQ ID NO: 1245236
aauguuaccugauugugau

SEQ ID NO: 1547191 - RNA, 19 nt, Artificial Sequence
  Description of Artificial Sequence: Synthetic oligonucleotide
  Antisense strand to SEQ ID NO: 1547190
aucacaaucagguaacauu

SEQ ID NO: 1547192 - RNA, 19 nt, Artificial Sequence
  Description of Artificial Sequence: Synthetic oligonucleotide
  Sense strand starting at position 3699 of SEQ ID NO: 1245236
auguuaccugauugugaug

SEQ ID NO: 1547193 - RNA, 19 nt, Artificial Sequence
  Description of Artificial Sequence: Synthetic oligonucleotide
  Antisense strand to SEQ ID NO: 1547192
caucacaaucagguaacau

SEQ ID NO: 1547194 - RNA, 19 nt, Artificial Sequence
  Description of Artificial Sequence: Synthetic oligonucleotide
  Sense strand starting at position 3705 of SEQ ID NO: 1245236
ccugauugugaugggcuua

SEQ ID NO: 1547195 - RNA, 19 nt, Artificial Sequence
  Description of Artificial Sequence: Synthetic oligonucleotide
  Antisense strand to SEQ ID NO: 1547194
uaagcccaucacaaucagg

SEQ ID NO: 1547196 - RNA, 19 nt, Artificial Sequence
  Description of Artificial Sequence: Synthetic oligonucleotide
  Sense strand starting at position 3706 of SEQ ID NO: 1245236
cugauugugaugggcuuaa

SEQ ID NO: 1547197 - RNA, 19 nt, Artificial Sequence
  Description of Artificial Sequence: Synthetic oligonucleotide
  Antisense strand to SEQ ID NO: 1547196
uuaagcccaucacaaucag

SEQ ID NO: 1547198 - RNA, 19 nt, Artificial Sequence
  Description of Artificial Sequence: Synthetic oligonucleotide
  Sense strand starting at position 3710 of SEQ ID NO: 1245236
uugugaugggcuuaauugu

SEQ ID NO: 1547199 - RNA, 19 nt, Artificial Sequence
  Description of Artificial Sequence: Synthetic oligonucleotide
  Antisense strand to SEQ ID NO: 1547198
acaauuaagcccaucacaa

SEQ ID NO: 1547200 - RNA, 19 nt, Artificial Sequence
  Description of Artificial Sequence: Synthetic oligonucleotide
  Sense strand starting at position 3719 of SEQ ID NO: 1245236
gcuuaauuguauuugccca

SEQ ID NO: 1547201 - RNA, 19 nt, Artificial Sequence
  Description of Artificial Sequence: Synthetic oligonucleotide
  Antisense strand to SEQ ID NO: 1547200
ugggcaaauacaauuaagc

SEQ ID NO: 1547202 - RNA, 19 nt, Artificial Sequence
  Description of Artificial Sequence: Synthetic oligonucleotide
  Sense strand starting at position 3747 of SEQ ID NO: 1245236
aguugaagucuuuaauacu

SEQ ID NO: 1547203 - RNA, 19 nt, Artificial Sequence
  Description of Artificial Sequence: Synthetic oligonucleotide
  Antisense strand to SEQ ID NO: 1547202
aguauuaaagacuucaacu

SEQ ID NO: 1547204 - RNA, 19 nt, Artificial Sequence
  Description of Artificial Sequence: Synthetic oligonucleotide
  Sense strand starting at position 237 of SEQ ID NO: 1245237
uuauuugcacugugaucau

SEQ ID NO: 1547205 - RNA, 19 nt, Artificial Sequence
  Description of Artificial Sequence: Synthetic oligonucleotide
  Antisense strand to SEQ ID NO: 1547204
augaucacagugcaaauaa

SEQ ID NO: 1547206 - RNA, 19 nt, Artificial Sequence
  Description of Artificial Sequence: Synthetic oligonucleotide
  Sense strand starting at position 246 of SEQ ID NO: 1245237
cugugaucauucuuugauc

SEQ ID NO: 1547207 - RNA, 19 nt, Artificial Sequence
  Description of Artificial Sequence: Synthetic oligonucleotide
  Antisense strand to SEQ ID NO: 1547206
gaucaaagaaugaucacag

SEQ ID NO: 1547208 - RNA, 19 nt, Artificial Sequence
  Description of Artificial Sequence: Synthetic oligonucleotide
  Sense strand starting at position 247 of SEQ ID NO: 1245237
ugugaucauucuuugauca

SEQ ID NO: 1547209 - RNA, 19 nt, Artificial Sequence
  Description of Artificial Sequence: Synthetic oligonucleotide
  Antisense strand to SEQ ID NO: 1547208
ugaucaaagaaugaucaca

SEQ ID NO: 1547210 - RNA, 19 nt, Artificial Sequence
  Description of Artificial Sequence: Synthetic oligonucleotide
  Sense strand starting at position 248 of SEQ ID NO: 1245237
gugaucauucuuugaucaa

SEQ ID NO: 1547211 - RNA, 19 nt, Artificial Sequence
  Description of Artificial Sequence: Synthetic oligonucleotide
  Antisense strand to SEQ ID NO: 1547210
uugaucaaagaaugaucac

SEQ ID NO: 1547212 - RNA, 19 nt, Artificial Sequence
  Description of Artificial Sequence: Synthetic oligonucleotide
  Sense strand starting at position 583 of SEQ ID NO: 1245237
ggaaauaccucccugcuga

SEQ ID NO: 1547213 - RNA, 19 nt, Artificial Sequence
  Description of Artificial Sequence: Synthetic oligonucleotide
  Antisense strand to SEQ ID NO: 1547212
ucagcagggagguauuucc

SEQ ID NO: 1547214 - RNA, 19 nt, Artificial Sequence
  Description of Artificial Sequence: Synthetic oligonucleotide
  Sense strand starting at position 600 of SEQ ID NO: 1245237
gaguaaugcuucuuggguu

SEQ ID NO: 1547215 - RNA, 19 nt, Artificial Sequence
  Description of Artificial Sequence: Synthetic oligonucleotide
  Antisense strand to SEQ ID NO: 1547214
aacccaagaagcauuacuc

SEQ ID NO: 1547216 - RNA, 19 nt, Artificial Sequence
  Description of Artificial Sequence: Synthetic oligonucleotide
  Sense strand starting at position 604 of SEQ ID NO: 1245237
aaugcuucuuggguuguaa

SEQ ID NO: 1547217 - RNA, 19 nt, Artificial Sequence
  Description of Artificial Sequence: Synthetic oligonucleotide
  Antisense strand to SEQ ID NO: 1547216
uuacaacccaagaagcauu

SEQ ID NO: 1547218 - RNA, 19 nt, Artificial Sequence
  Description of Artificial Sequence: Synthetic oligonucleotide
  Sense strand starting at position 874 of SEQ ID NO: 1245237
agcccuuuccagugaaacc

SEQ ID NO: 1547219 - RNA, 19 nt, Artificial Sequence
  Description of Artificial Sequence: Synthetic oligonucleotide
  Antisense strand to SEQ ID NO: 1547218
gguuucacuggaaagggcu

SEQ ID NO: 1547220 - RNA, 19 nt, Artificial Sequence
  Description of Artificial Sequence: Synthetic oligonucleotide
  Sense strand starting at position 917 of SEQ ID NO: 1245237
ucagucgcuuuauuaauaa

SEQ ID NO: 1547221 - RNA, 19 nt, Artificial Sequence
  Description of Artificial Sequence: Synthetic oligonucleotide
  Antisense strand to SEQ ID NO: 1547220
uuauuaauaaagcgacuga

SEQ ID NO: 1547222 - RNA, 19 nt, Artificial Sequence
  Description of Artificial Sequence: Synthetic oligonucleotide
  Sense strand starting at position 985 of SEQ ID NO: 1245237
cuuugaauccucgggagga

SEQ ID NO: 1547223 - RNA, 19 nt, Artificial Sequence
  Description of Artificial Sequence: Synthetic oligonucleotide
  Antisense strand to SEQ ID NO: 1547222
uccucccgaggauucaaag

SEQ ID NO: 1547224 - RNA, 19 nt, Artificial Sequence
  Description of Artificial Sequence: Synthetic oligonucleotide
  Sense strand starting at position 1093 of SEQ ID NO: 1245237
ccacaauccuggccguaga

SEQ ID NO: 1547225 - RNA, 19 nt, Artificial Sequence
  Description of Artificial Sequence: Synthetic oligonucleotide
  Antisense strand to SEQ ID NO: 1547224
ucuacggccaggauugugg

SEQ ID NO: 1547226 - RNA, 19 nt, Artificial Sequence
  Description of Artificial Sequence: Synthetic oligonucleotide
  Sense strand starting at position 1150 of SEQ ID NO: 1245237
cccauucccgccgggauaa

SEQ ID NO: 1547227 - RNA, 19 nt, Artificial Sequence
  Description of Artificial Sequence: Synthetic oligonucleotide
  Antisense strand to SEQ ID NO: 1547226
uuaucccggcgggaauggg

SEQ ID NO: 1547228 - RNA, 19 nt, Artificial Sequence
  Description of Artificial Sequence: Synthetic oligonucleotide
  Sense strand starting at position 1666 of SEQ ID NO: 1245237
cucaccucgucuucggaaa

SEQ ID NO: 1547229 - RNA, 19 nt, Artificial Sequence
  Description of Artificial Sequence: Synthetic oligonucleotide
  Antisense strand to SEQ ID NO: 1547228
uuuccgaagacgaggugag

SEQ ID NO: 1547230 - RNA, 19 nt, Artificial Sequence
  Description of Artificial Sequence: Synthetic oligonucleotide
  Sense strand starting at position 2707 of SEQ ID NO: 1245237
ucgccauugccugugucaa

SEQ ID NO: 1547231 - RNA, 19 nt, Artificial Sequence
  Description of Artificial Sequence: Synthetic oligonucleotide
  Antisense strand to SEQ ID NO: 1547230
uugacacaggcaauggcga

SEQ ID NO: 1547232 - RNA, 19 nt, Artificial Sequence
  Description of Artificial Sequence: Synthetic oligonucleotide
  Sense strand starting at position 2790 of SEQ ID NO: 1245237
acagcaugguucuuugaau

SEQ ID NO: 1547233 - RNA, 19 nt, Artificial Sequence
  Description of Artificial Sequence: Synthetic oligonucleotide
  Antisense strand to SEQ ID NO: 1547232
auucaaagaaccaugcugu

SEQ ID NO: 1547234 - RNA, 19 nt, Artificial Sequence
  Description of Artificial Sequence: Synthetic oligonucleotide
  Sense strand starting at position 2817 of SEQ ID NO: 1245237
guucauuugugagccgcaa

SEQ ID NO: 1547235 - RNA, 19 nt, Artificial Sequence
  Description of Artificial Sequence: Synthetic oligonucleotide
  Antisense strand to SEQ ID NO: 1547234
uugcggcucacaaaugaac

SEQ ID NO: 1547236 - RNA, 19 nt, Artificial Sequence
  Description of Artificial Sequence: Synthetic oligonucleotide
  Sense strand starting at position 2831 of SEQ ID NO: 1245237
cgcaacgugaaauaucaaa

SEQ ID NO: 1547237 - RNA, 19 nt, Artificial Sequence
  Description of Artificial Sequence: Synthetic oligonucleotide
  Antisense strand to SEQ ID NO: 1547236
uuugauauuucacguugcg

SEQ ID NO: 1547238 - RNA, 19 nt, Artificial Sequence
  Description of Artificial Sequence: Synthetic oligonucleotide
  Sense strand starting at position 2860 of SEQ ID NO: 1245237
agguuauccuuugcauaug

SEQ ID NO: 1547239 - RNA, 19 nt, Artificial Sequence
  Description of Artificial Sequence: Synthetic oligonucleotide
  Antisense strand to SEQ ID NO: 1547238
cauaugcaaaggauaaccu

SEQ ID NO: 1547240 - RNA, 19 nt, Artificial Sequence
  Description of Artificial Sequence: Synthetic oligonucleotide
  Sense strand starting at position 2871 of SEQ ID NO: 1245237
ugcauaugcaaaugaucga

SEQ ID NO: 1547241 - RNA, 19 nt, Artificial Sequence
  Description of Artificial Sequence: Synthetic oligonucleotide
  Antisense strand to SEQ ID NO: 1547240
ucgaucauuugcauaugca

SEQ ID NO: 1547242 - RNA, 19 nt, Artificial Sequence
  Description of Artificial Sequence: Synthetic oligonucleotide
  Sense strand starting at position 2878 of SEQ ID NO: 1245237
gcaaaugaucgagacgucu

SEQ ID NO: 1547243 - RNA, 19 nt, Artificial Sequence
  Description of Artificial Sequence: Synthetic oligonucleotide
  Antisense strand to SEQ ID NO: 1547242
agacgucucgaucauuugc

SEQ ID NO: 1547244 - RNA, 19 nt, Artificial Sequence
  Description of Artificial Sequence: Synthetic oligonucleotide
  Sense strand starting at position 2908 of SEQ ID NO: 1245237
guaggauucuucccaccac

SEQ ID NO: 1547245 - RNA, 19 nt, Artificial Sequence
  Description of Artificial Sequence: Synthetic oligonucleotide
  Antisense strand to SEQ ID NO: 1547244
guggugggaagaauccuac

SEQ ID NO: 1547246 - RNA, 19 nt, Artificial Sequence
  Description of Artificial Sequence: Synthetic oligonucleotide
  Sense strand starting at position 2982 of SEQ ID NO: 1245237
gcaagagacuacuuuaaau

SEQ ID NO: 1547247 - RNA, 19 nt, Artificial Sequence
  Description of Artificial Sequence: Synthetic oligonucleotide
  Antisense strand to SEQ ID NO: 1547246
auuuaaaguagucucuugc

SEQ ID NO: 1547248 - RNA, 19 nt, Artificial Sequence
  Description of Artificial Sequence: Synthetic oligonucleotide
  Sense strand starting at position 3003 of SEQ ID NO: 1245237
gugaaagaaauucgucagu

SEQ ID NO: 1547249 - RNA, 19 nt, Artificial Sequence
  Description of Artificial Sequence: Synthetic oligonucleotide
  Antisense strand to SEQ ID NO: 1547248
acugacgaauuucuuucac

SEQ ID NO: 1547250 - RNA, 19 nt, Artificial Sequence
  Description of Artificial Sequence: Synthetic oligonucleotide
  Sense strand starting at position 3005 of SEQ ID NO: 1245237
gaaagaaauucgucagucg

SEQ ID NO: 1547251 - RNA, 19 nt, Artificial Sequence
  Description of Artificial Sequence: Synthetic oligonucleotide
  Antisense strand to SEQ ID NO: 1547250
cgacugacgaauuucuuuc

SEQ ID NO: 1547252 - RNA, 19 nt, Artificial Sequence
  Description of Artificial Sequence: Synthetic oligonucleotide
  Sense strand starting at position 3006 of SEQ ID NO: 1245237
aaagaaauucgucagucga

SEQ ID NO: 1547253 - RNA, 19 nt, Artificial Sequence
  Description of Artificial Sequence: Synthetic oligonucleotide
  Antisense strand to SEQ ID NO: 1547252
ucgacugacgaauuucuuu

SEQ ID NO: 1547254 - RNA, 19 nt, Artificial Sequence
  Description of Artificial Sequence: Synthetic oligonucleotide
  Sense strand starting at position 3008 of SEQ ID NO: 1245237
agaaauucgucagucgacu

SEQ ID NO: 1547255 - RNA, 19 nt, Artificial Sequence
  Description of Artificial Sequence: Synthetic oligonucleotide
  Antisense strand to SEQ ID NO: 1547254
agucgacugacgaauuucu

SEQ ID NO: 1547256 - RNA, 19 nt, Artificial Sequence
  Description of Artificial Sequence: Synthetic oligonucleotide
  Sense strand starting at position 3030 of SEQ ID NO: 1245237
ucggaagccuuuccuuaaa

SEQ ID NO: 1547257 - RNA, 19 nt, Artificial Sequence
  Description of Artificial Sequence: Synthetic oligonucleotide
  Antisense strand to SEQ ID NO: 1547256
uuuaaggaaaggcuuccga

SEQ ID NO: 1547258 - RNA, 19 nt, Artificial Sequence
  Description of Artificial Sequence: Synthetic oligonucleotide
  Sense strand starting at position 3032 of SEQ ID NO: 1245237
ggaagccuuuccuuaaauu

SEQ ID NO: 1547259 - RNA, 19 nt, Artificial Sequence
  Description of Artificial Sequence: Synthetic oligonucleotide
  Antisense strand to SEQ ID NO: 1547258
aauuuaaggaaaggcuucc

SEQ ID NO: 1547260 - RNA, 19 nt, Artificial Sequence
  Description of Artificial Sequence: Synthetic oligonucleotide
  Sense strand starting at position 3140 of SEQ ID NO: 1245237
uggguauuaccaggaugca

SEQ ID NO: 1547261 - RNA, 19 nt, Artificial Sequence
  Description of Artificial Sequence: Synthetic oligonucleotide
  Antisense strand to SEQ ID NO: 1547260
ugcauccugguaauaccca

SEQ ID NO: 1547262 - RNA, 19 nt, Artificial Sequence
  Description of Artificial Sequence: Synthetic oligonucleotide
  Sense strand starting at position 3141 of SEQ ID NO: 1245237
ggguauuaccaggaugcau

SEQ ID NO: 1547263 - RNA, 19 nt, Artificial Sequence
  Description of Artificial Sequence: Synthetic oligonucleotide
  Antisense strand to SEQ ID NO: 1547262
augcauccugguaauaccc

SEQ ID NO: 1547264 - RNA, 19 nt, Artificial Sequence
  Description of Artificial Sequence: Synthetic oligonucleotide
  Sense strand starting at position 3336 of SEQ ID NO: 1245237
aaaccugugccguagaaug

SEQ ID NO: 1547265 - RNA, 19 nt, Artificial Sequence
  Description of Artificial Sequence: Synthetic oligonucleotide
  Antisense strand to SEQ ID NO: 1547264
cauucuacggcacagguuu

SEQ ID NO: 1547266 - RNA, 19 nt, Artificial Sequence
  Description of Artificial Sequence: Synthetic oligonucleotide
  Sense strand starting at position 3348 of SEQ ID NO: 1245237
uagaauggguuuccuuuga

SEQ ID NO: 1547267 - RNA, 19 nt, Artificial Sequence
  Description of Artificial Sequence: Synthetic oligonucleotide
  Antisense strand to SEQ ID NO: 1547266
ucaaaggaaacccauucua

SEQ ID NO: 1547268 - RNA, 19 nt, Artificial Sequence
  Description of Artificial Sequence: Synthetic oligonucleotide
  Sense strand starting at position 3352 of SEQ ID NO: 1245237
auggguuuccuuugacgac

SEQ ID NO: 1547269 - RNA, 19 nt, Artificial Sequence
  Description of Artificial Sequence: Synthetic oligonucleotide
  Antisense strand to SEQ ID NO: 1547268
gucgucaaaggaaacccau

SEQ ID NO: 1547270 - RNA, 19 nt, Artificial Sequence
  Description of Artificial Sequence: Synthetic oligonucleotide
  Sense strand starting at position 3397 of SEQ ID NO: 1245237
ucagaagccuucucuagaa

SEQ ID NO: 1547271 - RNA, 19 nt, Artificial Sequence
  Description of Artificial Sequence: Synthetic oligonucleotide
  Antisense strand to SEQ ID NO: 1547270
uucuagagaaggcuucuga

SEQ ID NO: 1547272 - RNA, 19 nt, Artificial Sequence
  Description of Artificial Sequence: Synthetic oligonucleotide
  Sense strand starting at position 3399 of SEQ ID NO: 1245237
agaagccuucucuagaagu

SEQ ID NO: 1547273 - RNA, 19 nt, Artificial Sequence
  Description of Artificial Sequence: Synthetic oligonucleotide
  Antisense strand to SEQ ID NO: 1547272
acuucuagagaaggcuucu

SEQ ID NO: 1547274 - RNA, 19 nt, Artificial Sequence
  Description of Artificial Sequence: Synthetic oligonucleotide
  Sense strand starting at position 3413 of SEQ ID NO: 1245237
gaagucuugagccgucaag

SEQ ID NO: 1547275 - RNA, 19 nt, Artificial Sequence
  Description of Artificial Sequence: Synthetic oligonucleotide
  Antisense strand to SEQ ID NO: 1547274
cuugacggcucaagacuuc

SEQ ID NO: 1547276 - RNA, 19 nt, Artificial Sequence
  Description of Artificial Sequence: Synthetic oligonucleotide
  Sense strand starting at position 3465 of SEQ ID NO: 1245237
gagaacuauuuauggagga

SEQ ID NO: 1547277 - RNA, 19 nt, Artificial Sequence
  Description of Artificial Sequence: Synthetic oligonucleotide
  Antisense strand to SEQ ID NO: 1547276
uccuccauaaauaguucuc

SEQ ID NO: 1547278 - RNA, 19 nt, Artificial Sequence
  Description of Artificial Sequence: Synthetic oligonucleotide
  Sense strand starting at position 3615 of SEQ ID NO: 1245237
ggaucauaagaucgguagu

SEQ ID NO: 1547279 - RNA, 19 nt, Artificial Sequence
  Description of Artificial Sequence: Synthetic oligonucleotide
  Antisense strand to SEQ ID NO: 1547278
acuaccgaucuuaugaucc

SEQ ID NO: 1547280 - RNA, 19 nt, Artificial Sequence
  Description of Artificial Sequence: Synthetic oligonucleotide
  Sense strand starting at position 3616 of SEQ ID NO: 1245237
gaucauaagaucgguaguu

SEQ ID NO: 1547281 - RNA, 19 nt, Artificial Sequence
  Description of Artificial Sequence: Synthetic oligonucleotide
  Antisense strand to SEQ ID NO: 1547280
aacuaccgaucuuaugauc

SEQ ID NO: 1547282 - RNA, 19 nt, Artificial Sequence
  Description of Artificial Sequence: Synthetic oligonucleotide
  Sense strand starting at position 3977 of SEQ ID NO: 1245237
gccugugacccucauggau

SEQ ID NO: 1547283 - RNA, 19 nt, Artificial Sequence
  Description of Artificial Sequence: Synthetic oligonucleotide
  Antisense strand to SEQ ID NO: 1547282
auccaugagggucacaggc

SEQ ID NO: 1547284 - RNA, 19 nt, Artificial Sequence
  Description of Artificial Sequence: Synthetic oligonucleotide
  Sense strand starting at position 94 of SEQ ID NO: 1245238
gcagcuuacagguaaggaa

SEQ ID NO: 1547285 - RNA, 19 nt, Artificial Sequence
  Description of Artificial Sequence: Synthetic oligonucleotide
  Antisense strand to SEQ ID NO: 1547284
uuccuuaccuguaagcugc

SEQ ID NO: 1547286 - RNA, 19 nt, Artificial Sequence
  Description of Artificial Sequence: Synthetic oligonucleotide
  Sense strand starting at position 127 of SEQ ID NO: 1245238
agguuuauggcguuugucu

SEQ ID NO: 1547287 - RNA, 19 nt, Artificial Sequence
  Description of Artificial Sequence: Synthetic oligonucleotide
  Antisense strand to SEQ ID NO: 1547286
agacaaacgccauaaaccu

SEQ ID NO: 1547288 - RNA, 19 nt, Artificial Sequence
  Description of Artificial Sequence: Synthetic oligonucleotide
  Sense strand starting at position 128 of SEQ ID NO: 1245238
gguuuauggcguuugucuu

SEQ ID NO: 1547289 - RNA, 19 nt, Artificial Sequence
  Description of Artificial Sequence: Synthetic oligonucleotide
  Antisense strand to SEQ ID NO: 1547288
aagacaaacgccauaaacc

SEQ ID NO: 1547290 - RNA, 19 nt, Artificial Sequence
  Description of Artificial Sequence: Synthetic oligonucleotide
  Sense strand starting at position 135 of SEQ ID NO: 1245238
ggcguuugucuugccaauu

SEQ ID NO: 1547291 - RNA, 19 nt, Artificial Sequence
  Description of Artificial Sequence: Synthetic oligonucleotide
  Antisense strand to SEQ ID NO: 1547290
aauuggcaagacaaacgcc

SEQ ID NO: 1547292 - RNA, 19 nt, Artificial Sequence
  Description of Artificial Sequence: Synthetic oligonucleotide
  Sense strand starting at position 314 of SEQ ID NO: 1245238
acgagaagucgccaucaag

SEQ ID NO: 1547293 - RNA, 19 nt, Artificial Sequence
  Description of Artificial Sequence: Synthetic oligonucleotide
  Antisense strand to SEQ ID NO: 1547292
cuugauggcgacuucucgu

SEQ ID NO: 1547294 - RNA, 19 nt, Artificial Sequence
  Description of Artificial Sequence: Synthetic oligonucleotide
  Sense strand starting at position 383 of SEQ ID NO: 1245238
gaagauuucuggcaaaugu

SEQ ID NO: 1547295 - RNA, 19 nt, Artificial Sequence
  Description of Artificial Sequence: Synthetic oligonucleotide
  Antisense strand to SEQ ID NO: 1547294
acauuugccagaaaucuuc

SEQ ID NO: 1547296 - RNA, 19 nt, Artificial Sequence
  Description of Artificial Sequence: Synthetic oligonucleotide
  Sense strand starting at position 492 of SEQ ID NO: 1245238
ccgucucagccuuugucua

SEQ ID NO: 1547297 - RNA, 19 nt, Artificial Sequence
  Description of Artificial Sequence: Synthetic oligonucleotide
  Antisense strand to SEQ ID NO: 1547296
uagacaaaggcugagacgg

SEQ ID NO: 1547298 - RNA, 19 nt, Artificial Sequence
  Description of Artificial Sequence: Synthetic oligonucleotide
  Sense strand starting at position 521 of SEQ ID NO: 1245238
agacuuucucauuguuuau

SEQ ID NO: 1547299 - RNA, 19 nt, Artificial Sequence
  Description of Artificial Sequence: Synthetic oligonucleotide
  Antisense strand to SEQ ID NO: 1547298
auaaacaaugagaaagucu

SEQ ID NO: 1547300 - RNA, 19 nt, Artificial Sequence
  Description of Artificial Sequence: Synthetic oligonucleotide
  Sense strand starting at position 612 of SEQ ID NO: 1245238
aaguuauauguuuaccgga

SEQ ID NO: 1547301 - RNA, 19 nt, Artificial Sequence
  Description of Artificial Sequence: Synthetic oligonucleotide
  Antisense strand to SEQ ID NO: 1547300
uccgguaaacauauaacuu

SEQ ID NO: 1547302 - RNA, 19 nt, Artificial Sequence
  Description of Artificial Sequence: Synthetic oligonucleotide
  Sense strand starting at position 614 of SEQ ID NO: 1245238
guuauauguuuaccggaga

SEQ ID NO: 1547303 - RNA, 19 nt, Artificial Sequence
  Description of Artificial Sequence: Synthetic oligonucleotide
  Antisense strand to SEQ ID NO: 1547302
ucuccgguaaacauauaac

SEQ ID NO: 1547304 - RNA, 19 nt, Artificial Sequence
  Description of Artificial Sequence: Synthetic oligonucleotide
  Sense strand starting at position 617 of SEQ ID NO: 1245238
auauguuuaccggagagua

SEQ ID NO: 1547305 - RNA, 19 nt, Artificial Sequence
  Description of Artificial Sequence: Synthetic oligonucleotide
  Antisense strand to SEQ ID NO: 1547304
uacucuccgguaaacauau

SEQ ID NO: 1547306 - RNA, 19 nt, Artificial Sequence
  Description of Artificial Sequence: Synthetic oligonucleotide
  Sense strand starting at position 619 of SEQ ID NO: 1245238
auguuuaccggagaguauu

SEQ ID NO: 1547307 - RNA, 19 nt, Artificial Sequence
  Description of Artificial Sequence: Synthetic oligonucleotide
  Antisense strand to SEQ ID NO: 1547306
aauacucuccgguaaacau

SEQ ID NO: 1547308 - RNA, 19 nt, Artificial Sequence
  Description of Artificial Sequence: Synthetic oligonucleotide
  Sense strand starting at position 722 of SEQ ID NO: 1245238
uaguaagauuaggucaaag

SEQ ID NO: 1547309 - RNA, 19 nt, Artificial Sequence
  Description of Artificial Sequence: Synthetic oligonucleotide
  Antisense strand to SEQ ID NO: 1547308
cuuugaccuaaucuuacua

SEQ ID NO: 1547310 - RNA, 19 nt, Artificial Sequence
  Description of Artificial Sequence: Synthetic oligonucleotide
  Sense strand starting at position 781 of SEQ ID NO: 1245238
uaacauggguagucuuuaa

SEQ ID NO: 1547311 - RNA, 19 nt, Artificial Sequence
  Description of Artificial Sequence: Synthetic oligonucleotide
  Antisense strand to SEQ ID NO: 1547310
uuaaagacuacccauguua

SEQ ID NO: 1547312 - RNA, 19 nt, Artificial Sequence
  Description of Artificial Sequence: Synthetic oligonucleotide
  Sense strand starting at position 785 of SEQ ID NO: 1245238
auggguagucuuuaacuua

SEQ ID NO: 1547313 - RNA, 19 nt, Artificial Sequence
  Description of Artificial Sequence: Synthetic oligonucleotide
  Antisense strand to SEQ ID NO: 1547312
uaaguuaaagacuacccau

SEQ ID NO: 1547314 - RNA, 19 nt, Artificial Sequence
  Description of Artificial Sequence: Synthetic oligonucleotide
  Sense strand starting at position 788 of SEQ ID NO: 1245238
gguagucuuuaacuuagag

SEQ ID NO: 1547315 - RNA, 19 nt, Artificial Sequence
  Description of Artificial Sequence: Synthetic oligonucleotide
  Antisense strand to SEQ ID NO: 1547314
cucuaaguuaaagacuacc

SEQ ID NO: 1547316 - RNA, 19 nt, Artificial Sequence
  Description of Artificial Sequence: Synthetic oligonucleotide
  Sense strand starting at position 847 of SEQ ID NO: 1245238
ggaauaacaguuuguaugu

SEQ ID NO: 1547317 - RNA, 19 nt, Artificial Sequence
  Description of Artificial Sequence: Synthetic oligonucleotide
  Antisense strand to SEQ ID NO: 1547316
acauacaaacuguuauucc

SEQ ID NO: 1547318 - RNA, 19 nt, Artificial Sequence
  Description of Artificial Sequence: Synthetic oligonucleotide
  Sense strand starting at position 848 of SEQ ID NO: 1245238
gaauaacaguuuguauguu

SEQ ID NO: 1547319 - RNA, 19 nt, Artificial Sequence
  Description of Artificial Sequence: Synthetic oligonucleotide
  Antisense strand to SEQ ID NO: 1547318
aacauacaaacuguuauuc

SEQ ID NO: 1547320 - RNA, 19 nt, Artificial Sequence
  Description of Artificial Sequence: Synthetic oligonucleotide
  Sense strand starting at position 871 of SEQ ID NO: 1245238
ggcugaagaaugcaguaaa

SEQ ID NO: 1547321 - RNA, 19 nt, Artificial Sequence
  Description of Artificial Sequence: Synthetic oligonucleotide
  Antisense strand to SEQ ID NO: 1547320
uuuacugcauucuucagcc

SEQ ID NO: 1547322 - RNA, 19 nt, Artificial Sequence
  Description of Artificial Sequence: Synthetic oligonucleotide
  Sense strand starting at position 1070 of SEQ ID NO: 1245238
uguguaucccaggagguga

SEQ ID NO: 1547323 - RNA, 19 nt, Artificial Sequence
  Description of Artificial Sequence: Synthetic oligonucleotide
  Antisense strand to SEQ ID NO: 1547322
ucaccuccugggauacaca

SEQ ID NO: 1547324 - RNA, 19 nt, Artificial Sequence
  Description of Artificial Sequence: Synthetic oligonucleotide
  Sense strand starting at position 1140 of SEQ ID NO: 1245238
uuagcuaugcucuaaauug

SEQ ID NO: 1547325 - RNA, 19 nt, Artificial Sequence
  Description of Artificial Sequence: Synthetic oligonucleotide
  Antisense strand to SEQ ID NO: 1547324
caauuuagagcauagcuaa

SEQ ID NO: 1547326 - RNA, 19 nt, Artificial Sequence
  Description of Artificial Sequence: Synthetic oligonucleotide
  Sense strand starting at position 1254 of SEQ ID NO: 1245238
uucugaacucugcaugaca

SEQ ID NO: 1547327 - RNA, 19 nt, Artificial Sequence
  Description of Artificial Sequence: Synthetic oligonucleotide
  Antisense strand to SEQ ID NO: 1547326
ugucaugcagaguucagaa

SEQ ID NO: 1547328 - RNA, 19 nt, Artificial Sequence
  Description of Artificial Sequence: Synthetic oligonucleotide
  Sense strand starting at position 1256 of SEQ ID NO: 1245238
cugaacucugcaugacaga

SEQ ID NO: 1547329 - RNA, 19 nt, Artificial Sequence
  Description of Artificial Sequence: Synthetic oligonucleotide
  Antisense strand to SEQ ID NO: 1547328
ucugucaugcagaguucag

SEQ ID NO: 1547330 - RNA, 19 nt, Artificial Sequence
  Description of Artificial Sequence: Synthetic oligonucleotide
  Sense strand starting at position 1313 of SEQ ID NO: 1245238
agugaugacaaaugcagua

SEQ ID NO: 1547331 - RNA, 19 nt, Artificial Sequence
  Description of Artificial Sequence: Synthetic oligonucleotide
  Antisense strand to SEQ ID NO: 1547330
uacugcauuugucaucacu

SEQ ID NO: 1547332 - RNA, 19 nt, Artificial Sequence
  Description of Artificial Sequence: Synthetic oligonucleotide
  Sense strand starting at position 1356 of SEQ ID NO: 1245238
gcaccagagcaauaucugu

SEQ ID NO: 1547333 - RNA, 19 nt, Artificial Sequence
  Description of Artificial Sequence: Synthetic oligonucleotide
  Antisense strand to SEQ ID NO: 1547332
acagauauugcucuggugc

SEQ ID NO: 1547334 - RNA, 19 nt, Artificial Sequence
  Description of Artificial Sequence: Synthetic oligonucleotide
  Sense strand starting at position 1361 of SEQ ID NO: 1245238
agagcaauaucuguguaau

SEQ ID NO: 1547335 - RNA, 19 nt, Artificial Sequence
  Description of Artificial Sequence: Synthetic oligonucleotide
  Antisense strand to SEQ ID NO: 1547334
auuacacagauauugcucu

SEQ ID NO: 1547336 - RNA, 19 nt, Artificial Sequence
  Description of Artificial Sequence: Synthetic oligonucleotide
  Sense strand starting at position 1587 of SEQ ID NO: 1245238
agagaaccuucuccugaug

SEQ ID NO: 1547337 - RNA, 19 nt, Artificial Sequence
  Description of Artificial Sequence: Synthetic oligonucleotide
  Antisense strand to SEQ ID NO: 1547336
caucaggagaagguucucu

SEQ ID NO: 1547338 - RNA, 19 nt, Artificial Sequence
  Description of Artificial Sequence: Synthetic oligonucleotide
  Sense strand starting at position 1612 of SEQ ID NO: 1245238
gcacuaaucgaguaauaaa

SEQ ID NO: 1547339 - RNA, 19 nt, Artificial Sequence
  Description of Artificial Sequence: Synthetic oligonucleotide
  Antisense strand to SEQ ID NO: 1547338
uuuauuacucgauuagugc

SEQ ID NO: 1547340 - RNA, 19 nt, Artificial Sequence
  Description of Artificial Sequence: Synthetic oligonucleotide
  Sense strand starting at position 1994 of SEQ ID NO: 1245238
acggaagugccucaucaga

SEQ ID NO: 1547341 - RNA, 19 nt, Artificial Sequence
  Description of Artificial Sequence: Synthetic oligonucleotide
  Antisense strand to SEQ ID NO: 1547340
ucugaugaggcacuuccgu

SEQ ID NO: 1547342 - RNA, 19 nt, Artificial Sequence
  Description of Artificial Sequence: Synthetic oligonucleotide
  Sense strand starting at position 2227 of SEQ ID NO: 1245238
uuuggaauaucaguggcau

SEQ ID NO: 1547343 - RNA, 19 nt, Artificial Sequence
  Description of Artificial Sequence: Synthetic oligonucleotide
  Antisense strand to SEQ ID NO: 1547342
augccacugauauuccaaa

SEQ ID NO: 1547344 - RNA, 19 nt, Artificial Sequence
  Description of Artificial Sequence: Synthetic oligonucleotide
  Sense strand starting at position 2228 of SEQ ID NO: 1245238
uuggaauaucaguggcauc

SEQ ID NO: 1547345 - RNA, 19 nt, Artificial Sequence
  Description of Artificial Sequence: Synthetic oligonucleotide
  Antisense strand to SEQ ID NO: 1547344
gaugccacugauauuccaa

SEQ ID NO: 1547346 - RNA, 19 nt, Artificial Sequence
  Description of Artificial Sequence: Synthetic oligonucleotide
  Sense strand starting at position 2229 of SEQ ID NO: 1245238
uggaauaucaguggcaucu

SEQ ID NO: 1547347 - RNA, 19 nt, Artificial Sequence
  Description of Artificial Sequence: Synthetic oligonucleotide
  Antisense strand to SEQ ID NO: 1547346
agaugccacugauauucca

SEQ ID NO: 1547348 - RNA, 19 nt, Artificial Sequence
  Description of Artificial Sequence: Synthetic oligonucleotide
  Sense strand starting at position 2353 of SEQ ID NO: 1245238
agggcaugagccuguauuu

SEQ ID NO: 1547349 - RNA, 19 nt, Artificial Sequence
  Description of Artificial Sequence: Synthetic oligonucleotide
  Antisense strand to SEQ ID NO: 1547348
aaauacaggcucaugcccu

SEQ ID NO: 1547350 - RNA, 19 nt, Artificial Sequence
  Description of Artificial Sequence: Synthetic oligonucleotide
  Sense strand starting at position 2637 of SEQ ID NO: 1245238
gugcauacccaauagcaaa

SEQ ID NO: 1547351 - RNA, 19 nt, Artificial Sequence
  Description of Artificial Sequence: Synthetic oligonucleotide
  Antisense strand to SEQ ID NO: 1547350
uuugcuauuggguaugcac

SEQ ID NO: 1547352 - RNA, 19 nt, Artificial Sequence
  Description of Artificial Sequence: Synthetic oligonucleotide
  Sense strand starting at position 2967 of SEQ ID NO: 1245238
uucuuacaaugggaauuua

SEQ ID NO: 1547353 - RNA, 19 nt, Artificial Sequence
  Description of Artificial Sequence: Synthetic oligonucleotide
  Antisense strand to SEQ ID NO: 1547352
uaaauucccauuguaagaa

SEQ ID NO: 1547354 - RNA, 19 nt, Artificial Sequence
  Description of Artificial Sequence: Synthetic oligonucleotide
  Sense strand starting at position 3001 of SEQ ID NO: 1245238
agcacucuucgauaagaua

SEQ ID NO: 1547355 - RNA, 19 nt, Artificial Sequence
  Description of Artificial Sequence: Synthetic oligonucleotide
  Antisense strand to SEQ ID NO: 1547354
uaucuuaucgaagagugcu

SEQ ID NO: 1547356 - RNA, 19 nt, Artificial Sequence
  Description of Artificial Sequence: Synthetic oligonucleotide
  Sense strand starting at position 3261 of SEQ ID NO: 1245238
guucuuucccaccagaucu

SEQ ID NO: 1547357 - RNA, 19 nt, Artificial Sequence
  Description of Artificial Sequence: Synthetic oligonucleotide
  Antisense strand to SEQ ID NO: 1547356
agaucuggugggaaagaac

SEQ ID NO: 1547358 - RNA, 19 nt, Artificial Sequence
  Description of Artificial Sequence: Synthetic oligonucleotide
  Sense strand starting at position 3375 of SEQ ID NO: 1245238
ugcggugacacagaaugaa

SEQ ID NO: 1547359 - RNA, 19 nt, Artificial Sequence
  Description of Artificial Sequence: Synthetic oligonucleotide
  Antisense strand to SEQ ID NO: 1547358
uucauucugugucaccgca

SEQ ID NO: 1547360 - RNA, 19 nt, Artificial Sequence
  Description of Artificial Sequence: Synthetic oligonucleotide
  Sense strand starting at position 3709 of SEQ ID NO: 1245238
cccaucucuggugaauaua

SEQ ID NO: 1547361 - RNA, 19 nt, Artificial Sequence
  Description of Artificial Sequence: Synthetic oligonucleotide
  Antisense strand to SEQ ID NO: 1547360
uauauucaccagagauggg

SEQ ID NO: 1547362 - RNA, 19 nt, Artificial Sequence
  Description of Artificial Sequence: Synthetic oligonucleotide
  Sense strand starting at position 3720 of SEQ ID NO: 1245238
ugaauauaucuagguccag

SEQ ID NO: 1547363 - RNA, 19 nt, Artificial Sequence
  Description of Artificial Sequence: Synthetic oligonucleotide
  Antisense strand to SEQ ID NO: 1547362
cuggaccuagauauauuca

SEQ ID NO: 1547364 - RNA, 19 nt, Artificial Sequence
  Description of Artificial Sequence: Synthetic oligonucleotide
  Sense strand starting at position 90 of SEQ ID NO: 1245239
ccaugacuguuccugacau

SEQ ID NO: 1547365 - RNA, 19 nt, Artificial Sequence
  Description of Artificial Sequence: Synthetic oligonucleotide
  Antisense strand to SEQ ID NO: 1547364
augucaggaacagucaugg

SEQ ID NO: 1547366 - RNA, 19 nt, Artificial Sequence
  Description of Artificial Sequence: Synthetic oligonucleotide
  Sense strand starting at position 92 of SEQ ID NO: 1245239
augacuguuccugacauac

SEQ ID NO: 1547367 - RNA, 19 nt, Artificial Sequence
  Description of Artificial Sequence: Synthetic oligonucleotide
  Antisense strand to SEQ ID NO: 1547366
guaugucaggaacagucau

SEQ ID NO: 1547368 - RNA, 19 nt, Artificial Sequence
  Description of Artificial Sequence: Synthetic oligonucleotide
  Sense strand starting at position 196 of SEQ ID NO: 1245239
uguggauugugggcauuaa

SEQ ID NO: 1547369 - RNA, 19 nt, Artificial Sequence
  Description of Artificial Sequence: Synthetic oligonucleotide
  Antisense strand to SEQ ID NO: 1547368
uuaaugcccacaauccaca

SEQ ID NO: 1547370 - RNA, 19 nt, Artificial Sequence
  Description of Artificial Sequence: Synthetic oligonucleotide
  Sense strand starting at position 197 of SEQ ID NO: 1245239
guggauugugggcauuaag

SEQ ID NO: 1547371 - RNA, 19 nt, Artificial Sequence
  Description of Artificial Sequence: Synthetic oligonucleotide
  Antisense strand to SEQ ID NO: 1547370
cuuaaugcccacaauccac

SEQ ID NO: 1547372 - RNA, 19 nt, Artificial Sequence
  Description of Artificial Sequence: Synthetic oligonucleotide
  Sense strand starting at position 207 of SEQ ID NO: 1245239
ggcauuaagcaccauuauu

SEQ ID NO: 1547373 - RNA, 19 nt, Artificial Sequence
  Description of Artificial Sequence: Synthetic oligonucleotide
  Antisense strand to SEQ ID NO: 1547372
aauaauggugcuuaaugcc

SEQ ID NO: 1547374 - RNA, 19 nt, Artificial Sequence
  Description of Artificial Sequence: Synthetic oligonucleotide
  Sense strand starting at position 223 of SEQ ID NO: 1245239
auuggaauguugccuacaa

SEQ ID NO: 1547375 - RNA, 19 nt, Artificial Sequence
  Description of Artificial Sequence: Synthetic oligonucleotide
  Antisense strand to SEQ ID NO: 1547374
uuguaggcaacauuccaau

SEQ ID NO: 1547376 - RNA, 19 nt, Artificial Sequence
  Description of Artificial Sequence: Synthetic oligonucleotide
  Sense strand starting at position 224 of SEQ ID NO: 1245239
uuggaauguugccuacaaa

SEQ ID NO: 1547377 - RNA, 19 nt, Artificial Sequence
  Description of Artificial Sequence: Synthetic oligonucleotide
  Antisense strand to SEQ ID NO: 1547376
uuuguaggcaacauuccaa

SEQ ID NO: 1547378 - RNA, 19 nt, Artificial Sequence
  Description of Artificial Sequence: Synthetic oligonucleotide
  Sense strand starting at position 276 of SEQ ID NO: 1245239
agcacuuucuaagcuguga

SEQ ID NO: 1547379 - RNA, 19 nt, Artificial Sequence
  Description of Artificial Sequence: Synthetic oligonucleotide
  Antisense strand to SEQ ID NO: 1547378
ucacagcuuagaaagugcu

SEQ ID NO: 1547380 - RNA, 19 nt, Artificial Sequence
  Description of Artificial Sequence: Synthetic oligonucleotide
  Sense strand starting at position 280 of SEQ ID NO: 1245239
cuuucuaagcugugaaauu

SEQ ID NO: 1547381 - RNA, 19 nt, Artificial Sequence
  Description of Artificial Sequence: Synthetic oligonucleotide
  Antisense strand to SEQ ID NO: 1547380
aauuucacagcuuagaaag

SEQ ID NO: 1547382 - RNA, 19 nt, Artificial Sequence
  Description of Artificial Sequence: Synthetic oligonucleotide
  Sense strand starting at position 374 of SEQ ID NO: 1245239
uuccgaaagcauuauauug

SEQ ID NO: 1547383 - RNA, 19 nt, Artificial Sequence
  Description of Artificial Sequence: Synthetic oligonucleotide
  Antisense strand to SEQ ID NO: 1547382
caauauaaugcuuucggaa

SEQ ID NO: 1547384 - RNA, 19 nt, Artificial Sequence
  Description of Artificial Sequence: Synthetic oligonucleotide
  Sense strand starting at position 382 of SEQ ID NO: 1245239
gcauuauauugggucaggu

SEQ ID NO: 1547385 - RNA, 19 nt, Artificial Sequence
  Description of Artificial Sequence: Synthetic oligonucleotide
  Antisense strand to SEQ ID NO: 1547384
accugacccaauauaaugc

SEQ ID NO: 1547386 - RNA, 19 nt, Artificial Sequence
  Description of Artificial Sequence: Synthetic oligonucleotide
  Sense strand starting at position 384 of SEQ ID NO: 1245239
auuauauugggucagguuu

SEQ ID NO: 1547387 - RNA, 19 nt, Artificial Sequence
  Description of Artificial Sequence: Synthetic oligonucleotide
  Antisense strand to SEQ ID NO: 1547386
aaaccugacccaauauaau

SEQ ID NO: 1547388 - RNA, 19 nt, Artificial Sequence
  Description of Artificial Sequence: Synthetic oligonucleotide
  Sense strand starting at position 395 of SEQ ID NO: 1245239
ucagguuuccagugucaaa

SEQ ID NO: 1547389 - RNA, 19 nt, Artificial Sequence
  Description of Artificial Sequence: Synthetic oligonucleotide
  Antisense strand to SEQ ID NO: 1547388
uuugacacuggaaaccuga

SEQ ID NO: 1547390 - RNA, 19 nt, Artificial Sequence
  Description of Artificial Sequence: Synthetic oligonucleotide
  Sense strand starting at position 412 of SEQ ID NO: 1245239
aagagacugugaucuguaa

SEQ ID NO: 1547391 - RNA, 19 nt, Artificial Sequence
  Description of Artificial Sequence: Synthetic oligonucleotide
  Antisense strand to SEQ ID NO: 1547390
uuacagaucacagucucuu

SEQ ID NO: 1547392 - RNA, 19 nt, Artificial Sequence
  Description of Artificial Sequence: Synthetic oligonucleotide
  Sense strand starting at position 416 of SEQ ID NO: 1245239
gacugugaucuguaacuua

SEQ ID NO: 1547393 - RNA, 19 nt, Artificial Sequence
  Description of Artificial Sequence: Synthetic oligonucleotide
  Antisense strand to SEQ ID NO: 1547392
uaaguuacagaucacaguc

SEQ ID NO: 1547394 - RNA, 19 nt, Artificial Sequence
  Description of Artificial Sequence: Synthetic oligonucleotide
  Sense strand starting at position 419 of SEQ ID NO: 1245239
ugugaucuguaacuuaaca

SEQ ID NO: 1547395 - RNA, 19 nt, Artificial Sequence
  Description of Artificial Sequence: Synthetic oligonucleotide
  Antisense strand to SEQ ID NO: 1547394
uguuaaguuacagaucaca

SEQ ID NO: 1547396 - RNA, 19 nt, Artificial Sequence
  Description of Artificial Sequence: Synthetic oligonucleotide
  Sense strand starting at position 438 of SEQ ID NO: 1245239
guaaaucugcaaugccauu

SEQ ID NO: 1547397 - RNA, 19 nt, Artificial Sequence
  Description of Artificial Sequence: Synthetic oligonucleotide
  Antisense strand to SEQ ID NO: 1547396
aauggcauugcagauuuac

SEQ ID NO: 1547398 - RNA, 19 nt, Artificial Sequence
  Description of Artificial Sequence: Synthetic oligonucleotide
  Sense strand starting at position 477 of SEQ ID NO: 1245239
uuccguauucuugaucuaa

SEQ ID NO: 1547399 - RNA, 19 nt, Artificial Sequence
  Description of Artificial Sequence: Synthetic oligonucleotide
  Antisense strand to SEQ ID NO: 1547398
uuagaucaagaauacggaa

SEQ ID NO: 1547400 - RNA, 19 nt, Artificial Sequence
  Description of Artificial Sequence: Synthetic oligonucleotide
  Sense strand starting at position 479 of SEQ ID NO: 1245239
ccguauucuugaucuaauc

SEQ ID NO: 1547401 - RNA, 19 nt, Artificial Sequence
  Description of Artificial Sequence: Synthetic oligonucleotide
  Antisense strand to SEQ ID NO: 1547400
gauuagaucaagaauacgg

SEQ ID NO: 1547402 - RNA, 19 nt, Artificial Sequence
  Description of Artificial Sequence: Synthetic oligonucleotide
  Sense strand starting at position 584 of SEQ ID NO: 1245239
uuugucauccaacgacaua

SEQ ID NO: 1547403 - RNA, 19 nt, Artificial Sequence
  Description of Artificial Sequence: Synthetic oligonucleotide
  Antisense strand to SEQ ID NO: 1547402
uaugucguuggaugacaaa

SEQ ID NO: 1547404 - RNA, 19 nt, Artificial Sequence
  Description of Artificial Sequence: Synthetic oligonucleotide
  Sense strand starting at position 724 of SEQ ID NO: 1245239
aaacguaucuaggucuuga

SEQ ID NO: 1547405 - RNA, 19 nt, Artificial Sequence
  Description of Artificial Sequence: Synthetic oligonucleotide
  Antisense strand to SEQ ID NO: 1547404
ucaagaccuagauacguuu

SEQ ID NO: 1547406 - RNA, 19 nt, Artificial Sequence
  Description of Artificial Sequence: Synthetic oligonucleotide
  Sense strand starting at position 767 of SEQ ID NO: 1245239
uuguguguuacuuuaugcu

SEQ ID NO: 1547407 - RNA, 19 nt, Artificial Sequence
  Description of Artificial Sequence: Synthetic oligonucleotide
  Antisense strand to SEQ ID NO: 1547406
agcauaaaguaacacacaa

SEQ ID NO: 1547408 - RNA, 19 nt, Artificial Sequence
  Description of Artificial Sequence: Synthetic oligonucleotide
  Sense strand starting at position 873 of SEQ ID NO: 1245239
ugucaugauucugcucaca

SEQ ID NO: 1547409 - RNA, 19 nt, Artificial Sequence
  Description of Artificial Sequence: Synthetic oligonucleotide
  Antisense strand to SEQ ID NO: 1547408
ugugagcagaaucaugaca

SEQ ID NO: 1547410 - RNA, 19 nt, Artificial Sequence
  Description of Artificial Sequence: Synthetic oligonucleotide
  Sense strand starting at position 919 of SEQ ID NO: 1245239
ucagcaucaggauguguau

SEQ ID NO: 1547411 - RNA, 19 nt, Artificial Sequence
  Description of Artificial Sequence: Synthetic oligonucleotide
  Antisense strand to SEQ ID NO: 1547410
auacacauccugaugcuga

SEQ ID NO: 1547412 - RNA, 19 nt, Artificial Sequence
  Description of Artificial Sequence: Synthetic oligonucleotide
  Sense strand starting at position 928 of SEQ ID NO: 1245239
ggauguguauuuguuuacu

SEQ ID NO: 1547413 - RNA, 19 nt, Artificial Sequence
  Description of Artificial Sequence: Synthetic oligonucleotide
  Antisense strand to SEQ ID NO: 1547412
aguaaacaaauacacaucc

SEQ ID NO: 1547414 - RNA, 19 nt, Artificial Sequence
  Description of Artificial Sequence: Synthetic oligonucleotide
  Sense strand starting at position 984 of SEQ ID NO: 1245239
acguacuguguuuaacuca

SEQ ID NO: 1547415 - RNA, 19 nt, Artificial Sequence
  Description of Artificial Sequence: Synthetic oligonucleotide
  Antisense strand to SEQ ID NO: 1547414
ugaguuaaacacaguacgu

SEQ ID NO: 1547416 - RNA, 19 nt, Artificial Sequence
  Description of Artificial Sequence: Synthetic oligonucleotide
  Sense strand starting at position 992 of SEQ ID NO: 1245239
uguuuaacucagcagcaaa

SEQ ID NO: 1547417 - RNA, 19 nt, Artificial Sequence
  Description of Artificial Sequence: Synthetic oligonucleotide
  Antisense strand to SEQ ID NO: 1547416
uuugcugcugaguuaaaca

SEQ ID NO: 1547418 - RNA, 19 nt, Artificial Sequence
  Description of Artificial Sequence: Synthetic oligonucleotide
  Sense strand starting at position 1247 of SEQ ID NO: 1245239
ucaggugugccuucugcua

SEQ ID NO: 1547419 - RNA, 19 nt, Artificial Sequence
  Description of Artificial Sequence: Synthetic oligonucleotide
  Antisense strand to SEQ ID NO: 1547418
uagcagaaggcacaccuga

SEQ ID NO: 1547420 - RNA, 19 nt, Artificial Sequence
  Description of Artificial Sequence: Synthetic oligonucleotide
  Sense strand starting at position 1677 of SEQ ID NO: 1245239
gaggguacucacugugaag

SEQ ID NO: 1547421 - RNA, 19 nt, Artificial Sequence
  Description of Artificial Sequence: Synthetic oligonucleotide
  Antisense strand to SEQ ID NO: 1547420
cuucacagugaguacccuc

SEQ ID NO: 1547422 - RNA, 19 nt, Artificial Sequence
  Description of Artificial Sequence: Synthetic oligonucleotide
  Sense strand starting at position 1679 of SEQ ID NO: 1245239
ggguacucacugugaagca

SEQ ID NO: 1547423 - RNA, 19 nt, Artificial Sequence
  Description of Artificial Sequence: Synthetic oligonucleotide
  Antisense strand to SEQ ID NO: 1547422
ugcuucacagugaguaccc

SEQ ID NO: 1547424 - RNA, 19 nt, Artificial Sequence
  Description of Artificial Sequence: Synthetic oligonucleotide
  Sense strand starting at position 1797 of SEQ ID NO: 1245239
agggucgagagguguuaaa

SEQ ID NO: 1547425 - RNA, 19 nt, Artificial Sequence
  Description of Artificial Sequence: Synthetic oligonucleotide
  Antisense strand to SEQ ID NO: 1547424
uuuaacaccucucgacccu

SEQ ID NO: 1547426 - RNA, 19 nt, Artificial Sequence
  Description of Artificial Sequence: Synthetic oligonucleotide
  Sense strand starting at position 1804 of SEQ ID NO: 1245239
agagguguuaaagacgcaa

SEQ ID NO: 1547427 - RNA, 19 nt, Artificial Sequence
  Description of Artificial Sequence: Synthetic oligonucleotide
  Antisense strand to SEQ ID NO: 1547426
uugcgucuuuaacaccucu

SEQ ID NO: 1547428 - RNA, 19 nt, Artificial Sequence
  Description of Artificial Sequence: Synthetic oligonucleotide
  Sense strand starting at position 1891 of SEQ ID NO: 1245239
cagccagauccggaugagu

SEQ ID NO: 1547429 - RNA, 19 nt, Artificial Sequence
  Description of Artificial Sequence: Synthetic oligonucleotide
  Antisense strand to SEQ ID NO: 1547428
acucauccggaucuggcug

SEQ ID NO: 1547430 - RNA, 19 nt, Artificial Sequence
  Description of Artificial Sequence: Synthetic oligonucleotide
  Sense strand starting at position 2329 of SEQ ID NO: 1245239
ggaucuuccgcugaggcau

SEQ ID NO: 1547431 - RNA, 19 nt, Artificial Sequence
  Description of Artificial Sequence: Synthetic oligonucleotide
  Antisense strand to SEQ ID NO: 1547430
augccucagcggaagaucc

SEQ ID NO: 1547432 - RNA, 19 nt, Artificial Sequence
  Description of Artificial Sequence: Synthetic oligonucleotide
  Sense strand starting at position 2401 of SEQ ID NO: 1245239
ugcuaucuugcggaaagag

SEQ ID NO: 1547433 - RNA, 19 nt, Artificial Sequence
  Description of Artificial Sequence: Synthetic oligonucleotide
  Antisense strand to SEQ ID NO: 1547432
cucuuuccgcaagauagca

SEQ ID NO: 1547434 - RNA, 19 nt, Artificial Sequence
  Description of Artificial Sequence: Synthetic oligonucleotide
  Sense strand starting at position 2925 of SEQ ID NO: 1245239
uuuccauccgcguaaagga

SEQ ID NO: 1547435 - RNA, 19 nt, Artificial Sequence
  Description of Artificial Sequence: Synthetic oligonucleotide
  Antisense strand to SEQ ID NO: 1547434
uccuuuacgcggauggaaa

SEQ ID NO: 1547436 - RNA, 19 nt, Artificial Sequence
  Description of Artificial Sequence: Synthetic oligonucleotide
  Sense strand starting at position 2977 of SEQ ID NO: 1245239
gcagguuucgccgcggacu

SEQ ID NO: 1547437 - RNA, 19 nt, Artificial Sequence
  Description of Artificial Sequence: Synthetic oligonucleotide
  Antisense strand to SEQ ID NO: 1547436
aguccgcggcgaaaccugc

SEQ ID NO: 1547438 - RNA, 19 nt, Artificial Sequence
  Description of Artificial Sequence: Synthetic oligonucleotide
  Sense strand starting at position 3051 of SEQ ID NO: 1245239
aaaguuucgcgguugagca

SEQ ID NO: 1547439 - RNA, 19 nt, Artificial Sequence
  Description of Artificial Sequence: Synthetic oligonucleotide
  Antisense strand to SEQ ID NO: 1547438
ugcucaaccgcgaaacuuu

SEQ ID NO: 1547440 - RNA, 19 nt, Artificial Sequence
  Description of Artificial Sequence: Synthetic oligonucleotide
  Sense strand starting at position 3225 of SEQ ID NO: 1245239
cguuaaagucugggagaca

SEQ ID NO: 1547441 - RNA, 19 nt, Artificial Sequence
  Description of Artificial Sequence: Synthetic oligonucleotide
  Antisense strand to SEQ ID NO: 1547440
ugucucccagacuuuaacg

SEQ ID NO: 1547442 - RNA, 19 nt, Artificial Sequence
  Description of Artificial Sequence: Synthetic oligonucleotide
  Sense strand starting at position 3958 of SEQ ID NO: 1245239
agugcugguuccucgauuu

SEQ ID NO: 1547443 - RNA, 19 nt, Artificial Sequence
  Description of Artificial Sequence: Synthetic oligonucleotide
  Antisense strand to SEQ ID NO: 1547442
aaaucgaggaaccagcacu

SEQ ID NO: 1547444 - RNA, 19 nt, Artificial Sequence
  Description of Artificial Sequence: Synthetic oligonucleotide
  Sense strand starting at position 153 of SEQ ID NO: 1245240
gguacuaacaguuggaaua

SEQ ID NO: 1547445 - RNA, 19 nt, Artificial Sequence
  Description of Artificial Sequence: Synthetic oligonucleotide
  Antisense strand to SEQ ID NO: 1547444
uauuccaacuguuaguacc

SEQ ID NO: 1547446 - RNA, 19 nt, Artificial Sequence
  Description of Artificial Sequence: Synthetic oligonucleotide
  Sense strand starting at position 337 of SEQ ID NO: 1245240
ucgugaagugccgucucua

SEQ ID NO: 1547447 - RNA, 19 nt, Artificial Sequence
  Description of Artificial Sequence: Synthetic oligonucleotide
  Antisense strand to SEQ ID NO: 1547446
uagagacggcacuucacga

SEQ ID NO: 1547448 - RNA, 19 nt, Artificial Sequence
  Description of Artificial Sequence: Synthetic oligonucleotide
  Sense strand starting at position 338 of SEQ ID NO: 1245240
cgugaagugccgucucuac

SEQ ID NO: 1547449 - RNA, 19 nt, Artificial Sequence
  Description of Artificial Sequence: Synthetic oligonucleotide
  Antisense strand to SEQ ID NO: 1547448
guagagacggcacuucacg

SEQ ID NO: 1547450 - RNA, 19 nt, Artificial Sequence
  Description of Artificial Sequence: Synthetic oligonucleotide
  Sense strand starting at position 478 of SEQ ID NO: 1245240
uguuuacaagguuagugua

SEQ ID NO: 1547451 - RNA, 19 nt, Artificial Sequence
  Description of Artificial Sequence: Synthetic oligonucleotide
  Antisense strand to SEQ ID NO: 1547450
uacacuaaccuuguaaaca

SEQ ID NO: 1547452 - RNA, 19 nt, Artificial Sequence
  Description of Artificial Sequence: Synthetic oligonucleotide
  Sense strand starting at position 480 of SEQ ID NO: 1245240
uuuacaagguuaguguaaa

SEQ ID NO: 1547453 - RNA, 19 nt, Artificial Sequence
  Description of Artificial Sequence: Synthetic oligonucleotide
  Antisense strand to SEQ ID NO: 1547452
uuuacacuaaccuuguaaa

SEQ ID NO: 1547454 - RNA, 19 nt, Artificial Sequence
  Description of Artificial Sequence: Synthetic oligonucleotide
  Sense strand starting at position 513 of SEQ ID NO: 1245240
agagaagucucuuuccaac

SEQ ID NO: 1547455 - RNA, 19 nt, Artificial Sequence
  Description of Artificial Sequence: Synthetic oligonucleotide
  Antisense strand to SEQ ID NO: 1547454
guuggaaagagacuucucu

SEQ ID NO: 1547456 - RNA, 19 nt, Artificial Sequence
  Description of Artificial Sequence: Synthetic oligonucleotide
  Sense strand starting at position 647 of SEQ ID NO: 1245240
ucagauugguguuuagaaa

SEQ ID NO: 1547457 - RNA, 19 nt, Artificial Sequence
  Description of Artificial Sequence: Synthetic oligonucleotide
  Antisense strand to SEQ ID NO: 1547456
uuucuaaacaccaaucuga

SEQ ID NO: 1547458 - RNA, 19 nt, Artificial Sequence
  Description of Artificial Sequence: Synthetic oligonucleotide
  Sense strand starting at position 746 of SEQ ID NO: 1245240
cuacuaauuguugagcuaa

SEQ ID NO: 1547459 - RNA, 19 nt, Artificial Sequence
  Description of Artificial Sequence: Synthetic oligonucleotide
  Antisense strand to SEQ ID NO: 1547458
uuagcucaacaauuaguag

SEQ ID NO: 1547460 - RNA, 19 nt, Artificial Sequence
  Description of Artificial Sequence: Synthetic oligonucleotide
  Sense strand starting at position 816 of SEQ ID NO: 1245240
uccauucuacugcaugaga

SEQ ID NO: 1547461 - RNA, 19 nt, Artificial Sequence
  Description of Artificial Sequence: Synthetic oligonucleotide
  Antisense strand to SEQ ID NO: 1547460
ucucaugcaguagaaugga

SEQ ID NO: 1547462 - RNA, 19 nt, Artificial Sequence
  Description of Artificial Sequence: Synthetic oligonucleotide
  Sense strand starting at position 819 of SEQ ID NO: 1245240
auucuacugcaugagaacu

SEQ ID NO: 1547463 - RNA, 19 nt, Artificial Sequence
  Description of Artificial Sequence: Synthetic oligonucleotide
  Antisense strand to SEQ ID NO: 1547462
aguucucaugcaguagaau

SEQ ID NO: 1547464 - RNA, 19 nt, Artificial Sequence
  Description of Artificial Sequence: Synthetic oligonucleotide
  Sense strand starting at position 995 of SEQ ID NO: 1245240
gcaugaucuccagaucaau

SEQ ID NO: 1547465 - RNA, 19 nt, Artificial Sequence
  Description of Artificial Sequence: Synthetic oligonucleotide
  Antisense strand to SEQ ID NO: 1547464
auugaucuggagaucaugc

SEQ ID NO: 1547466 - RNA, 19 nt, Artificial Sequence
  Description of Artificial Sequence: Synthetic oligonucleotide
  Sense strand starting at position 1103 of SEQ ID NO: 1245240
ccuuaccuucuaugaugua

SEQ ID NO: 1547467 - RNA, 19 nt, Artificial Sequence
  Description of Artificial Sequence: Synthetic oligonucleotide
  Antisense strand to SEQ ID NO: 1547466
uacaucauagaagguaagg

SEQ ID NO: 1547468 - RNA, 19 nt, Artificial Sequence
  Description of Artificial Sequence: Synthetic oligonucleotide
  Sense strand starting at position 1140 of SEQ ID NO: 1245240
gggauacuugcugggauag

SEQ ID NO: 1547469 - RNA, 19 nt, Artificial Sequence
  Description of Artificial Sequence: Synthetic oligonucleotide
  Antisense strand to SEQ ID NO: 1547468
cuaucccagcaaguauccc

SEQ ID NO: 1547470 - RNA, 19 nt, Artificial Sequence
  Description of Artificial Sequence: Synthetic oligonucleotide
  Sense strand starting at position 1141 of SEQ ID NO: 1245240
ggauacuugcugggauagu

SEQ ID NO: 1547471 - RNA, 19 nt, Artificial Sequence
  Description of Artificial Sequence: Synthetic oligonucleotide
  Antisense strand to SEQ ID NO: 1547470
acuaucccagcaaguaucc

SEQ ID NO: 1547472 - RNA, 19 nt, Artificial Sequence
  Description of Artificial Sequence: Synthetic oligonucleotide
  Sense strand starting at position 1453 of SEQ ID NO: 1245240
gaggucuuccacuagcauu

SEQ ID NO: 1547473 - RNA, 19 nt, Artificial Sequence
  Description of Artificial Sequence: Synthetic oligonucleotide
  Antisense strand to SEQ ID NO: 1547472
aaugcuaguggaagaccuc

SEQ ID NO: 1547474 - RNA, 19 nt, Artificial Sequence
  Description of Artificial Sequence: Synthetic oligonucleotide
  Sense strand starting at position 1744 of SEQ ID NO: 1245240
gcaaguuaagaauggauga

SEQ ID NO: 1547475 - RNA, 19 nt, Artificial Sequence
  Description of Artificial Sequence: Synthetic oligonucleotide
  Antisense strand to SEQ ID NO: 1547474
ucauccauucuuaacuugc

SEQ ID NO: 1547476 - RNA, 19 nt, Artificial Sequence
  Description of Artificial Sequence: Synthetic oligonucleotide
  Sense strand starting at position 1850 of SEQ ID NO: 1245240
ggagucacacuguaucuaa

SEQ ID NO: 1547477 - RNA, 19 nt, Artificial Sequence
  Description of Artificial Sequence: Synthetic oligonucleotide
  Antisense strand to SEQ ID NO: 1547476
uuagauacagugugacucc

SEQ ID NO: 1547478 - RNA, 19 nt, Artificial Sequence
  Description of Artificial Sequence: Synthetic oligonucleotide
  Sense strand starting at position 1853 of SEQ ID NO: 1245240
gucacacuguaucuaaacu

SEQ ID NO: 1547479 - RNA, 19 nt, Artificial Sequence
  Description of Artificial Sequence: Synthetic oligonucleotide
  Antisense strand to SEQ ID NO: 1547478
aguuuagauacagugugac

SEQ ID NO: 1547480 - RNA, 19 nt, Artificial Sequence
  Description of Artificial Sequence: Synthetic oligonucleotide
  Sense strand starting at position 1966 of SEQ ID NO: 1245240
ccaugacuguuccugacau

SEQ ID NO: 1547481 - RNA, 19 nt, Artificial Sequence
  Description of Artificial Sequence: Synthetic oligonucleotide
  Antisense strand to SEQ ID NO: 1547480
augucaggaacagucaugg

SEQ ID NO: 1547482 - RNA, 19 nt, Artificial Sequence
  Description of Artificial Sequence: Synthetic oligonucleotide
  Sense strand starting at position 1968 of SEQ ID NO: 1245240
augacuguuccugacauac

SEQ ID NO: 1547483 - RNA, 19 nt, Artificial Sequence
  Description of Artificial Sequence: Synthetic oligonucleotide
  Antisense strand to SEQ ID NO: 1547482
guaugucaggaacagucau

SEQ ID NO: 1547484 - RNA, 19 nt, Artificial Sequence
  Description of Artificial Sequence: Synthetic oligonucleotide
  Sense strand starting at position 2073 of SEQ ID NO: 1245240
guggauugugggcauuaag

SEQ ID NO: 1547485 - RNA, 19 nt, Artificial Sequence
  Description of Artificial Sequence: Synthetic oligonucleotide
  Antisense strand to SEQ ID NO: 1547484
cuuaaugcccacaauccac

SEQ ID NO: 1547486 - RNA, 19 nt, Artificial Sequence
  Description of Artificial Sequence: Synthetic oligonucleotide
  Sense strand starting at position 2083 of SEQ ID NO: 1245240
ggcauuaagcaccauuauu

SEQ ID NO: 1547487 - RNA, 19 nt, Artificial Sequence
  Description of Artificial Sequence: Synthetic oligonucleotide
  Antisense strand to SEQ ID NO: 1547486
aauaauggugcuuaaugcc

SEQ ID NO: 1547488 - RNA, 19 nt, Artificial Sequence
  Description of Artificial Sequence: Synthetic oligonucleotide
  Sense strand starting at position 2099 of SEQ ID NO: 1245240
auuggaauguugccuacaa

SEQ ID NO: 1547489 - RNA, 19 nt, Artificial Sequence
  Description of Artificial Sequence: Synthetic oligonucleotide
  Antisense strand to SEQ ID NO: 1547488
uuguaggcaacauuccaau

SEQ ID NO: 1547490 - RNA, 19 nt, Artificial Sequence
  Description of Artificial Sequence: Synthetic oligonucleotide
  Sense strand starting at position 2100 of SEQ ID NO: 1245240
uuggaauguugccuacaaa

SEQ ID NO: 1547491 - RNA, 19 nt, Artificial Sequence
  Description of Artificial Sequence: Synthetic oligonucleotide
  Antisense strand to SEQ ID NO: 1547490
uuuguaggcaacauuccaa

SEQ ID NO: 1547492 - RNA, 19 nt, Artificial Sequence
  Description of Artificial Sequence: Synthetic oligonucleotide
  Sense strand starting at position 2250 of SEQ ID NO: 1245240
uuccgaaagcauuauauug

SEQ ID NO: 1547493 - RNA, 19 nt, Artificial Sequence
  Description of Artificial Sequence: Synthetic oligonucleotide
  Antisense strand to SEQ ID NO: 1547492
caauauaaugcuuucggaa

SEQ ID NO: 1547494 - RNA, 19 nt, Artificial Sequence
  Description of Artificial Sequence: Synthetic oligonucleotide
  Sense strand starting at position 2260 of SEQ ID NO: 1245240
auuauauugggucagguuu

SEQ ID NO: 1547495 - RNA, 19 nt, Artificial Sequence
  Description of Artificial Sequence: Synthetic oligonucleotide
  Antisense strand to SEQ ID NO: 1547494
aaaccugacccaauauaau

SEQ ID NO: 1547496 - RNA, 19 nt, Artificial Sequence
  Description of Artificial Sequence: Synthetic oligonucleotide
  Sense strand starting at position 2288 of SEQ ID NO: 1245240
aagagacugugaucuguaa

SEQ ID NO: 1547497 - RNA, 19 nt, Artificial Sequence
  Description of Artificial Sequence: Synthetic oligonucleotide
  Antisense strand to SEQ ID NO: 1547496
uuacagaucacagucucuu

SEQ ID NO: 1547498 - RNA, 19 nt, Artificial Sequence
  Description of Artificial Sequence: Synthetic oligonucleotide
  Sense strand starting at position 2292 of SEQ ID NO: 1245240
gacugugaucuguaacuua

SEQ ID NO: 1547499 - RNA, 19 nt, Artificial Sequence
  Description of Artificial Sequence: Synthetic oligonucleotide
  Antisense strand to SEQ ID NO: 1547498
uaaguuacagaucacaguc

SEQ ID NO: 1547500 - RNA, 19 nt, Artificial Sequence
  Description of Artificial Sequence: Synthetic oligonucleotide
  Sense strand starting at position 2295 of SEQ ID NO: 1245240
ugugaucuguaacuuaaca

SEQ ID NO: 1547501 - RNA, 19 nt, Artificial Sequence
  Description of Artificial Sequence: Synthetic oligonucleotide
  Antisense strand to SEQ ID NO: 1547500
uguuaaguuacagaucaca

SEQ ID NO: 1547502 - RNA, 19 nt, Artificial Sequence
  Description of Artificial Sequence: Synthetic oligonucleotide
  Sense strand starting at position 2353 of SEQ ID NO: 1245240
uuccguauucuugaucuaa

SEQ ID NO: 1547503 - RNA, 19 nt, Artificial Sequence
  Description of Artificial Sequence: Synthetic oligonucleotide
  Antisense strand to SEQ ID NO: 1547502
uuagaucaagaauacggaa

SEQ ID NO: 1547504 - RNA, 19 nt, Artificial Sequence
  Description of Artificial Sequence: Synthetic oligonucleotide
  Sense strand starting at position 2460 of SEQ ID NO: 1245240
uuugucauccaacgacaua

SEQ ID NO: 1547505 - RNA, 19 nt, Artificial Sequence
  Description of Artificial Sequence: Synthetic oligonucleotide
  Antisense strand to SEQ ID NO: 1547504
uaugucguuggaugacaaa

SEQ ID NO: 1547506 - RNA, 19 nt, Artificial Sequence
  Description of Artificial Sequence: Synthetic oligonucleotide
  Sense strand starting at position 2600 of SEQ ID NO: 1245240
aaacguaucuaggucuuga

SEQ ID NO: 1547507 - RNA, 19 nt, Artificial Sequence
  Description of Artificial Sequence: Synthetic oligonucleotide
  Antisense strand to SEQ ID NO: 1547506
ucaagaccuagauacguuu

SEQ ID NO: 1547508 - RNA, 19 nt, Artificial Sequence
  Description of Artificial Sequence: Synthetic oligonucleotide
  Sense strand starting at position 2643 of SEQ ID NO: 1245240
uuguguguuacuuuaugcu

SEQ ID NO: 1547509 - RNA, 19 nt, Artificial Sequence
  Description of Artificial Sequence: Synthetic oligonucleotide
  Antisense strand to SEQ ID NO: 1547508
agcauaaaguaacacacaa

SEQ ID NO: 1547510 - RNA, 19 nt, Artificial Sequence
  Description of Artificial Sequence: Synthetic oligonucleotide
  Sense strand starting at position 2804 of SEQ ID NO: 1245240
ggauguguauuuguuuacu

SEQ ID NO: 1547511 - RNA, 19 nt, Artificial Sequence
  Description of Artificial Sequence: Synthetic oligonucleotide
  Antisense strand to SEQ ID NO: 1547510
aguaaacaaauacacaucc

SEQ ID NO: 1547512 - RNA, 19 nt, Artificial Sequence
  Description of Artificial Sequence: Synthetic oligonucleotide
  Sense strand starting at position 2868 of SEQ ID NO: 1245240
uguuuaacucagcagcaaa

SEQ ID NO: 1547513 - RNA, 19 nt, Artificial Sequence
  Description of Artificial Sequence: Synthetic oligonucleotide
  Antisense strand to SEQ ID NO: 1547512
uuugcugcugaguuaaaca

SEQ ID NO: 1547514 - RNA, 19 nt, Artificial Sequence
  Description of Artificial Sequence: Synthetic oligonucleotide
  Sense strand starting at position 3123 of SEQ ID NO: 1245240
ucaggugugccuucugcua

SEQ ID NO: 1547515 - RNA, 19 nt, Artificial Sequence
  Description of Artificial Sequence: Synthetic oligonucleotide
  Antisense strand to SEQ ID NO: 1547514
uagcagaaggcacaccuga

SEQ ID NO: 1547516 - RNA, 19 nt, Artificial Sequence
  Description of Artificial Sequence: Synthetic oligonucleotide
  Sense strand starting at position 3553 of SEQ ID NO: 1245240
gaggguacucacugugaag

SEQ ID NO: 1547517 - RNA, 19 nt, Artificial Sequence
  Description of Artificial Sequence: Synthetic oligonucleotide
  Antisense strand to SEQ ID NO: 1547516
cuucacagugaguacccuc

SEQ ID NO: 1547518 - RNA, 19 nt, Artificial Sequence
  Description of Artificial Sequence: Synthetic oligonucleotide
  Sense strand starting at position 3673 of SEQ ID NO: 1245240
agggucgagagguguuaaa

SEQ ID NO: 1547519 - RNA, 19 nt, Artificial Sequence
  Description of Artificial Sequence: Synthetic oligonucleotide
  Antisense strand to SEQ ID NO: 1547518
uuuaacaccucucgacccu

SEQ ID NO: 1547520 - RNA, 19 nt, Artificial Sequence
  Description of Artificial Sequence: Synthetic oligonucleotide
  Sense strand starting at position 3680 of SEQ ID NO: 1245240
agagguguuaaagacgcaa

SEQ ID NO: 1547521 - RNA, 19 nt, Artificial Sequence
  Description of Artificial Sequence: Synthetic oligonucleotide
  Antisense strand to SEQ ID NO: 1547520
uugcgucuuuaacaccucu

SEQ ID NO: 1547522 - RNA, 19 nt, Artificial Sequence
  Description of Artificial Sequence: Synthetic oligonucleotide
  Sense strand starting at position 3767 of SEQ ID NO: 1245240
cagccagauccggaugagu

SEQ ID NO: 1547523 - RNA, 19 nt, Artificial Sequence
  Description of Artificial Sequence: Synthetic oligonucleotide
  Antisense strand to SEQ ID NO: 1547522
acucauccggaucuggcug

SEQ ID NO: 1547524 - RNA, 19 nt, Artificial Sequence
  Description of Artificial Sequence: Synthetic oligonucleotide
  Sense strand starting at position 22 of SEQ ID NO: 1245241
gguacagagaucugaacuu

SEQ ID NO: 1547525 - RNA, 19 nt, Artificial Sequence
  Description of Artificial Sequence: Synthetic oligonucleotide
  Antisense strand to SEQ ID NO: 1547524
aaguucagaucucuguacc

SEQ ID NO: 1547526 - RNA, 19 nt, Artificial Sequence
  Description of Artificial Sequence: Synthetic oligonucleotide
  Sense strand starting at position 84 of SEQ ID NO: 1245241
gcguaagugucccaggauu

SEQ ID NO: 1547527 - RNA, 19 nt, Artificial Sequence
  Description of Artificial Sequence: Synthetic oligonucleotide
  Antisense strand to SEQ ID NO: 1547526
aauccugggacacuuacgc

SEQ ID NO: 1547528 - RNA, 19 nt, Artificial Sequence
  Description of Artificial Sequence: Synthetic oligonucleotide
  Sense strand starting at position 150 of SEQ ID NO: 1245241
gcaagagcacauuguguaa

SEQ ID NO: 1547529 - RNA, 19 nt, Artificial Sequence
  Description of Artificial Sequence: Synthetic oligonucleotide
  Antisense strand to SEQ ID NO: 1547528
uuacacaaugugcucuugc

SEQ ID NO: 1547530 - RNA, 19 nt, Artificial Sequence
  Description of Artificial Sequence: Synthetic oligonucleotide
  Sense strand starting at position 188 of SEQ ID NO: 1245241
guuuaaacaugucaacauu

SEQ ID NO: 1547531 - RNA, 19 nt, Artificial Sequence
  Description of Artificial Sequence: Synthetic oligonucleotide
  Antisense strand to SEQ ID NO: 1547530
aauguugacauguuuaaac

SEQ ID NO: 1547532 - RNA, 19 nt, Artificial Sequence
  Description of Artificial Sequence: Synthetic oligonucleotide
  Sense strand starting at position 206 of SEQ ID NO: 1245241
uuucuaacauugggaugaa

SEQ ID NO: 1547533 - RNA, 19 nt, Artificial Sequence
  Description of Artificial Sequence: Synthetic oligonucleotide
  Antisense strand to SEQ ID NO: 1547532
uucaucccaauguuagaaa

SEQ ID NO: 1547534 - RNA, 19 nt, Artificial Sequence
  Description of Artificial Sequence: Synthetic oligonucleotide
  Sense strand starting at position 301 of SEQ ID NO: 1245241
gugcucagcucugcuaaga

SEQ ID NO: 1547535 - RNA, 19 nt, Artificial Sequence
  Description of Artificial Sequence: Synthetic oligonucleotide
  Antisense strand to SEQ ID NO: 1547534
ucuuagcagagcugagcac

SEQ ID NO: 1547536 - RNA, 19 nt, Artificial Sequence
  Description of Artificial Sequence: Synthetic oligonucleotide
  Sense strand starting at position 312 of SEQ ID NO: 1245241
ugcuaagaccagcgaguuu

SEQ ID NO: 1547537 - RNA, 19 nt, Artificial Sequence
  Description of Artificial Sequence: Synthetic oligonucleotide
  Antisense strand to SEQ ID NO: 1547536
aaacucgcuggucuuagca

SEQ ID NO: 1547538 - RNA, 19 nt, Artificial Sequence
  Description of Artificial Sequence: Synthetic oligonucleotide
  Sense strand starting at position 409 of SEQ ID NO: 1245241
gacgucugcccuuaugaag

SEQ ID NO: 1547539 - RNA, 19 nt, Artificial Sequence
  Description of Artificial Sequence: Synthetic oligonucleotide
  Antisense strand to SEQ ID NO: 1547538
cuucauaagggcagacguc

SEQ ID NO: 1547540 - RNA, 19 nt, Artificial Sequence
  Description of Artificial Sequence: Synthetic oligonucleotide
  Sense strand starting at position 443 of SEQ ID NO: 1245241
gugugcuggcgcucuuuaa

SEQ ID NO: 1547541 - RNA, 19 nt, Artificial Sequence
  Description of Artificial Sequence: Synthetic oligonucleotide
  Antisense strand to SEQ ID NO: 1547540
uuaaagagcgccagcacac

SEQ ID NO: 1547542 - RNA, 19 nt, Artificial Sequence
  Description of Artificial Sequence: Synthetic oligonucleotide
  Sense strand starting at position 444 of SEQ ID NO: 1245241
ugugcuggcgcucuuuaaa

SEQ ID NO: 1547543 - RNA, 19 nt, Artificial Sequence
  Description of Artificial Sequence: Synthetic oligonucleotide
  Antisense strand to SEQ ID NO: 1547542
uuuaaagagcgccagcaca

SEQ ID NO: 1547544 - RNA, 19 nt, Artificial Sequence
  Description of Artificial Sequence: Synthetic oligonucleotide
  Sense strand starting at position 447 of SEQ ID NO: 1245241
gcuggcgcucuuuaaauaa

SEQ ID NO: 1547545 - RNA, 19 nt, Artificial Sequence
  Description of Artificial Sequence: Synthetic oligonucleotide
  Antisense strand to SEQ ID NO: 1547544
uuauuuaaagagcgccagc

SEQ ID NO: 1547546 - RNA, 19 nt, Artificial Sequence
  Description of Artificial Sequence: Synthetic oligonucleotide
  Sense strand starting at position 991 of SEQ ID NO: 1245241
ccgcgaucuuggcgccaga

SEQ ID NO: 1547547 - RNA, 19 nt, Artificial Sequence
  Description of Artificial Sequence: Synthetic oligonucleotide
  Antisense strand to SEQ ID NO: 1547546
ucuggcgccaagaucgcgg

SEQ ID NO: 1547548 - RNA, 19 nt, Artificial Sequence
  Description of Artificial Sequence: Synthetic oligonucleotide
  Sense strand starting at position 1201 of SEQ ID NO: 1245241
ggagacaccuauuggcaga

SEQ ID NO: 1547549 - RNA, 19 nt, Artificial Sequence
  Description of Artificial Sequence: Synthetic oligonucleotide
  Antisense strand to SEQ ID NO: 1547548
ucugccaauaggugucucc

SEQ ID NO: 1547550 - RNA, 19 nt, Artificial Sequence
  Description of Artificial Sequence: Synthetic oligonucleotide
  Sense strand starting at position 2416 of SEQ ID NO: 1245241
ugcugaagucauuauguaa

SEQ ID NO: 1547551 - RNA, 19 nt, Artificial Sequence
  Description of Artificial Sequence: Synthetic oligonucleotide
  Antisense strand to SEQ ID NO: 1547550
uuacauaaugacuucagca

SEQ ID NO: 1547552 - RNA, 19 nt, Artificial Sequence
  Description of Artificial Sequence: Synthetic oligonucleotide
  Sense strand starting at position 2509 of SEQ ID NO: 1245241
ccgcuaaauuacuaacaga

SEQ ID NO: 1547553 - RNA, 19 nt, Artificial Sequence
  Description of Artificial Sequence: Synthetic oligonucleotide
  Antisense strand to SEQ ID NO: 1547552
ucuguuaguaauuuagcgg

SEQ ID NO: 1547554 - RNA, 19 nt, Artificial Sequence
  Description of Artificial Sequence: Synthetic oligonucleotide
  Sense strand starting at position 2545 of SEQ ID NO: 1245241
gacgucgaguuauugucau

SEQ ID NO: 1547555 - RNA, 19 nt, Artificial Sequence
  Description of Artificial Sequence: Synthetic oligonucleotide
  Antisense strand to SEQ ID NO: 1547554
augacaauaacucgacguc

SEQ ID NO: 1547556 - RNA, 19 nt, Artificial Sequence
  Description of Artificial Sequence: Synthetic oligonucleotide
  Sense strand starting at position 2573 of SEQ ID NO: 1245241
guaaauaucugcucgaccu

SEQ ID NO: 1547557 - RNA, 19 nt, Artificial Sequence
  Description of Artificial Sequence: Synthetic oligonucleotide
  Antisense strand to SEQ ID NO: 1547556
aggucgagcagauauuuac

SEQ ID NO: 1547558 - RNA, 19 nt, Artificial Sequence
  Description of Artificial Sequence: Synthetic oligonucleotide
  Sense strand starting at position 2821 of SEQ ID NO: 1245241
guuaaagugucuggugugu

SEQ ID NO: 1547559 - RNA, 19 nt, Artificial Sequence
  Description of Artificial Sequence: Synthetic oligonucleotide
  Antisense strand to SEQ ID NO: 1547558
acacaccagacacuuuaac

SEQ ID NO: 1547560 - RNA, 19 nt, Artificial Sequence
  Description of Artificial Sequence: Synthetic oligonucleotide
  Sense strand starting at position 2823 of SEQ ID NO: 1245241
uaaagugucugguguguag

SEQ ID NO: 1547561 - RNA, 19 nt, Artificial Sequence
  Description of Artificial Sequence: Synthetic oligonucleotide
  Antisense strand to SEQ ID NO: 1547560
cuacacaccagacacuuua

SEQ ID NO: 1547562 - RNA, 19 nt, Artificial Sequence
  Description of Artificial Sequence: Synthetic oligonucleotide
  Sense strand starting at position 2825 of SEQ ID NO: 1245241
aagugucugguguguagaa

SEQ ID NO: 1547563 - RNA, 19 nt, Artificial Sequence
  Description of Artificial Sequence: Synthetic oligonucleotide
  Antisense strand to SEQ ID NO: 1547562
uucuacacaccagacacuu

SEQ ID NO: 1547564 - RNA, 19 nt, Artificial Sequence
  Description of Artificial Sequence: Synthetic oligonucleotide
  Sense strand starting at position 2826 of SEQ ID NO: 1245241
agugucugguguguagaaa

SEQ ID NO: 1547565 - RNA, 19 nt, Artificial Sequence
  Description of Artificial Sequence: Synthetic oligonucleotide
  Antisense strand to SEQ ID NO: 1547564
uuucuacacaccagacacu

SEQ ID NO: 1547566 - RNA, 19 nt, Artificial Sequence
  Description of Artificial Sequence: Synthetic oligonucleotide
  Sense strand starting at position 2845 of SEQ ID NO: 1245241
ccauaaaucgauugcacga

SEQ ID NO: 1547567 - RNA, 19 nt, Artificial Sequence
  Description of Artificial Sequence: Synthetic oligonucleotide
  Antisense strand to SEQ ID NO: 1547566
ucgugcaaucgauuuaugg

SEQ ID NO: 1547568 - RNA, 19 nt, Artificial Sequence
  Description of Artificial Sequence: Synthetic oligonucleotide
  Sense strand starting at position 2858 of SEQ ID NO: 1245241
gcacgacacccuuauguga

SEQ ID NO: 1547569 - RNA, 19 nt, Artificial Sequence
  Description of Artificial Sequence: Synthetic oligonucleotide
  Antisense strand to SEQ ID NO: 1547568
ucacauaagggugucgugc

SEQ ID NO: 1547570 - RNA, 19 nt, Artificial Sequence
  Description of Artificial Sequence: Synthetic oligonucleotide
  Sense strand starting at position 2860 of SEQ ID NO: 1245241
acgacacccuuaugugauu

SEQ ID NO: 1547571 - RNA, 19 nt, Artificial Sequence
  Description of Artificial Sequence: Synthetic oligonucleotide
  Antisense strand to SEQ ID NO: 1547570
aaucacauaagggugucgu

SEQ ID NO: 1547572 - RNA, 19 nt, Artificial Sequence
  Description of Artificial Sequence: Synthetic oligonucleotide
  Sense strand starting at position 3133 of SEQ ID NO: 1245241
ggagagacgugcccggauu

SEQ ID NO: 1547573 - RNA, 19 nt, Artificial Sequence
  Description of Artificial Sequence: Synthetic oligonucleotide
  Antisense strand to SEQ ID NO: 1547572
aauccgggcacgucucucc

SEQ ID NO: 1547574 - RNA, 19 nt, Artificial Sequence
  Description of Artificial Sequence: Synthetic oligonucleotide
  Sense strand starting at position 3134 of SEQ ID NO: 1245241
gagagacgugcccggauua

SEQ ID NO: 1547575 - RNA, 19 nt, Artificial Sequence
  Description of Artificial Sequence: Synthetic oligonucleotide
  Antisense strand to SEQ ID NO: 1547574
uaauccgggcacgucucuc

SEQ ID NO: 1547576 - RNA, 19 nt, Artificial Sequence
  Description of Artificial Sequence: Synthetic oligonucleotide
  Sense strand starting at position 3814 of SEQ ID NO: 1245241
ucuguuucccucuguuuaa

SEQ ID NO: 1547577 - RNA, 19 nt, Artificial Sequence
  Description of Artificial Sequence: Synthetic oligonucleotide
  Antisense strand to SEQ ID NO: 1547576
uuaaacagagggaaacaga

SEQ ID NO: 1547578 - RNA, 19 nt, Artificial Sequence
  Description of Artificial Sequence: Synthetic oligonucleotide
  Sense strand starting at position 3815 of SEQ ID NO: 1245241
cuguuucccucuguuuaau

SEQ ID NO: 1547579 - RNA, 19 nt, Artificial Sequence
  Description of Artificial Sequence: Synthetic oligonucleotide
  Antisense strand to SEQ ID NO: 1547578
auuaaacagagggaaacag

SEQ ID NO: 1547580 - RNA, 19 nt, Artificial Sequence
  Description of Artificial Sequence: Synthetic oligonucleotide
  Sense strand starting at position 63 of SEQ ID NO: 1245242
cccggauaagccuggaguu

SEQ ID NO: 1547581 - RNA, 19 nt, Artificial Sequence
  Description of Artificial Sequence: Synthetic oligonucleotide
  Antisense strand to SEQ ID NO: 1547580
aacuccaggcuuauccggg

SEQ ID NO: 1547582 - RNA, 19 nt, Artificial Sequence
  Description of Artificial Sequence: Synthetic oligonucleotide
  Sense strand starting at position 64 of SEQ ID NO: 1245242
ccggauaagccuggaguua

SEQ ID NO: 1547583 - RNA, 19 nt, Artificial Sequence
  Description of Artificial Sequence: Synthetic oligonucleotide
  Antisense strand to SEQ ID NO: 1547582
uaacuccaggcuuauccgg

SEQ ID NO: 1547584 - RNA, 19 nt, Artificial Sequence
  Description of Artificial Sequence: Synthetic oligonucleotide
  Sense strand starting at position 76 of SEQ ID NO: 1245242
ggaguuaccugugcaguca

SEQ ID NO: 1547585 - RNA, 19 nt, Artificial Sequence
  Description of Artificial Sequence: Synthetic oligonucleotide
  Antisense strand to SEQ ID NO: 1547584
ugacugcacagguaacucc

SEQ ID NO: 1547586 - RNA, 19 nt, Artificial Sequence
  Description of Artificial Sequence: Synthetic oligonucleotide
  Sense strand starting at position 168 of SEQ ID NO: 1245242
ggaaguggcccuugucacu

SEQ ID NO: 1547587 - RNA, 19 nt, Artificial Sequence
  Description of Artificial Sequence: Synthetic oligonucleotide
  Antisense strand to SEQ ID NO: 1547586
agugacaagggccacuucc

SEQ ID NO: 1547588 - RNA, 19 nt, Artificial Sequence
  Description of Artificial Sequence: Synthetic oligonucleotide
  Sense strand starting at position 298 of SEQ ID NO: 1245242
gugcuucuucaaggaggca

SEQ ID NO: 1547589 - RNA, 19 nt, Artificial Sequence
  Description of Artificial Sequence: Synthetic oligonucleotide
  Antisense strand to SEQ ID NO: 1547588
ugccuccuugaagaagcac

SEQ ID NO: 1547590 - RNA, 19 nt, Artificial Sequence
  Description of Artificial Sequence: Synthetic oligonucleotide
  Sense strand starting at position 311 of SEQ ID NO: 1245242
gaggcaaagcagugaaauc

SEQ ID NO: 1547591 - RNA, 19 nt, Artificial Sequence
  Description of Artificial Sequence: Synthetic oligonucleotide
  Antisense strand to SEQ ID NO: 1547590
gauuucacugcuuugccuc

SEQ ID NO: 1547592 - RNA, 19 nt, Artificial Sequence
  Description of Artificial Sequence: Synthetic oligonucleotide
  Sense strand starting at position 445 of SEQ ID NO: 1245242
agugauucacgcugugaac

SEQ ID NO: 1547593 - RNA, 19 nt, Artificial Sequence
  Description of Artificial Sequence: Synthetic oligonucleotide
  Antisense strand to SEQ ID NO: 1547592
guucacagcgugaaucacu

SEQ ID NO: 1547594 - RNA, 19 nt, Artificial Sequence
  Description of Artificial Sequence: Synthetic oligonucleotide
  Sense strand starting at position 447 of SEQ ID NO: 1245242
ugauucacgcugugaacga

SEQ ID NO: 1547595 - RNA, 19 nt, Artificial Sequence
  Description of Artificial Sequence: Synthetic oligonucleotide
  Antisense strand to SEQ ID NO: 1547594
ucguucacagcgugaauca

SEQ ID NO: 1547596 - RNA, 19 nt, Artificial Sequence
  Description of Artificial Sequence: Synthetic oligonucleotide
  Sense strand starting at position 655 of SEQ ID NO: 1245242
cugaaauguccuggcucaa

SEQ ID NO: 1547597 - RNA, 19 nt, Artificial Sequence
  Description of Artificial Sequence: Synthetic oligonucleotide
  Antisense strand to SEQ ID NO: 1547596
uugagccaggacauuucag

SEQ ID NO: 1547598 - RNA, 19 nt, Artificial Sequence
  Description of Artificial Sequence: Synthetic oligonucleotide
  Sense strand starting at position 895 of SEQ ID NO: 1245242
ugaucaagacguuggaguu

SEQ ID NO: 1547599 - RNA, 19 nt, Artificial Sequence
  Description of Artificial Sequence: Synthetic oligonucleotide
  Antisense strand to SEQ ID NO: 1547598
aacuccaacgucuugauca

SEQ ID NO: 1547600 - RNA, 19 nt, Artificial Sequence
  Description of Artificial Sequence: Synthetic oligonucleotide
  Sense strand starting at position 896 of SEQ ID NO: 1245242
gaucaagacguuggaguuu

SEQ ID NO: 1547601 - RNA, 19 nt, Artificial Sequence
  Description of Artificial Sequence: Synthetic oligonucleotide
  Antisense strand to SEQ ID NO: 1547600
aaacuccaacgucuugauc

SEQ ID NO: 1547602 - RNA, 19 nt, Artificial Sequence
  Description of Artificial Sequence: Synthetic oligonucleotide
  Sense strand starting at position 924 of SEQ ID NO: 1245242
aguagugaacgauacggaa

SEQ ID NO: 1547603 - RNA, 19 nt, Artificial Sequence
  Description of Artificial Sequence: Synthetic oligonucleotide
  Antisense strand to SEQ ID NO: 1547602
uuccguaucguucacuacu

SEQ ID NO: 1547604 - RNA, 19 nt, Artificial Sequence
  Description of Artificial Sequence: Synthetic oligonucleotide
  Sense strand starting at position 1168 of SEQ ID NO: 1245242
aguuauuugugguuuguuu

SEQ ID NO: 1547605 - RNA, 19 nt, Artificial Sequence
  Description of Artificial Sequence: Synthetic oligonucleotide
  Antisense strand to SEQ ID NO: 1547604
aaacaaaccacaaauaacu

SEQ ID NO: 1547606 - RNA, 19 nt, Artificial Sequence
  Description of Artificial Sequence: Synthetic oligonucleotide
  Sense strand starting at position 1176 of SEQ ID NO: 1245242
gugguuuguuuaccugaaa

SEQ ID NO: 1547607 - RNA, 19 nt, Artificial Sequence
  Description of Artificial Sequence: Synthetic oligonucleotide
  Antisense strand to SEQ ID NO: 1547606
uuucagguaaacaaaccac

SEQ ID NO: 1547608 - RNA, 19 nt, Artificial Sequence
  Description of Artificial Sequence: Synthetic oligonucleotide
  Sense strand starting at position 1177 of SEQ ID NO: 1245242
ugguuuguuuaccugaaac

SEQ ID NO: 1547609 - RNA, 19 nt, Artificial Sequence
  Description of Artificial Sequence: Synthetic oligonucleotide
  Antisense strand to SEQ ID NO: 1547608
guuucagguaaacaaacca

SEQ ID NO: 1547610 - RNA, 19 nt, Artificial Sequence
  Description of Artificial Sequence: Synthetic oligonucleotide
  Sense strand starting at position 1196 of SEQ ID NO: 1245242
ccuuauuucugacacagag

SEQ ID NO: 1547611 - RNA, 19 nt, Artificial Sequence
  Description of Artificial Sequence: Synthetic oligonucleotide
  Antisense strand to SEQ ID NO: 1547610
cucugugucagaaauaagg

SEQ ID NO: 1547612 - RNA, 19 nt, Artificial Sequence
  Description of Artificial Sequence: Synthetic oligonucleotide
  Sense strand starting at position 1246 of SEQ ID NO: 1245242
gguagcuccggguaaacuu

SEQ ID NO: 1547613 - RNA, 19 nt, Artificial Sequence
  Description of Artificial Sequence: Synthetic oligonucleotide
  Antisense strand to SEQ ID NO: 1547612
aaguuuacccggagcuacc

SEQ ID NO: 1547614 - RNA, 19 nt, Artificial Sequence
  Description of Artificial Sequence: Synthetic oligonucleotide
  Sense strand starting at position 2021 of SEQ ID NO: 1245242
gggcguuuccggguuuaca

SEQ ID NO: 1547615 - RNA, 19 nt, Artificial Sequence
  Description of Artificial Sequence: Synthetic oligonucleotide
  Antisense strand to SEQ ID NO: 1547614
uguaaacccggaaacgccc

SEQ ID NO: 1547616 - RNA, 19 nt, Artificial Sequence
  Description of Artificial Sequence: Synthetic oligonucleotide
  Sense strand starting at position 2022 of SEQ ID NO: 1245242
ggcguuuccggguuuacau

SEQ ID NO: 1547617 - RNA, 19 nt, Artificial Sequence
  Description of Artificial Sequence: Synthetic oligonucleotide
  Antisense strand to SEQ ID NO: 1547616
auguaaacccggaaacgcc

SEQ ID NO: 1547618 - RNA, 19 nt, Artificial Sequence
  Description of Artificial Sequence: Synthetic oligonucleotide
  Sense strand starting at position 2023 of SEQ ID NO: 1245242
gcguuuccggguuuacaua

SEQ ID NO: 1547619 - RNA, 19 nt, Artificial Sequence
  Description of Artificial Sequence: Synthetic oligonucleotide
  Antisense strand to SEQ ID NO: 1547618
uauguaaacccggaaacgc

SEQ ID NO: 1547620 - RNA, 19 nt, Artificial Sequence
  Description of Artificial Sequence: Synthetic oligonucleotide
  Sense strand starting at position 2793 of SEQ ID NO: 1245242
acacccgacauguggaaua

SEQ ID NO: 1547621 - RNA, 19 nt, Artificial Sequence
  Description of Artificial Sequence: Synthetic oligonucleotide
  Antisense strand to SEQ ID NO: 1547620
uauuccacaugucgggugu

SEQ ID NO: 1547622 - RNA, 19 nt, Artificial Sequence
  Description of Artificial Sequence: Synthetic oligonucleotide
  Sense strand starting at position 2795 of SEQ ID NO: 1245242
acccgacauguggaauagu

SEQ ID NO: 1547623 - RNA, 19 nt, Artificial Sequence
  Description of Artificial Sequence: Synthetic oligonucleotide
  Antisense strand to SEQ ID NO: 1547622
acuauuccacaugucgggu

SEQ ID NO: 1547624 - RNA, 19 nt, Artificial Sequence
  Description of Artificial Sequence: Synthetic oligonucleotide
  Sense strand starting at position 2803 of SEQ ID NO: 1245242
uguggaauaguaggaggau

SEQ ID NO: 1547625 - RNA, 19 nt, Artificial Sequence
  Description of Artificial Sequence: Synthetic oligonucleotide
  Antisense strand to SEQ ID NO: 1547624
auccuccuacuauuccaca

SEQ ID NO: 1547626 - RNA, 19 nt, Artificial Sequence
  Description of Artificial Sequence: Synthetic oligonucleotide
  Sense strand starting at position 3033 of SEQ ID NO: 1245242
uuccguguggccugauuua

SEQ ID NO: 1547627 - RNA, 19 nt, Artificial Sequence
  Description of Artificial Sequence: Synthetic oligonucleotide
  Antisense strand to SEQ ID NO: 1547626
uaaaucaggccacacggaa

SEQ ID NO: 1547628 - RNA, 19 nt, Artificial Sequence
  Description of Artificial Sequence: Synthetic oligonucleotide
  Sense strand starting at position 3040 of SEQ ID NO: 1245242
uggccugauuuaguuucua

SEQ ID NO: 1547629 - RNA, 19 nt, Artificial Sequence
  Description of Artificial Sequence: Synthetic oligonucleotide
  Antisense strand to SEQ ID NO: 1547628
uagaaacuaaaucaggcca

SEQ ID NO: 1547630 - RNA, 19 nt, Artificial Sequence
  Description of Artificial Sequence: Synthetic oligonucleotide
  Sense strand starting at position 3068 of SEQ ID NO: 1245242
cugacuuugggauggaugu

SEQ ID NO: 1547631 - RNA, 19 nt, Artificial Sequence
  Description of Artificial Sequence: Synthetic oligonucleotide
  Antisense strand to SEQ ID NO: 1547630
acauccaucccaaagucag

SEQ ID NO: 1547632 - RNA, 19 nt, Artificial Sequence
  Description of Artificial Sequence: Synthetic oligonucleotide
  Sense strand starting at position 3069 of SEQ ID NO: 1245242
ugacuuugggauggauguu

SEQ ID NO: 1547633 - RNA, 19 nt, Artificial Sequence
  Description of Artificial Sequence: Synthetic oligonucleotide
  Antisense strand to SEQ ID NO: 1547632
aacauccaucccaaaguca

SEQ ID NO: 1547634 - RNA, 19 nt, Artificial Sequence
  Description of Artificial Sequence: Synthetic oligonucleotide
  Sense strand starting at position 3555 of SEQ ID NO: 1245242
cccuuaucaucuguuuaga

SEQ ID NO: 1547635 - RNA, 19 nt, Artificial Sequence
  Description of Artificial Sequence: Synthetic oligonucleotide
  Antisense strand to SEQ ID NO: 1547634
ucuaaacagaugauaaggg

SEQ ID NO: 1547636 - RNA, 19 nt, Artificial Sequence
  Description of Artificial Sequence: Synthetic oligonucleotide
  Sense strand starting at position 3557 of SEQ ID NO: 1245242
cuuaucaucuguuuagacu

SEQ ID NO: 1547637 - RNA, 19 nt, Artificial Sequence
  Description of Artificial Sequence: Synthetic oligonucleotide
  Antisense strand to SEQ ID NO: 1547636
agucuaaacagaugauaag

SEQ ID NO: 1547638 - RNA, 19 nt, Artificial Sequence
  Description of Artificial Sequence: Synthetic oligonucleotide
  Sense strand starting at position 3558 of SEQ ID NO: 1245242
uuaucaucuguuuagacua

SEQ ID NO: 1547639 - RNA, 19 nt, Artificial Sequence
  Description of Artificial Sequence: Synthetic oligonucleotide
  Antisense strand to SEQ ID NO: 1547638
uagucuaaacagaugauaa

SEQ ID NO: 1547640 - RNA, 19 nt, Artificial Sequence
  Description of Artificial Sequence: Synthetic oligonucleotide
  Sense strand starting at position 3749 of SEQ ID NO: 1245242
ugggcuuccuuccugcaaa

SEQ ID NO: 1547641 - RNA, 19 nt, Artificial Sequence
  Description of Artificial Sequence: Synthetic oligonucleotide
  Antisense strand to SEQ ID NO: 1547640
uuugcaggaaggaagccca

SEQ ID NO: 1547642 - RNA, 19 nt, Artificial Sequence
  Description of Artificial Sequence: Synthetic oligonucleotide
  Sense strand starting at position 3773 of SEQ ID NO: 1245242
cagagcuauugguccagau

SEQ ID NO: 1547643 - RNA, 19 nt, Artificial Sequence
  Description of Artificial Sequence: Synthetic oligonucleotide
  Antisense strand to SEQ ID NO: 1547642
aucuggaccaauagcucug

SEQ ID NO: 1547644 - RNA, 19 nt, Artificial Sequence
  Description of Artificial Sequence: Synthetic oligonucleotide
  Sense strand starting at position 3775 of SEQ ID NO: 1245242
gagcuauugguccagauuc

SEQ ID NO: 1547645 - RNA, 19 nt, Artificial Sequence
  Description of Artificial Sequence: Synthetic oligonucleotide
  Antisense strand to SEQ ID NO: 1547644
gaaucuggaccaauagcuc

SEQ ID NO: 1547646 - RNA, 19 nt, Artificial Sequence
  Description of Artificial Sequence: Synthetic oligonucleotide
  Sense strand starting at position 3818 of SEQ ID NO: 1245242
gggugucuccauggaaaug

SEQ ID NO: 1547647 - RNA, 19 nt, Artificial Sequence
  Description of Artificial Sequence: Synthetic oligonucleotide
  Antisense strand to SEQ ID NO: 1547646
cauuuccauggagacaccc

SEQ ID NO: 1547648 - RNA, 19 nt, Artificial Sequence
  Description of Artificial Sequence: Synthetic oligonucleotide
  Sense strand starting at position 3819 of SEQ ID NO: 1245242
ggugucuccauggaaaugu

SEQ ID NO: 1547649 - RNA, 19 nt, Artificial Sequence
  Description of Artificial Sequence: Synthetic oligonucleotide
  Antisense strand to SEQ ID NO: 1547648
acauuuccauggagacacc

SEQ ID NO: 1547650 - RNA, 19 nt, Artificial Sequence
  Description of Artificial Sequence: Synthetic oligonucleotide
  Sense strand starting at position 3829 of SEQ ID NO: 1245242
uggaaauguuuagcuugga

SEQ ID NO: 1547651 - RNA, 19 nt, Artificial Sequence
  Description of Artificial Sequence: Synthetic oligonucleotide
  Antisense strand to SEQ ID NO: 1547650
uccaagcuaaacauuucca

SEQ ID NO: 1547652 - RNA, 19 nt, Artificial Sequence
  Description of Artificial Sequence: Synthetic oligonucleotide
  Sense strand starting at position 3931 of SEQ ID NO: 1245242
uuucuaaucugagcuggga

SEQ ID NO: 1547653 - RNA, 19 nt, Artificial Sequence
  Description of Artificial Sequence: Synthetic oligonucleotide
  Antisense strand to SEQ ID NO: 1547652
ucccagcucagauuagaaa

SEQ ID NO: 1547654 - RNA, 19 nt, Artificial Sequence
  Description of Artificial Sequence: Synthetic oligonucleotide
  Sense strand starting at position 3935 of SEQ ID NO: 1245242
uaaucugagcugggaaaca

SEQ ID NO: 1547655 - RNA, 19 nt, Artificial Sequence
  Description of Artificial Sequence: Synthetic oligonucleotide
  Antisense strand to SEQ ID NO: 1547654
uguuucccagcucagauua

SEQ ID NO: 1547656 - RNA, 19 nt, Artificial Sequence
  Description of Artificial Sequence: Synthetic oligonucleotide
  Sense strand starting at position 3948 of SEQ ID NO: 1245242
gaaacaacgcugugaaguu

SEQ ID NO: 1547657 - RNA, 19 nt, Artificial Sequence
  Description of Artificial Sequence: Synthetic oligonucleotide
  Antisense strand to SEQ ID NO: 1547656
aacuucacagcguuguuuc

SEQ ID NO: 1547658 - RNA, 19 nt, Artificial Sequence
  Description of Artificial Sequence: Synthetic oligonucleotide
  Sense strand starting at position 3958 of SEQ ID NO: 1245242
ugugaaguuaaguggcaga

SEQ ID NO: 1547659 - RNA, 19 nt, Artificial Sequence
  Description of Artificial Sequence: Synthetic oligonucleotide
  Antisense strand to SEQ ID NO: 1547658
ucugccacuuaacuucaca

SEQ ID NO: 1547660 - RNA, 19 nt, Artificial Sequence
  Description of Artificial Sequence: Synthetic oligonucleotide
  Sense strand starting at position 320 of SEQ ID NO: 1245243
ucuagcauccuccaggaau

SEQ ID NO: 1547661 - RNA, 19 nt, Artificial Sequence
  Description of Artificial Sequence: Synthetic oligonucleotide
  Antisense strand to SEQ ID NO: 1547660
auuccuggaggaugcuaga

SEQ ID NO: 1547662 - RNA, 19 nt, Artificial Sequence
  Description of Artificial Sequence: Synthetic oligonucleotide
  Sense strand starting at position 334 of SEQ ID NO: 1245243
ggaauacugcaccgggaaa

SEQ ID NO: 1547663 - RNA, 19 nt, Artificial Sequence
  Description of Artificial Sequence: Synthetic oligonucleotide
  Antisense strand to SEQ ID NO: 1547662
uuucccggugcaguauucc

SEQ ID NO: 1547664 - RNA, 19 nt, Artificial Sequence
  Description of Artificial Sequence: Synthetic oligonucleotide
  Sense strand starting at position 471 of SEQ ID NO: 1245243
uggcaugaugcagaaaggu

SEQ ID NO: 1547665 - RNA, 19 nt, Artificial Sequence
  Description of Artificial Sequence: Synthetic oligonucleotide
  Antisense strand to SEQ ID NO: 1547664
accuuucugcaucaugcca

SEQ ID NO: 1547666 - RNA, 19 nt, Artificial Sequence
  Description of Artificial Sequence: Synthetic oligonucleotide
  Sense strand starting at position 484 of SEQ ID NO: 1245243
aaaggucuccugcaucaga

SEQ ID NO: 1547667 - RNA, 19 nt, Artificial Sequence
  Description of Artificial Sequence: Synthetic oligonucleotide
  Antisense strand to SEQ ID NO: 1547666
ucugaugcaggagaccuuu

SEQ ID NO: 1547668 - RNA, 19 nt, Artificial Sequence
  Description of Artificial Sequence: Synthetic oligonucleotide
  Sense strand starting at position 528 of SEQ ID NO: 1245243
guucccaucuucuugugaa

SEQ ID NO: 1547669 - RNA, 19 nt, Artificial Sequence
  Description of Artificial Sequence: Synthetic oligonucleotide
  Antisense strand to SEQ ID NO: 1547668
uucacaagaagaugggaac

SEQ ID NO: 1547670 - RNA, 19 nt, Artificial Sequence
  Description of Artificial Sequence: Synthetic oligonucleotide
  Sense strand starting at position 649 of SEQ ID NO: 1245243
gagcuuuguggccaugaga

SEQ ID NO: 1547671 - RNA, 19 nt, Artificial Sequence
  Description of Artificial Sequence: Synthetic oligonucleotide
  Antisense strand to SEQ ID NO: 1547670
ucucauggccacaaagcuc

SEQ ID NO: 1547672 - RNA, 19 nt, Artificial Sequence
  Description of Artificial Sequence: Synthetic oligonucleotide
  Sense strand starting at position 652 of SEQ ID NO: 1245243
cuuuguggccaugagacua

SEQ ID NO: 1547673 - RNA, 19 nt, Artificial Sequence
  Description of Artificial Sequence: Synthetic oligonucleotide
  Antisense strand to SEQ ID NO: 1547672
uagucucauggccacaaag

SEQ ID NO: 1547674 - RNA, 19 nt, Artificial Sequence
  Description of Artificial Sequence: Synthetic oligonucleotide
  Sense strand starting at position 753 of SEQ ID NO: 1245243
ugcggcuuuauuuguggaa

SEQ ID NO: 1547675 - RNA, 19 nt, Artificial Sequence
  Description of Artificial Sequence: Synthetic oligonucleotide
  Antisense strand to SEQ ID NO: 1547674
uuccacaaauaaagccgca

SEQ ID NO: 1547676 - RNA, 19 nt, Artificial Sequence
  Description of Artificial Sequence: Synthetic oligonucleotide
  Sense strand starting at position 847 of SEQ ID NO: 1245243
ggcaacgaucucugggagu

SEQ ID NO: 1547677 - RNA, 19 nt, Artificial Sequence
  Description of Artificial Sequence: Synthetic oligonucleotide
  Antisense strand to SEQ ID NO: 1547676
acucccagagaucguugcc

SEQ ID NO: 1547678 - RNA, 19 nt, Artificial Sequence
  Description of Artificial Sequence: Synthetic oligonucleotide
  Sense strand starting at position 849 of SEQ ID NO: 1245243
caacgaucucugggaguga

SEQ ID NO: 1547679 - RNA, 19 nt, Artificial Sequence
  Description of Artificial Sequence: Synthetic oligonucleotide
  Antisense strand to SEQ ID NO: 1547678
ucacucccagagaucguug

SEQ ID NO: 1547680 - RNA, 19 nt, Artificial Sequence
  Description of Artificial Sequence: Synthetic oligonucleotide
  Sense strand starting at position 853 of SEQ ID NO: 1245243
gaucucugggagugaucga

SEQ ID NO: 1547681 - RNA, 19 nt, Artificial Sequence
  Description of Artificial Sequence: Synthetic oligonucleotide
  Antisense strand to SEQ ID NO: 1547680
ucgaucacucccagagauc

SEQ ID NO: 1547682 - RNA, 19 nt, Artificial Sequence
  Description of Artificial Sequence: Synthetic oligonucleotide
  Sense strand starting at position 858 of SEQ ID NO: 1245243
cugggagugaucgaggcau

SEQ ID NO: 1547683 - RNA, 19 nt, Artificial Sequence
  Description of Artificial Sequence: Synthetic oligonucleotide
  Antisense strand to SEQ ID NO: 1547682
augccucgaucacucccag

SEQ ID NO: 1547684 - RNA, 19 nt, Artificial Sequence
  Description of Artificial Sequence: Synthetic oligonucleotide
  Sense strand starting at position 860 of SEQ ID NO: 1245243
gggagugaucgaggcauuc

SEQ ID NO: 1547685 - RNA, 19 nt, Artificial Sequence
  Description of Artificial Sequence: Synthetic oligonucleotide
  Antisense strand to SEQ ID NO: 1547684
gaaugccucgaucacuccc

SEQ ID NO: 1547686 - RNA, 19 nt, Artificial Sequence
  Description of Artificial Sequence: Synthetic oligonucleotide
  Sense strand starting at position 972 of SEQ ID NO: 1245243
gcuuuaugccaauaaggag

SEQ ID NO: 1547687 - RNA, 19 nt, Artificial Sequence
  Description of Artificial Sequence: Synthetic oligonucleotide
  Antisense strand to SEQ ID NO: 1547686
cuccuuauuggcauaaagc

SEQ ID NO: 1547688 - RNA, 19 nt, Artificial Sequence
  Description of Artificial Sequence: Synthetic oligonucleotide
  Sense strand starting at position 1591 of SEQ ID NO: 1245243
ggacgauccguucguauuu

SEQ ID NO: 1547689 - RNA, 19 nt, Artificial Sequence
  Description of Artificial Sequence: Synthetic oligonucleotide
  Antisense strand to SEQ ID NO: 1547688
aaauacgaacggaucgucc

SEQ ID NO: 1547690 - RNA, 19 nt, Artificial Sequence
  Description of Artificial Sequence: Synthetic oligonucleotide
  Sense strand starting at position 1755 of SEQ ID NO: 1245243
ucacccuaggcucaugaaa

SEQ ID NO: 1547691 - RNA, 19 nt, Artificial Sequence
  Description of Artificial Sequence: Synthetic oligonucleotide
  Antisense strand to SEQ ID NO: 1547690
uuucaugagccuaggguga

SEQ ID NO: 1547692 - RNA, 19 nt, Artificial Sequence
  Description of Artificial Sequence: Synthetic oligonucleotide
  Sense strand starting at position 1962 of SEQ ID NO: 1245243
gcggucggucucuuuaaua

SEQ ID NO: 1547693 - RNA, 19 nt, Artificial Sequence
  Description of Artificial Sequence: Synthetic oligonucleotide
  Antisense strand to SEQ ID NO: 1547692
uauuaaagagaccgaccgc

SEQ ID NO: 1547694 - RNA, 19 nt, Artificial Sequence
  Description of Artificial Sequence: Synthetic oligonucleotide
  Sense strand starting at position 2045 of SEQ ID NO: 1245243
aucccauuccuugguuuau

SEQ ID NO: 1547695 - RNA, 19 nt, Artificial Sequence
  Description of Artificial Sequence: Synthetic oligonucleotide
  Antisense strand to SEQ ID NO: 1547694
auaaaccaaggaaugggau

SEQ ID NO: 1547696 - RNA, 19 nt, Artificial Sequence
  Description of Artificial Sequence: Synthetic oligonucleotide
  Sense strand starting at position 2046 of SEQ ID NO: 1245243
ucccauuccuugguuuauu

SEQ ID NO: 1547697 - RNA, 19 nt, Artificial Sequence
  Description of Artificial Sequence: Synthetic oligonucleotide
  Antisense strand to SEQ ID NO: 1547696
aauaaaccaaggaauggga

SEQ ID NO: 1547698 - RNA, 19 nt, Artificial Sequence
  Description of Artificial Sequence: Synthetic oligonucleotide
  Sense strand starting at position 2340 of SEQ ID NO: 1245243
aagagaaaguucuuaccug

SEQ ID NO: 1547699 - RNA, 19 nt, Artificial Sequence
  Description of Artificial Sequence: Synthetic oligonucleotide
  Antisense strand to SEQ ID NO: 1547698
cagguaagaacuuucucuu

SEQ ID NO: 1547700 - RNA, 19 nt, Artificial Sequence
  Description of Artificial Sequence: Synthetic oligonucleotide
  Sense strand starting at position 2503 of SEQ ID NO: 1245243
uuagcaaagcauugaugga

SEQ ID NO: 1547701 - RNA, 19 nt, Artificial Sequence
  Description of Artificial Sequence: Synthetic oligonucleotide
  Antisense strand to SEQ ID NO: 1547700
uccaucaaugcuuugcuaa

SEQ ID NO: 1547702 - RNA, 19 nt, Artificial Sequence
  Description of Artificial Sequence: Synthetic oligonucleotide
  Sense strand starting at position 2507 of SEQ ID NO: 1245243
caaagcauugauggagauu

SEQ ID NO: 1547703 - RNA, 19 nt, Artificial Sequence
  Description of Artificial Sequence: Synthetic oligonucleotide
  Antisense strand to SEQ ID NO: 1547702
aaucuccaucaaugcuuug

SEQ ID NO: 1547704 - RNA, 19 nt, Artificial Sequence
  Description of Artificial Sequence: Synthetic oligonucleotide
  Sense strand starting at position 2528 of SEQ ID NO: 1245243
gccauaguucuacaggaua

SEQ ID NO: 1547705 - RNA, 19 nt, Artificial Sequence
  Description of Artificial Sequence: Synthetic oligonucleotide
  Antisense strand to SEQ ID NO: 1547704
uauccuguagaacuauggc

SEQ ID NO: 1547706 - RNA, 19 nt, Artificial Sequence
  Description of Artificial Sequence: Synthetic oligonucleotide
  Sense strand starting at position 2690 of SEQ ID NO: 1245243
uuaggauacagaugcuuga

SEQ ID NO: 1547707 - RNA, 19 nt, Artificial Sequence
  Description of Artificial Sequence: Synthetic oligonucleotide
  Antisense strand to SEQ ID NO: 1547706
ucaagcaucuguauccuaa

SEQ ID NO: 1547708 - RNA, 19 nt, Artificial Sequence
  Description of Artificial Sequence: Synthetic oligonucleotide
  Sense strand starting at position 2843 of SEQ ID NO: 1245243
ugaguagccaaauaugagu

SEQ ID NO: 1547709 - RNA, 19 nt, Artificial Sequence
  Description of Artificial Sequence: Synthetic oligonucleotide
  Antisense strand to SEQ ID NO: 1547708
acucauauuuggcuacuca

SEQ ID NO: 1547710 - RNA, 19 nt, Artificial Sequence
  Description of Artificial Sequence: Synthetic oligonucleotide
  Sense strand starting at position 2852 of SEQ ID NO: 1245243
aaauaugaguuccucugga

SEQ ID NO: 1547711 - RNA, 19 nt, Artificial Sequence
  Description of Artificial Sequence: Synthetic oligonucleotide
  Antisense strand to SEQ ID NO: 1547710
uccagaggaacucauauuu

SEQ ID NO: 1547712 - RNA, 19 nt, Artificial Sequence
  Description of Artificial Sequence: Synthetic oligonucleotide
  Sense strand starting at position 2857 of SEQ ID NO: 1245243
ugaguuccucuggacuauu

SEQ ID NO: 1547713 - RNA, 19 nt, Artificial Sequence
  Description of Artificial Sequence: Synthetic oligonucleotide
  Antisense strand to SEQ ID NO: 1547712
aauaguccagaggaacuca

SEQ ID NO: 1547714 - RNA, 19 nt, Artificial Sequence
  Description of Artificial Sequence: Synthetic oligonucleotide
  Sense strand starting at position 2927 of SEQ ID NO: 1245243
uguuuccagagcuggaaau

SEQ ID NO: 1547715 - RNA, 19 nt, Artificial Sequence
  Description of Artificial Sequence: Synthetic oligonucleotide
  Antisense strand to SEQ ID NO: 1547714
auuuccagcucuggaaaca

SEQ ID NO: 1547716 - RNA, 19 nt, Artificial Sequence
  Description of Artificial Sequence: Synthetic oligonucleotide
  Sense strand starting at position 2928 of SEQ ID NO: 1245243
guuuccagagcuggaaaua

SEQ ID NO: 1547717 - RNA, 19 nt, Artificial Sequence
  Description of Artificial Sequence: Synthetic oligonucleotide
  Antisense strand to SEQ ID NO: 1547716
uauuuccagcucuggaaac

SEQ ID NO: 1547718 - RNA, 19 nt, Artificial Sequence
  Description of Artificial Sequence: Synthetic oligonucleotide
  Sense strand starting at position 3106 of SEQ ID NO: 1245243
cgucgucucccagacuaaa

SEQ ID NO: 1547719 - RNA, 19 nt, Artificial Sequence
  Description of Artificial Sequence: Synthetic oligonucleotide
  Antisense strand to SEQ ID NO: 1547718
uuuagucugggagacgacg

SEQ ID NO: 1547720 - RNA, 19 nt, Artificial Sequence
  Description of Artificial Sequence: Synthetic oligonucleotide
  Sense strand starting at position 3132 of SEQ ID NO: 1245243
aagggaaagcgggauguuu

SEQ ID NO: 1547721 - RNA, 19 nt, Artificial Sequence
  Description of Artificial Sequence: Synthetic oligonucleotide
  Antisense strand to SEQ ID NO: 1547720
aaacaucccgcuuucccuu

SEQ ID NO: 1547722 - RNA, 19 nt, Artificial Sequence
  Description of Artificial Sequence: Synthetic oligonucleotide
  Sense strand starting at position 3490 of SEQ ID NO: 1245243
ugacgucacgggcagaauu

SEQ ID NO: 1547723 - RNA, 19 nt, Artificial Sequence
  Description of Artificial Sequence: Synthetic oligonucleotide
  Antisense strand to SEQ ID NO: 1547722
aauucugcccgugacguca

SEQ ID NO: 1547724 - RNA, 19 nt, Artificial Sequence
  Description of Artificial Sequence: Synthetic oligonucleotide
  Sense strand starting at position 3645 of SEQ ID NO: 1245243
caggguuuccauggagauu

SEQ ID NO: 1547725 - RNA, 19 nt, Artificial Sequence
  Description of Artificial Sequence: Synthetic oligonucleotide
  Antisense strand to SEQ ID NO: 1547724
aaucuccauggaaacccug

SEQ ID NO: 1547726 - RNA, 19 nt, Artificial Sequence
  Description of Artificial Sequence: Synthetic oligonucleotide
  Sense strand starting at position 3654 of SEQ ID NO: 1245243
cauggagauuccucugggu

SEQ ID NO: 1547727 - RNA, 19 nt, Artificial Sequence
  Description of Artificial Sequence: Synthetic oligonucleotide
  Antisense strand to SEQ ID NO: 1547726
acccagaggaaucuccaug

SEQ ID NO: 1547728 - RNA, 19 nt, Artificial Sequence
  Description of Artificial Sequence: Synthetic oligonucleotide
  Sense strand starting at position 3656 of SEQ ID NO: 1245243
uggagauuccucugggucu

SEQ ID NO: 1547729 - RNA, 19 nt, Artificial Sequence
  Description of Artificial Sequence: Synthetic oligonucleotide
  Antisense strand to SEQ ID NO: 1547728
agacccagaggaaucucca

SEQ ID NO: 1547730 - RNA, 19 nt, Artificial Sequence
  Description of Artificial Sequence: Synthetic oligonucleotide
  Sense strand starting at position 3725 of SEQ ID NO: 1245243
ugcuuauuggagcaacaaa

SEQ ID NO: 1547731 - RNA, 19 nt, Artificial Sequence
  Description of Artificial Sequence: Synthetic oligonucleotide
  Antisense strand to SEQ ID NO: 1547730
uuuguugcuccaauaagca

SEQ ID NO: 1547732 - RNA, 19 nt, Artificial Sequence
  Description of Artificial Sequence: Synthetic oligonucleotide
  Sense strand starting at position 3837 of SEQ ID NO: 1245243
ccgggugaauucucauuaa

SEQ ID NO: 1547733 - RNA, 19 nt, Artificial Sequence
  Description of Artificial Sequence: Synthetic oligonucleotide
  Antisense strand to SEQ ID NO: 1547732
uuaaugagaauucacccgg

SEQ ID NO: 1547734 - RNA, 19 nt, Artificial Sequence
  Description of Artificial Sequence: Synthetic oligonucleotide
  Sense strand starting at position 3840 of SEQ ID NO: 1245243
ggugaauucucauuaacuu

SEQ ID NO: 1547735 - RNA, 19 nt, Artificial Sequence
  Description of Artificial Sequence: Synthetic oligonucleotide
  Antisense strand to SEQ ID NO: 1547734
aaguuaaugagaauucacc

SEQ ID NO: 1547736 - RNA, 19 nt, Artificial Sequence
  Description of Artificial Sequence: Synthetic oligonucleotide
  Sense strand starting at position 3841 of SEQ ID NO: 1245243
gugaauucucauuaacuug

SEQ ID NO: 1547737 - RNA, 19 nt, Artificial Sequence
  Description of Artificial Sequence: Synthetic oligonucleotide
  Antisense strand to SEQ ID NO: 1547736
caaguuaaugagaauucac

SEQ ID NO: 1547738 - RNA, 19 nt, Artificial Sequence
  Description of Artificial Sequence: Synthetic oligonucleotide
  Sense strand starting at position 3859 of SEQ ID NO: 1245243
gcaagauuccugcaacaac

SEQ ID NO: 1547739 - RNA, 19 nt, Artificial Sequence
  Description of Artificial Sequence: Synthetic oligonucleotide
  Antisense strand to SEQ ID NO: 1547738
guuguugcaggaaucuugc

SEQ ID NO: 1547740 - RNA, 19 nt, Artificial Sequence
  Description of Artificial Sequence: Synthetic oligonucleotide
  Sense strand starting at position 193 of SEQ ID NO: 1245244
cuauaauucuaugucggga

SEQ ID NO: 1547741 - RNA, 19 nt, Artificial Sequence
  Description of Artificial Sequence: Synthetic oligonucleotide
  Antisense strand to SEQ ID NO: 1547740
ucccgacauagaauuauag

SEQ ID NO: 1547742 - RNA, 19 nt, Artificial Sequence
  Description of Artificial Sequence: Synthetic oligonucleotide
  Sense strand starting at position 201 of SEQ ID NO: 1245244
cuaugucgggagcaguaua

SEQ ID NO: 1547743 - RNA, 19 nt, Artificial Sequence
  Description of Artificial Sequence: Synthetic oligonucleotide
  Antisense strand to SEQ ID NO: 1547742
uauacugcucccgacauag

SEQ ID NO: 1547744 - RNA, 19 nt, Artificial Sequence
  Description of Artificial Sequence: Synthetic oligonucleotide
  Sense strand starting at position 421 of SEQ ID NO: 1245244
guugucacucuauacuaga

SEQ ID NO: 1547745 - RNA, 19 nt, Artificial Sequence
  Description of Artificial Sequence: Synthetic oligonucleotide
  Antisense strand to SEQ ID NO: 1547744
ucuaguauagagugacaac

SEQ ID NO: 1547746 - RNA, 19 nt, Artificial Sequence
  Description of Artificial Sequence: Synthetic oligonucleotide
  Sense strand starting at position 435 of SEQ ID NO: 1245244
cuagaugucuuagcaguaa

SEQ ID NO: 1547747 - RNA, 19 nt, Artificial Sequence
  Description of Artificial Sequence: Synthetic oligonucleotide
  Antisense strand to SEQ ID NO: 1547746
uuacugcuaagacaucuag

SEQ ID NO: 1547748 - RNA, 19 nt, Artificial Sequence
  Description of Artificial Sequence: Synthetic oligonucleotide
  Sense strand starting at position 439 of SEQ ID NO: 1245244
augucuuagcaguaauucu

SEQ ID NO: 1547749 - RNA, 19 nt, Artificial Sequence
  Description of Artificial Sequence: Synthetic oligonucleotide
  Antisense strand to SEQ ID NO: 1547748
agaauuacugcuaagacau

SEQ ID NO: 1547750 - RNA, 19 nt, Artificial Sequence
  Description of Artificial Sequence: Synthetic oligonucleotide
  Sense strand starting at position 447 of SEQ ID NO: 1245244
gcaguaauucuuuagcuau

SEQ ID NO: 1547751 - RNA, 19 nt, Artificial Sequence
  Description of Artificial Sequence: Synthetic oligonucleotide
  Antisense strand to SEQ ID NO: 1547750
auagcuaaagaauuacugc

SEQ ID NO: 1547752 - RNA, 19 nt, Artificial Sequence
  Description of Artificial Sequence: Synthetic oligonucleotide
  Sense strand starting at position 497 of SEQ ID NO: 1245244
auaugaaugcgugaaugcu

SEQ ID NO: 1547753 - RNA, 19 nt, Artificial Sequence
  Description of Artificial Sequence: Synthetic oligonucleotide
  Antisense strand to SEQ ID NO: 1547752
agcauucacgcauucauau

SEQ ID NO: 1547754 - RNA, 19 nt, Artificial Sequence
  Description of Artificial Sequence: Synthetic oligonucleotide
  Sense strand starting at position 650 of SEQ ID NO: 1245244
guauaaacucauuguacca

SEQ ID NO: 1547755 - RNA, 19 nt, Artificial Sequence
  Description of Artificial Sequence: Synthetic oligonucleotide
  Antisense strand to SEQ ID NO: 1547754
ugguacaaugaguuuauac

SEQ ID NO: 1547756 - RNA, 19 nt, Artificial Sequence
  Description of Artificial Sequence: Synthetic oligonucleotide
  Sense strand starting at position 664 of SEQ ID NO: 1245244
uaccaauauccacgugaag

SEQ ID NO: 1547757 - RNA, 19 nt, Artificial Sequence
  Description of Artificial Sequence: Synthetic oligonucleotide
  Antisense strand to SEQ ID NO: 1547756
cuucacguggauauuggua

SEQ ID NO: 1547758 - RNA, 19 nt, Artificial Sequence
  Description of Artificial Sequence: Synthetic oligonucleotide
  Sense strand starting at position 667 of SEQ ID NO: 1245244
caauauccacgugaagcua

SEQ ID NO: 1547759 - RNA, 19 nt, Artificial Sequence
  Description of Artificial Sequence: Synthetic oligonucleotide
  Antisense strand to SEQ ID NO: 1547758
uagcuucacguggauauug

SEQ ID NO: 1547760 - RNA, 19 nt, Artificial Sequence
  Description of Artificial Sequence: Synthetic oligonucleotide
  Sense strand starting at position 693 of SEQ ID NO: 1245244
guuagagggaccuaaguuu

SEQ ID NO: 1547761 - RNA, 19 nt, Artificial Sequence
  Description of Artificial Sequence: Synthetic oligonucleotide
  Antisense strand to SEQ ID NO: 1547760
aaacuuaggucccucuaac

SEQ ID NO: 1547762 - RNA, 19 nt, Artificial Sequence
  Description of Artificial Sequence: Synthetic oligonucleotide
  Sense strand starting at position 744 of SEQ ID NO: 1245244
cuaacaguguuucuuuaaa

SEQ ID NO: 1547763 - RNA, 19 nt, Artificial Sequence
  Description of Artificial Sequence: Synthetic oligonucleotide
  Antisense strand to SEQ ID NO: 1547762
uuuaaagaaacacuguuag

SEQ ID NO: 1547764 - RNA, 19 nt, Artificial Sequence
  Description of Artificial Sequence: Synthetic oligonucleotide
  Sense strand starting at position 961 of SEQ ID NO: 1245244
cuggcucauccagauguaa

SEQ ID NO: 1547765 - RNA, 19 nt, Artificial Sequence
  Description of Artificial Sequence: Synthetic oligonucleotide
  Antisense strand to SEQ ID NO: 1547764
uuacaucuggaugagccag

SEQ ID NO: 1547766 - RNA, 19 nt, Artificial Sequence
  Description of Artificial Sequence: Synthetic oligonucleotide
  Sense strand starting at position 976 of SEQ ID NO: 1245244
guaaauaaaccucaguucu

SEQ ID NO: 1547767 - RNA, 19 nt, Artificial Sequence
  Description of Artificial Sequence: Synthetic oligonucleotide
  Antisense strand to SEQ ID NO: 1547766
agaacugagguuuauuuac

SEQ ID NO: 1547768 - RNA, 19 nt, Artificial Sequence
  Description of Artificial Sequence: Synthetic oligonucleotide
  Sense strand starting at position 1044 of SEQ ID NO: 1245244
ucaccauugucuuuaguag

SEQ ID NO: 1547769 - RNA, 19 nt, Artificial Sequence
  Description of Artificial Sequence: Synthetic oligonucleotide
  Antisense strand to SEQ ID NO: 1547768
cuacuaaagacaaugguga

SEQ ID NO: 1547770 - RNA, 19 nt, Artificial Sequence
  Description of Artificial Sequence: Synthetic oligonucleotide
  Sense strand starting at position 1045 of SEQ ID NO: 1245244
caccauugucuuuaguagu

SEQ ID NO: 1547771 - RNA, 19 nt, Artificial Sequence
  Description of Artificial Sequence: Synthetic oligonucleotide
  Antisense strand to SEQ ID NO: 1547770
acuacuaaagacaauggug

SEQ ID NO: 1547772 - RNA, 19 nt, Artificial Sequence
  Description of Artificial Sequence: Synthetic oligonucleotide
  Sense strand starting at position 1401 of SEQ ID NO: 1245244
ucuagcauccuccaggaau

SEQ ID NO: 1547773 - RNA, 19 nt, Artificial Sequence
  Description of Artificial Sequence: Synthetic oligonucleotide
  Antisense strand to SEQ ID NO: 1547772
auuccuggaggaugcuaga

SEQ ID NO: 1547774 - RNA, 19 nt, Artificial Sequence
  Description of Artificial Sequence: Synthetic oligonucleotide
  Sense strand starting at position 1415 of SEQ ID NO: 1245244
ggaauacugcaccgggaaa

SEQ ID NO: 1547775 - RNA, 19 nt, Artificial Sequence
  Description of Artificial Sequence: Synthetic oligonucleotide
  Antisense strand to SEQ ID NO: 1547774
uuucccggugcaguauucc

SEQ ID NO: 1547776 - RNA, 19 nt, Artificial Sequence
  Description of Artificial Sequence: Synthetic oligonucleotide
  Sense strand starting at position 1552 of SEQ ID NO: 1245244
uggcaugaugcagaaaggu

SEQ ID NO: 1547777 - RNA, 19 nt, Artificial Sequence
  Description of Artificial Sequence: Synthetic oligonucleotide
  Antisense strand to SEQ ID NO: 1547776
accuuucugcaucaugcca

SEQ ID NO: 1547778 - RNA, 19 nt, Artificial Sequence
  Description of Artificial Sequence: Synthetic oligonucleotide
  Sense strand starting at position 1565 of SEQ ID NO: 1245244
aaaggucuccugcaucaga

SEQ ID NO: 1547779 - RNA, 19 nt, Artificial Sequence
  Description of Artificial Sequence: Synthetic oligonucleotide
  Antisense strand to SEQ ID NO: 1547778
ucugaugcaggagaccuuu

SEQ ID NO: 1547780 - RNA, 19 nt, Artificial Sequence
  Description of Artificial Sequence: Synthetic oligonucleotide
  Sense strand starting at position 1730 of SEQ ID NO: 1245244
gagcuuuguggccaugaga

SEQ ID NO: 1547781 - RNA, 19 nt, Artificial Sequence
  Description of Artificial Sequence: Synthetic oligonucleotide
  Antisense strand to SEQ ID NO: 1547780
ucucauggccacaaagcuc

SEQ ID NO: 1547782 - RNA, 19 nt, Artificial Sequence
  Description of Artificial Sequence: Synthetic oligonucleotide
  Sense strand starting at position 1733 of SEQ ID NO: 1245244
cuuuguggccaugagacua

SEQ ID NO: 1547783 - RNA, 19 nt, Artificial Sequence
  Description of Artificial Sequence: Synthetic oligonucleotide
  Antisense strand to SEQ ID NO: 1547782
uagucucauggccacaaag

SEQ ID NO: 1547784 - RNA, 19 nt, Artificial Sequence
  Description of Artificial Sequence: Synthetic oligonucleotide
  Sense strand starting at position 1834 of SEQ ID NO: 1245244
ugcggcuuuauuuguggaa

SEQ ID NO: 1547785 - RNA, 19 nt, Artificial Sequence
  Description of Artificial Sequence: Synthetic oligonucleotide
  Antisense strand to SEQ ID NO: 1547784
uuccacaaauaaagccgca

SEQ ID NO: 1547786 - RNA, 19 nt, Artificial Sequence
  Description of Artificial Sequence: Synthetic oligonucleotide
  Sense strand starting at position 1930 of SEQ ID NO: 1245244
caacgaucucugggaguga

SEQ ID NO: 1547787 - RNA, 19 nt, Artificial Sequence
  Description of Artificial Sequence: Synthetic oligonucleotide
  Antisense strand to SEQ ID NO: 1547786
ucacucccagagaucguug

SEQ ID NO: 1547788 - RNA, 19 nt, Artificial Sequence
  Description of Artificial Sequence: Synthetic oligonucleotide
  Sense strand starting at position 1934 of SEQ ID NO: 1245244
gaucucugggagugaucga

SEQ ID NO: 1547789 - RNA, 19 nt, Artificial Sequence
  Description of Artificial Sequence: Synthetic oligonucleotide
  Antisense strand to SEQ ID NO: 1547788
ucgaucacucccagagauc

SEQ ID NO: 1547790 - RNA, 19 nt, Artificial Sequence
  Description of Artificial Sequence: Synthetic oligonucleotide
  Sense strand starting at position 1939 of SEQ ID NO: 1245244
cugggagugaucgaggcau

SEQ ID NO: 1547791 - RNA, 19 nt, Artificial Sequence
  Description of Artificial Sequence: Synthetic oligonucleotide
  Antisense strand to SEQ ID NO: 1547790
augccucgaucacucccag

SEQ ID NO: 1547792 - RNA, 19 nt, Artificial Sequence
  Description of Artificial Sequence: Synthetic oligonucleotide
  Sense strand starting at position 1941 of SEQ ID NO: 1245244
gggagugaucgaggcauuc

SEQ ID NO: 1547793 - RNA, 19 nt, Artificial Sequence
  Description of Artificial Sequence: Synthetic oligonucleotide
  Antisense strand to SEQ ID NO: 1547792
gaaugccucgaucacuccc

SEQ ID NO: 1547794 - RNA, 19 nt, Artificial Sequence
  Description of Artificial Sequence: Synthetic oligonucleotide
  Sense strand starting at position 2053 of SEQ ID NO: 1245244
gcuuuaugccaauaaggag

SEQ ID NO: 1547795 - RNA, 19 nt, Artificial Sequence
  Description of Artificial Sequence: Synthetic oligonucleotide
  Antisense strand to SEQ ID NO: 1547794
cuccuuauuggcauaaagc

SEQ ID NO: 1547796 - RNA, 19 nt, Artificial Sequence
  Description of Artificial Sequence: Synthetic oligonucleotide
  Sense strand starting at position 2672 of SEQ ID NO: 1245244
ggacgauccguucguauuu

SEQ ID NO: 1547797 - RNA, 19 nt, Artificial Sequence
  Description of Artificial Sequence: Synthetic oligonucleotide
  Antisense strand to SEQ ID NO: 1547796
aaauacgaacggaucgucc

SEQ ID NO: 1547798 - RNA, 19 nt, Artificial Sequence
  Description of Artificial Sequence: Synthetic oligonucleotide
  Sense strand starting at position 2836 of SEQ ID NO: 1245244
ucacccuaggcucaugaaa

SEQ ID NO: 1547799 - RNA, 19 nt, Artificial Sequence
  Description of Artificial Sequence: Synthetic oligonucleotide
  Antisense strand to SEQ ID NO: 1547798
uuucaugagccuaggguga

SEQ ID NO: 1547800 - RNA, 19 nt, Artificial Sequence
  Description of Artificial Sequence: Synthetic oligonucleotide
  Sense strand starting at position 3043 of SEQ ID NO: 1245244
gcggucggucucuuuaaua

SEQ ID NO: 1547801 - RNA, 19 nt, Artificial Sequence
  Description of Artificial Sequence: Synthetic oligonucleotide
  Antisense strand to SEQ ID NO: 1547800
uauuaaagagaccgaccgc

SEQ ID NO: 1547802 - RNA, 19 nt, Artificial Sequence
  Description of Artificial Sequence: Synthetic oligonucleotide
  Sense strand starting at position 3126 of SEQ ID NO: 1245244
aucccauuccuugguuuau

SEQ ID NO: 1547803 - RNA, 19 nt, Artificial Sequence
  Description of Artificial Sequence: Synthetic oligonucleotide
  Antisense strand to SEQ ID NO: 1547802
auaaaccaaggaaugggau

SEQ ID NO: 1547804 - RNA, 19 nt, Artificial Sequence
  Description of Artificial Sequence: Synthetic oligonucleotide
  Sense strand starting at position 3421 of SEQ ID NO: 1245244
aagagaaaguucuuaccug

SEQ ID NO: 1547805 - RNA, 19 nt, Artificial Sequence
  Description of Artificial Sequence: Synthetic oligonucleotide
  Antisense strand to SEQ ID NO: 1547804
cagguaagaacuuucucuu

SEQ ID NO: 1547806 - RNA, 19 nt, Artificial Sequence
  Description of Artificial Sequence: Synthetic oligonucleotide
  Sense strand starting at position 3584 of SEQ ID NO: 1245244
uuagcaaagcauugaugga

SEQ ID NO: 1547807 - RNA, 19 nt, Artificial Sequence
  Description of Artificial Sequence: Synthetic oligonucleotide
  Antisense strand to SEQ ID NO: 1547806
uccaucaaugcuuugcuaa

SEQ ID NO: 1547808 - RNA, 19 nt, Artificial Sequence
  Description of Artificial Sequence: Synthetic oligonucleotide
  Sense strand starting at position 3588 of SEQ ID NO: 1245244
caaagcauugauggagauu

SEQ ID NO: 1547809 - RNA, 19 nt, Artificial Sequence
  Description of Artificial Sequence: Synthetic oligonucleotide
  Antisense strand to SEQ ID NO: 1547808
aaucuccaucaaugcuuug

SEQ ID NO: 1547810 - RNA, 19 nt, Artificial Sequence
  Description of Artificial Sequence: Synthetic oligonucleotide
  Sense strand starting at position 3609 of SEQ ID NO: 1245244
gccauaguucuacaggaua

SEQ ID NO: 1547811 - RNA, 19 nt, Artificial Sequence
  Description of Artificial Sequence: Synthetic oligonucleotide
  Antisense strand to SEQ ID NO: 1547810
uauccuguagaacuauggc

SEQ ID NO: 1547812 - RNA, 19 nt, Artificial Sequence
  Description of Artificial Sequence: Synthetic oligonucleotide
  Sense strand starting at position 3771 of SEQ ID NO: 1245244
uuaggauacagaugcuuga

SEQ ID NO: 1547813 - RNA, 19 nt, Artificial Sequence
  Description of Artificial Sequence: Synthetic oligonucleotide
  Antisense strand to SEQ ID NO: 1547812
ucaagcaucuguauccuaa

SEQ ID NO: 1547814 - RNA, 19 nt, Artificial Sequence
  Description of Artificial Sequence: Synthetic oligonucleotide
  Sense strand starting at position 3924 of SEQ ID NO: 1245244
ugaguagccaaauaugagu

SEQ ID NO: 1547815 - RNA, 19 nt, Artificial Sequence
  Description of Artificial Sequence: Synthetic oligonucleotide
  Antisense strand to SEQ ID NO: 1547814
acucauauuuggcuacuca

SEQ ID NO: 1547816 - RNA, 19 nt, Artificial Sequence
  Description of Artificial Sequence: Synthetic oligonucleotide
  Sense strand starting at position 3933 of SEQ ID NO: 1245244
aaauaugaguuccucugga

SEQ ID NO: 1547817 - RNA, 19 nt, Artificial Sequence
  Description of Artificial Sequence: Synthetic oligonucleotide
  Antisense strand to SEQ ID NO: 1547816
uccagaggaacucauauuu

SEQ ID NO: 1547818 - RNA, 19 nt, Artificial Sequence
  Description of Artificial Sequence: Synthetic oligonucleotide
  Sense strand starting at position 3938 of SEQ ID NO: 1245244
ugaguuccucuggacuauu

SEQ ID NO: 1547819 - RNA, 19 nt, Artificial Sequence
  Description of Artificial Sequence: Synthetic oligonucleotide
  Antisense strand to SEQ ID NO: 1547818
aauaguccagaggaacuca

SEQ ID NO: 1547820 - RNA, 19 nt, Artificial Sequence
  Description of Artificial Sequence: Synthetic oligonucleotide
  Sense strand starting at position 42 of SEQ ID NO: 1245245
cugcuaucucaauaaaugg

SEQ ID NO: 1547821 - RNA, 19 nt, Artificial Sequence
  Description of Artificial Sequence: Synthetic oligonucleotide
  Antisense strand to SEQ ID NO: 1547820
ccauuuauugagauagcag

SEQ ID NO: 1547822 - RNA, 19 nt, Artificial Sequence
  Description of Artificial Sequence: Synthetic oligonucleotide
  Sense strand starting at position 160 of SEQ ID NO: 1245245
gaaauaaagucauugguuu

SEQ ID NO: 1547823 - RNA, 19 nt, Artificial Sequence
  Description of Artificial Sequence: Synthetic oligonucleotide
  Antisense strand to SEQ ID NO: 1547822
aaaccaaugacuuuauuuc

SEQ ID NO: 1547824 - RNA, 19 nt, Artificial Sequence
  Description of Artificial Sequence: Synthetic oligonucleotide
  Sense strand starting at position 400 of SEQ ID NO: 1245245
ccagguucugcauaguuac

SEQ ID NO: 1547825 - RNA, 19 nt, Artificial Sequence
  Description of Artificial Sequence: Synthetic oligonucleotide
  Antisense strand to SEQ ID NO: 1547824
guaacuaugcagaaccugg

SEQ ID NO: 1547826 - RNA, 19 nt, Artificial Sequence
  Description of Artificial Sequence: Synthetic oligonucleotide
  Sense strand starting at position 528 of SEQ ID NO: 1245245
gaccaauggucucuucuag

SEQ ID NO: 1547827 - RNA, 19 nt, Artificial Sequence
  Description of Artificial Sequence: Synthetic oligonucleotide
  Antisense strand to SEQ ID NO: 1547826
cuagaagagaccauugguc

SEQ ID NO: 1547828 - RNA, 19 nt, Artificial Sequence
  Description of Artificial Sequence: Synthetic oligonucleotide
  Sense strand starting at position 609 of SEQ ID NO: 1245245
aagucugucuauucugaga

SEQ ID NO: 1547829 - RNA, 19 nt, Artificial Sequence
  Description of Artificial Sequence: Synthetic oligonucleotide
  Antisense strand to SEQ ID NO: 1547828
ucucagaauagacagacuu

SEQ ID NO: 1547830 - RNA, 19 nt, Artificial Sequence
  Description of Artificial Sequence: Synthetic oligonucleotide
  Sense strand starting at position 675 of SEQ ID NO: 1245245
uagcuauauuuagcguaga

SEQ ID NO: 1547831 - RNA, 19 nt, Artificial Sequence
  Description of Artificial Sequence: Synthetic oligonucleotide
  Antisense strand to SEQ ID NO: 1547830
ucuacgcuaaauauagcua

SEQ ID NO: 1547832 - RNA, 19 nt, Artificial Sequence
  Description of Artificial Sequence: Synthetic oligonucleotide
  Sense strand starting at position 694 of SEQ ID NO: 1245245
cuguaauguuauuuguagu

SEQ ID NO: 1547833 - RNA, 19 nt, Artificial Sequence
  Description of Artificial Sequence: Synthetic oligonucleotide
  Antisense strand to SEQ ID NO: 1547832
acuacaaauaacauuacag

SEQ ID NO: 1547834 - RNA, 19 nt, Artificial Sequence
  Description of Artificial Sequence: Synthetic oligonucleotide
  Sense strand starting at position 702 of SEQ ID NO: 1245245
uuauuuguaguguguagua

SEQ ID NO: 1547835 - RNA, 19 nt, Artificial Sequence
  Description of Artificial Sequence: Synthetic oligonucleotide
  Antisense strand to SEQ ID NO: 1547834
uacuacacacuacaaauaa

SEQ ID NO: 1547836 - RNA, 19 nt, Artificial Sequence
  Description of Artificial Sequence: Synthetic oligonucleotide
  Sense strand starting at position 704 of SEQ ID NO: 1245245
auuuguaguguguaguaca

SEQ ID NO: 1547837 - RNA, 19 nt, Artificial Sequence
  Description of Artificial Sequence: Synthetic oligonucleotide
  Antisense strand to SEQ ID NO: 1547836
uguacuacacacuacaaau

SEQ ID NO: 1547838 - RNA, 19 nt, Artificial Sequence
  Description of Artificial Sequence: Synthetic oligonucleotide
  Sense strand starting at position 813 of SEQ ID NO: 1245245
ucauguaucacggauguag

SEQ ID NO: 1547839 - RNA, 19 nt, Artificial Sequence
  Description of Artificial Sequence: Synthetic oligonucleotide
  Antisense strand to SEQ ID NO: 1547838
cuacauccgugauacauga

SEQ ID NO: 1547840 - RNA, 19 nt, Artificial Sequence
  Description of Artificial Sequence: Synthetic oligonucleotide
  Sense strand starting at position 822 of SEQ ID NO: 1245245
acggauguagccugauaca

SEQ ID NO: 1547841 - RNA, 19 nt, Artificial Sequence
  Description of Artificial Sequence: Synthetic oligonucleotide
  Antisense strand to SEQ ID NO: 1547840
uguaucaggcuacauccgu

SEQ ID NO: 1547842 - RNA, 19 nt, Artificial Sequence
  Description of Artificial Sequence: Synthetic oligonucleotide
  Sense strand starting at position 884 of SEQ ID NO: 1245245
gggaauacccauugauagu

SEQ ID NO: 1547843 - RNA, 19 nt, Artificial Sequence
  Description of Artificial Sequence: Synthetic oligonucleotide
  Antisense strand to SEQ ID NO: 1547842
acuaucaauggguauuccc

SEQ ID NO: 1547844 - RNA, 19 nt, Artificial Sequence
  Description of Artificial Sequence: Synthetic oligonucleotide
  Sense strand starting at position 1122 of SEQ ID NO: 1245245
ggaacuguguaagcacaaa

SEQ ID NO: 1547845 - RNA, 19 nt, Artificial Sequence
  Description of Artificial Sequence: Synthetic oligonucleotide
  Antisense strand to SEQ ID NO: 1547844
uuugugcuuacacaguucc

SEQ ID NO: 1547846 - RNA, 19 nt, Artificial Sequence
  Description of Artificial Sequence: Synthetic oligonucleotide
  Sense strand starting at position 1528 of SEQ ID NO: 1245245
gguuuaaaugcacaacaau

SEQ ID NO: 1547847 - RNA, 19 nt, Artificial Sequence
  Description of Artificial Sequence: Synthetic oligonucleotide
  Antisense strand to SEQ ID NO: 1547846
auuguugugcauuuaaacc

SEQ ID NO: 1547848 - RNA, 19 nt, Artificial Sequence
  Description of Artificial Sequence: Synthetic oligonucleotide
  Sense strand starting at position 1794 of SEQ ID NO: 1245245
ucaauauucuacucuggag

SEQ ID NO: 1547849 - RNA, 19 nt, Artificial Sequence
  Description of Artificial Sequence: Synthetic oligonucleotide
  Antisense strand to SEQ ID NO: 1547848
cuccagaguagaauauuga

SEQ ID NO: 1547850 - RNA, 19 nt, Artificial Sequence
  Description of Artificial Sequence: Synthetic oligonucleotide
  Sense strand starting at position 1814 of SEQ ID NO: 1245245
agcugacacuuacugugaa

SEQ ID NO: 1547851 - RNA, 19 nt, Artificial Sequence
  Description of Artificial Sequence: Synthetic oligonucleotide
  Antisense strand to SEQ ID NO: 1547850
uucacaguaagugucagcu

SEQ ID NO: 1547852 - RNA, 19 nt, Artificial Sequence
  Description of Artificial Sequence: Synthetic oligonucleotide
  Sense strand starting at position 1817 of SEQ ID NO: 1245245
ugacacuuacugugaauuc

SEQ ID NO: 1547853 - RNA, 19 nt, Artificial Sequence
  Description of Artificial Sequence: Synthetic oligonucleotide
  Antisense strand to SEQ ID NO: 1547852
gaauucacaguaaguguca

SEQ ID NO: 1547854 - RNA, 19 nt, Artificial Sequence
  Description of Artificial Sequence: Synthetic oligonucleotide
  Sense strand starting at position 1846 of SEQ ID NO: 1245245
cuuaaauaccaaugucugu

SEQ ID NO: 1547855 - RNA, 19 nt, Artificial Sequence
  Description of Artificial Sequence: Synthetic oligonucleotide
  Antisense strand to SEQ ID NO: 1547854
acagacauugguauuuaag

SEQ ID NO: 1547856 - RNA, 19 nt, Artificial Sequence
  Description of Artificial Sequence: Synthetic oligonucleotide
  Sense strand starting at position 1936 of SEQ ID NO: 1245245
cagggauuagucugacuuc

SEQ ID NO: 1547857 - RNA, 19 nt, Artificial Sequence
  Description of Artificial Sequence: Synthetic oligonucleotide
  Antisense strand to SEQ ID NO: 1547856
gaagucagacuaaucccug

SEQ ID NO: 1547858 - RNA, 19 nt, Artificial Sequence
  Description of Artificial Sequence: Synthetic oligonucleotide
  Sense strand starting at position 2113 of SEQ ID NO: 1245245
gggcuccuuccuugaggau

SEQ ID NO: 1547859 - RNA, 19 nt, Artificial Sequence
  Description of Artificial Sequence: Synthetic oligonucleotide
  Antisense strand to SEQ ID NO: 1547858
auccucaaggaaggagccc

SEQ ID NO: 1547860 - RNA, 19 nt, Artificial Sequence
  Description of Artificial Sequence: Synthetic oligonucleotide
  Sense strand starting at position 2114 of SEQ ID NO: 1245245
ggcuccuuccuugaggauu

SEQ ID NO: 1547861 - RNA, 19 nt, Artificial Sequence
  Description of Artificial Sequence: Synthetic oligonucleotide
  Antisense strand to SEQ ID NO: 1547860
aauccucaaggaaggagcc

SEQ ID NO: 1547862 - RNA, 19 nt, Artificial Sequence
  Description of Artificial Sequence: Synthetic oligonucleotide
  Sense strand starting at position 2156 of SEQ ID NO: 1245245
cagacuggguuguugauua

SEQ ID NO: 1547863 - RNA, 19 nt, Artificial Sequence
  Description of Artificial Sequence: Synthetic oligonucleotide
  Antisense strand to SEQ ID NO: 1547862
uaaucaacaacccagucug

SEQ ID NO: 1547864 - RNA, 19 nt, Artificial Sequence
  Description of Artificial Sequence: Synthetic oligonucleotide
  Sense strand starting at position 2366 of SEQ ID NO: 1245245
ugaguugagaauggcacua

SEQ ID NO: 1547865 - RNA, 19 nt, Artificial Sequence
  Description of Artificial Sequence: Synthetic oligonucleotide
  Antisense strand to SEQ ID NO: 1547864
uagugccauucucaacuca

SEQ ID NO: 1547866 - RNA, 19 nt, Artificial Sequence
  Description of Artificial Sequence: Synthetic oligonucleotide
  Sense strand starting at position 2411 of SEQ ID NO: 1245245
guuuguauaucaucaccau

SEQ ID NO: 1547867 - RNA, 19 nt, Artificial Sequence
  Description of Artificial Sequence: Synthetic oligonucleotide
  Antisense strand to SEQ ID NO: 1547866
auggugaugauauacaaac

SEQ ID NO: 1547868 - RNA, 19 nt, Artificial Sequence
  Description of Artificial Sequence: Synthetic oligonucleotide
  Sense strand starting at position 2414 of SEQ ID NO: 1245245
uguauaucaucaccauugu

SEQ ID NO: 1547869 - RNA, 19 nt, Artificial Sequence
  Description of Artificial Sequence: Synthetic oligonucleotide
  Antisense strand to SEQ ID NO: 1547868
acaauggugaugauauaca

SEQ ID NO: 1547870 - RNA, 19 nt, Artificial Sequence
  Description of Artificial Sequence: Synthetic oligonucleotide
  Sense strand starting at position 2415 of SEQ ID NO: 1245245
guauaucaucaccauugua

SEQ ID NO: 1547871 - RNA, 19 nt, Artificial Sequence
  Description of Artificial Sequence: Synthetic oligonucleotide
  Antisense strand to SEQ ID NO: 1547870
uacaauggugaugauauac

SEQ ID NO: 1547872 - RNA, 19 nt, Artificial Sequence
  Description of Artificial Sequence: Synthetic oligonucleotide
  Sense strand starting at position 2429 of SEQ ID NO: 1245245
uuguaucaacuugaagguu

SEQ ID NO: 1547873 - RNA, 19 nt, Artificial Sequence
  Description of Artificial Sequence: Synthetic oligonucleotide
  Antisense strand to SEQ ID NO: 1547872
aaccuucaaguugauacaa

SEQ ID NO: 1547874 - RNA, 19 nt, Artificial Sequence
  Description of Artificial Sequence: Synthetic oligonucleotide
  Sense strand starting at position 2432 of SEQ ID NO: 1245245
uaucaacuugaagguuaga

SEQ ID NO: 1547875 - RNA, 19 nt, Artificial Sequence
  Description of Artificial Sequence: Synthetic oligonucleotide
  Antisense strand to SEQ ID NO: 1547874
ucuaaccuucaaguugaua

SEQ ID NO: 1547876 - RNA, 19 nt, Artificial Sequence
  Description of Artificial Sequence: Synthetic oligonucleotide
  Sense strand starting at position 2706 of SEQ ID NO: 1245245
aguaucaagccacauugua

SEQ ID NO: 1547877 - RNA, 19 nt, Artificial Sequence
  Description of Artificial Sequence: Synthetic oligonucleotide
  Antisense strand to SEQ ID NO: 1547876
uacaauguggcuugauacu

SEQ ID NO: 1547878 - RNA, 19 nt, Artificial Sequence
  Description of Artificial Sequence: Synthetic oligonucleotide
  Sense strand starting at position 2817 of SEQ ID NO: 1245245
gauaguauacuguaauagu

SEQ ID NO: 1547879 - RNA, 19 nt, Artificial Sequence
  Description of Artificial Sequence: Synthetic oligonucleotide
  Antisense strand to SEQ ID NO: 1547878
acuauuacaguauacuauc

SEQ ID NO: 1547880 - RNA, 19 nt, Artificial Sequence
  Description of Artificial Sequence: Synthetic oligonucleotide
  Sense strand starting at position 3070 of SEQ ID NO: 1245245
uuauguuaggagcaucuau

SEQ ID NO: 1547881 - RNA, 19 nt, Artificial Sequence
  Description of Artificial Sequence: Synthetic oligonucleotide
  Antisense strand to SEQ ID NO: 1547880
auagaugcuccuaacauaa

SEQ ID NO: 1547882 - RNA, 19 nt, Artificial Sequence
  Description of Artificial Sequence: Synthetic oligonucleotide
  Sense strand starting at position 3215 of SEQ ID NO: 1245245
gucacucagaggugugaga

SEQ ID NO: 1547883 - RNA, 19 nt, Artificial Sequence
  Description of Artificial Sequence: Synthetic oligonucleotide
  Antisense strand to SEQ ID NO: 1547882
ucucacaccucugagugac

SEQ ID NO: 1547884 - RNA, 19 nt, Artificial Sequence
  Description of Artificial Sequence: Synthetic oligonucleotide
  Sense strand starting at position 3217 of SEQ ID NO: 1245245
cacucagaggugugagaau

SEQ ID NO: 1547885 - RNA, 19 nt, Artificial Sequence
  Description of Artificial Sequence: Synthetic oligonucleotide
  Antisense strand to SEQ ID NO: 1547884
auucucacaccucugagug

SEQ ID NO: 1547886 - RNA, 19 nt, Artificial Sequence
  Description of Artificial Sequence: Synthetic oligonucleotide
  Sense strand starting at position 3234 of SEQ ID NO: 1245245
aucuauauguuagucagau

SEQ ID NO: 1547887 - RNA, 19 nt, Artificial Sequence
  Description of Artificial Sequence: Synthetic oligonucleotide
  Antisense strand to SEQ ID NO: 1547886
aucugacuaacauauagau

SEQ ID NO: 1547888 - RNA, 19 nt, Artificial Sequence
  Description of Artificial Sequence: Synthetic oligonucleotide
  Sense strand starting at position 3235 of SEQ ID NO: 1245245
ucuauauguuagucagauu

SEQ ID NO: 1547889 - RNA, 19 nt, Artificial Sequence
  Description of Artificial Sequence: Synthetic oligonucleotide
  Antisense strand to SEQ ID NO: 1547888
aaucugacuaacauauaga

SEQ ID NO: 1547890 - RNA, 19 nt, Artificial Sequence
  Description of Artificial Sequence: Synthetic oligonucleotide
  Sense strand starting at position 3364 of SEQ ID NO: 1245245
gcacauaaugcauguauuu

SEQ ID NO: 1547891 - RNA, 19 nt, Artificial Sequence
  Description of Artificial Sequence: Synthetic oligonucleotide
  Antisense strand to SEQ ID NO: 1547890
aaauacaugcauuaugugc

SEQ ID NO: 1547892 - RNA, 19 nt, Artificial Sequence
  Description of Artificial Sequence: Synthetic oligonucleotide
  Sense strand starting at position 3571 of SEQ ID NO: 1245245
cagagcuugcucugaagau

SEQ ID NO: 1547893 - RNA, 19 nt, Artificial Sequence
  Description of Artificial Sequence: Synthetic oligonucleotide
  Antisense strand to SEQ ID NO: 1547892
aucuucagagcaagcucug

SEQ ID NO: 1547894 - RNA, 19 nt, Artificial Sequence
  Description of Artificial Sequence: Synthetic oligonucleotide
  Sense strand starting at position 3906 of SEQ ID NO: 1245245
agacaauauuguuuguaga

SEQ ID NO: 1547895 - RNA, 19 nt, Artificial Sequence
  Description of Artificial Sequence: Synthetic oligonucleotide
  Antisense strand to SEQ ID NO: 1547894
ucuacaaacaauauugucu

SEQ ID NO: 1547896 - RNA, 19 nt, Artificial Sequence
  Description of Artificial Sequence: Synthetic oligonucleotide
  Sense strand starting at position 3907 of SEQ ID NO: 1245245
gacaauauuguuuguagaa

SEQ ID NO: 1547897 - RNA, 19 nt, Artificial Sequence
  Description of Artificial Sequence: Synthetic oligonucleotide
  Antisense strand to SEQ ID NO: 1547896
uucuacaaacaauauuguc

SEQ ID NO: 1547898 - RNA, 19 nt, Artificial Sequence
  Description of Artificial Sequence: Synthetic oligonucleotide
  Sense strand starting at position 3960 of SEQ ID NO: 1245245
aacuuagauuuggauguua

SEQ ID NO: 1547899 - RNA, 19 nt, Artificial Sequence
  Description of Artificial Sequence: Synthetic oligonucleotide
  Antisense strand to SEQ ID NO: 1547898
uaacauccaaaucuaaguu

SEQ ID NO: 1547900 - RNA, 19 nt, Artificial Sequence
  Description of Artificial Sequence: Synthetic oligonucleotide
  Sense strand starting at position 291 of SEQ ID NO: 1245246
aggaguggugcucacaaua

SEQ ID NO: 1547901 - RNA, 19 nt, Artificial Sequence
  Description of Artificial Sequence: Synthetic oligonucleotide
  Antisense strand to SEQ ID NO: 1547900
uauugugagcaccacuccu

SEQ ID NO: 1547902 - RNA, 19 nt, Artificial Sequence
  Description of Artificial Sequence: Synthetic oligonucleotide
  Sense strand starting at position 492 of SEQ ID NO: 1245246
uucucuacggcacauaauu

SEQ ID NO: 1547903 - RNA, 19 nt, Artificial Sequence
  Description of Artificial Sequence: Synthetic oligonucleotide
  Antisense strand to SEQ ID NO: 1547902
aauuaugugccguagagaa

SEQ ID NO: 1547904 - RNA, 19 nt, Artificial Sequence
  Description of Artificial Sequence: Synthetic oligonucleotide
  Sense strand starting at position 500 of SEQ ID NO: 1245246
ggcacauaauugcuauuau

SEQ ID NO: 1547905 - RNA, 19 nt, Artificial Sequence
  Description of Artificial Sequence: Synthetic oligonucleotide
  Antisense strand to SEQ ID NO: 1547904
auaauagcaauuaugugcc

SEQ ID NO: 1547906 - RNA, 19 nt, Artificial Sequence
  Description of Artificial Sequence: Synthetic oligonucleotide
  Sense strand starting at position 723 of SEQ ID NO: 1245246
uggcucuuaguccauuauu

SEQ ID NO: 1547907 - RNA, 19 nt, Artificial Sequence
  Description of Artificial Sequence: Synthetic oligonucleotide
  Antisense strand to SEQ ID NO: 1547906
aauaauggacuaagagcca

SEQ ID NO: 1547908 - RNA, 19 nt, Artificial Sequence
  Description of Artificial Sequence: Synthetic oligonucleotide
  Sense strand starting at position 726 of SEQ ID NO: 1245246
cucuuaguccauuauugga

SEQ ID NO: 1547909 - RNA, 19 nt, Artificial Sequence
  Description of Artificial Sequence: Synthetic oligonucleotide
  Antisense strand to SEQ ID NO: 1547908
uccaauaauggacuaagag

SEQ ID NO: 1547910 - RNA, 19 nt, Artificial Sequence
  Description of Artificial Sequence: Synthetic oligonucleotide
  Sense strand starting at position 776 of SEQ ID NO: 1245246
auagaagucgaaggagagu

SEQ ID NO: 1547911 - RNA, 19 nt, Artificial Sequence
  Description of Artificial Sequence: Synthetic oligonucleotide
  Antisense strand to SEQ ID NO: 1547910
acucuccuucgacuucuau

SEQ ID NO: 1547912 - RNA, 19 nt, Artificial Sequence
  Description of Artificial Sequence: Synthetic oligonucleotide
  Sense strand starting at position 896 of SEQ ID NO: 1245246
gaggcacucucauccugau

SEQ ID NO: 1547913 - RNA, 19 nt, Artificial Sequence
  Description of Artificial Sequence: Synthetic oligonucleotide
  Antisense strand to SEQ ID NO: 1547912
aucaggaugagagugccuc

SEQ ID NO: 1547914 - RNA, 19 nt, Artificial Sequence
  Description of Artificial Sequence: Synthetic oligonucleotide
  Sense strand starting at position 1194 of SEQ ID NO: 1245246
ucaaguacucaaggcaguu

SEQ ID NO: 1547915 - RNA, 19 nt, Artificial Sequence
  Description of Artificial Sequence: Synthetic oligonucleotide
  Antisense strand to SEQ ID NO: 1547914
aacugccuugaguacuuga

SEQ ID NO: 1547916 - RNA, 19 nt, Artificial Sequence
  Description of Artificial Sequence: Synthetic oligonucleotide
  Sense strand starting at position 1226 of SEQ ID NO: 1245246
gaggaaguuugugucucuu

SEQ ID NO: 1547917 - RNA, 19 nt, Artificial Sequence
  Description of Artificial Sequence: Synthetic oligonucleotide
  Antisense strand to SEQ ID NO: 1547916
aagagacacaaacuuccuc

SEQ ID NO: 1547918 - RNA, 19 nt, Artificial Sequence
  Description of Artificial Sequence: Synthetic oligonucleotide
  Sense strand starting at position 1228 of SEQ ID NO: 1245246
ggaaguuugugucucuuua

SEQ ID NO: 1547919 - RNA, 19 nt, Artificial Sequence
  Description of Artificial Sequence: Synthetic oligonucleotide
  Antisense strand to SEQ ID NO: 1547918
uaaagagacacaaacuucc

SEQ ID NO: 1547920 - RNA, 19 nt, Artificial Sequence
  Description of Artificial Sequence: Synthetic oligonucleotide
  Sense strand starting at position 2061 of SEQ ID NO: 1245246
gggagaguaucuguggagu

SEQ ID NO: 1547921 - RNA, 19 nt, Artificial Sequence
  Description of Artificial Sequence: Synthetic oligonucleotide
  Antisense strand to SEQ ID NO: 1547920
acuccacagauacucuccc

SEQ ID NO: 1547922 - RNA, 19 nt, Artificial Sequence
  Description of Artificial Sequence: Synthetic oligonucleotide
  Sense strand starting at position 2064 of SEQ ID NO: 1245246
agaguaucuguggaguugu

SEQ ID NO: 1547923 - RNA, 19 nt, Artificial Sequence
  Description of Artificial Sequence: Synthetic oligonucleotide
  Antisense strand to SEQ ID NO: 1547922
acaacuccacagauacucu

SEQ ID NO: 1547924 - RNA, 19 nt, Artificial Sequence
  Description of Artificial Sequence: Synthetic oligonucleotide
  Sense strand starting at position 2074 of SEQ ID NO: 1245246
uggaguugugccaacgguu

SEQ ID NO: 1547925 - RNA, 19 nt, Artificial Sequence
  Description of Artificial Sequence: Synthetic oligonucleotide
  Antisense strand to SEQ ID NO: 1547924
aaccguuggcacaacucca

SEQ ID NO: 1547926 - RNA, 19 nt, Artificial Sequence
  Description of Artificial Sequence: Synthetic oligonucleotide
  Sense strand starting at position 2141 of SEQ ID NO: 1245246
cgagguuucagcgaagggu

SEQ ID NO: 1547927 - RNA, 19 nt, Artificial Sequence
  Description of Artificial Sequence: Synthetic oligonucleotide
  Antisense strand to SEQ ID NO: 1547926
acccuucgcugaaaccucg

SEQ ID NO: 1547928 - RNA, 19 nt, Artificial Sequence
  Description of Artificial Sequence: Synthetic oligonucleotide
  Sense strand starting at position 2203 of SEQ ID NO: 1245246
cggagucucuguuuauuuc

SEQ ID NO: 1547929 - RNA, 19 nt, Artificial Sequence
  Description of Artificial Sequence: Synthetic oligonucleotide
  Antisense strand to SEQ ID NO: 1547928
gaaauaaacagagacuccg

SEQ ID NO: 1547930 - RNA, 19 nt, Artificial Sequence
  Description of Artificial Sequence: Synthetic oligonucleotide
  Sense strand starting at position 2211 of SEQ ID NO: 1245246
cuguuuauuucggcuccga

SEQ ID NO: 1547931 - RNA, 19 nt, Artificial Sequence
  Description of Artificial Sequence: Synthetic oligonucleotide
  Antisense strand to SEQ ID NO: 1547930
ucggagccgaaauaaacag

SEQ ID NO: 1547932 - RNA, 19 nt, Artificial Sequence
  Description of Artificial Sequence: Synthetic oligonucleotide
  Sense strand starting at position 2215 of SEQ ID NO: 1245246
uuauuucggcuccgacaau

SEQ ID NO: 1547933 - RNA, 19 nt, Artificial Sequence
  Description of Artificial Sequence: Synthetic oligonucleotide
  Antisense strand to SEQ ID NO: 1547932
auugucggagccgaaauaa

SEQ ID NO: 1547934 - RNA, 19 nt, Artificial Sequence
  Description of Artificial Sequence: Synthetic oligonucleotide
  Sense strand starting at position 2508 of SEQ ID NO: 1245246
uaaguucuacgugaaggca

SEQ ID NO: 1547935 - RNA, 19 nt, Artificial Sequence
  Description of Artificial Sequence: Synthetic oligonucleotide
  Antisense strand to SEQ ID NO: 1547934
ugccuucacguagaacuua

SEQ ID NO: 1547936 - RNA, 19 nt, Artificial Sequence
  Description of Artificial Sequence: Synthetic oligonucleotide
  Sense strand starting at position 2558 of SEQ ID NO: 1245246
augcguuugauauauguau

SEQ ID NO: 1547937 - RNA, 19 nt, Artificial Sequence
  Description of Artificial Sequence: Synthetic oligonucleotide
  Antisense strand to SEQ ID NO: 1547936
auacauauaucaaacgcau

SEQ ID NO: 1547938 - RNA, 19 nt, Artificial Sequence
  Description of Artificial Sequence: Synthetic oligonucleotide
  Sense strand starting at position 2560 of SEQ ID NO: 1245246
gcguuugauauauguauuu

SEQ ID NO: 1547939 - RNA, 19 nt, Artificial Sequence
  Description of Artificial Sequence: Synthetic oligonucleotide
  Antisense strand to SEQ ID NO: 1547938
aaauacauauaucaaacgc

SEQ ID NO: 1547940 - RNA, 19 nt, Artificial Sequence
  Description of Artificial Sequence: Synthetic oligonucleotide
  Sense strand starting at position 2581 of SEQ ID NO: 1245246
cuuuaacucuaguuguaug

SEQ ID NO: 1547941 - RNA, 19 nt, Artificial Sequence
  Description of Artificial Sequence: Synthetic oligonucleotide
  Antisense strand to SEQ ID NO: 1547940
cauacaacuagaguuaaag

SEQ ID NO: 1547942 - RNA, 19 nt, Artificial Sequence
  Description of Artificial Sequence: Synthetic oligonucleotide
  Sense strand starting at position 2592 of SEQ ID NO: 1245246
guuguauguguuucuggua

SEQ ID NO: 1547943 - RNA, 19 nt, Artificial Sequence
  Description of Artificial Sequence: Synthetic oligonucleotide
  Antisense strand to SEQ ID NO: 1547942
uaccagaaacacauacaac

SEQ ID NO: 1547944 - RNA, 19 nt, Artificial Sequence
  Description of Artificial Sequence: Synthetic oligonucleotide
  Sense strand starting at position 2773 of SEQ ID NO: 1245246
caaggagucccaugaugca

SEQ ID NO: 1547945 - RNA, 19 nt, Artificial Sequence
  Description of Artificial Sequence: Synthetic oligonucleotide
  Antisense strand to SEQ ID NO: 1547944
ugcaucaugggacuccuug

SEQ ID NO: 1547946 - RNA, 19 nt, Artificial Sequence
  Description of Artificial Sequence: Synthetic oligonucleotide
  Sense strand starting at position 3079 of SEQ ID NO: 1245246
ggagcaucuccuuggaacu

SEQ ID NO: 1547947 - RNA, 19 nt, Artificial Sequence
  Description of Artificial Sequence: Synthetic oligonucleotide
  Antisense strand to SEQ ID NO: 1547946
aguuccaaggagaugcucc

SEQ ID NO: 1547948 - RNA, 19 nt, Artificial Sequence
  Description of Artificial Sequence: Synthetic oligonucleotide
  Sense strand starting at position 3247 of SEQ ID NO: 1245246
ggaggcuacaguugucuau

SEQ ID NO: 1547949 - RNA, 19 nt, Artificial Sequence
  Description of Artificial Sequence: Synthetic oligonucleotide
  Antisense strand to SEQ ID NO: 1547948
auagacaacuguagccucc

SEQ ID NO: 1547950 - RNA, 19 nt, Artificial Sequence
  Description of Artificial Sequence: Synthetic oligonucleotide
  Sense strand starting at position 3249 of SEQ ID NO: 1245246
aggcuacaguugucuauga

SEQ ID NO: 1547951 - RNA, 19 nt, Artificial Sequence
  Description of Artificial Sequence: Synthetic oligonucleotide
  Antisense strand to SEQ ID NO: 1547950
ucauagacaacuguagccu

SEQ ID NO: 1547952 - RNA, 19 nt, Artificial Sequence
  Description of Artificial Sequence: Synthetic oligonucleotide
  Sense strand starting at position 3250 of SEQ ID NO: 1245246
ggcuacaguugucuaugau

SEQ ID NO: 1547953 - RNA, 19 nt, Artificial Sequence
  Description of Artificial Sequence: Synthetic oligonucleotide
  Antisense strand to SEQ ID NO: 1547952
aucauagacaacuguagcc

SEQ ID NO: 1547954 - RNA, 19 nt, Artificial Sequence
  Description of Artificial Sequence: Synthetic oligonucleotide
  Sense strand starting at position 3251 of SEQ ID NO: 1245246
gcuacaguugucuaugauc

SEQ ID NO: 1547955 - RNA, 19 nt, Artificial Sequence
  Description of Artificial Sequence: Synthetic oligonucleotide
  Antisense strand to SEQ ID NO: 1547954
gaucauagacaacuguagc

SEQ ID NO: 1547956 - RNA, 19 nt, Artificial Sequence
  Description of Artificial Sequence: Synthetic oligonucleotide
  Sense strand starting at position 3379 of SEQ ID NO: 1245246
gguucuaaguuuccauaac

SEQ ID NO: 1547957 - RNA, 19 nt, Artificial Sequence
  Description of Artificial Sequence: Synthetic oligonucleotide
  Antisense strand to SEQ ID NO: 1547956
guuauggaaacuuagaacc

SEQ ID NO: 1547958 - RNA, 19 nt, Artificial Sequence
  Description of Artificial Sequence: Synthetic oligonucleotide
  Sense strand starting at position 3411 of SEQ ID NO: 1245246
gaagaauucugguuccugu

SEQ ID NO: 1547959 - RNA, 19 nt, Artificial Sequence
  Description of Artificial Sequence: Synthetic oligonucleotide
  Antisense strand to SEQ ID NO: 1547958
acaggaaccagaauucuuc

SEQ ID NO: 1547960 - RNA, 19 nt, Artificial Sequence
  Description of Artificial Sequence: Synthetic oligonucleotide
  Sense strand starting at position 3473 of SEQ ID NO: 1245246
gagaaagucauggguagac

SEQ ID NO: 1547961 - RNA, 19 nt, Artificial Sequence
  Description of Artificial Sequence: Synthetic oligonucleotide
  Antisense strand to SEQ ID NO: 1547960
gucuacccaugacuuucuc

SEQ ID NO: 1547962 - RNA, 19 nt, Artificial Sequence
  Description of Artificial Sequence: Synthetic oligonucleotide
  Sense strand starting at position 3485 of SEQ ID NO: 1245246
gguagacuuuguuucugag

SEQ ID NO: 1547963 - RNA, 19 nt, Artificial Sequence
  Description of Artificial Sequence: Synthetic oligonucleotide
  Antisense strand to SEQ ID NO: 1547962
cucagaaacaaagucuacc

SEQ ID NO: 1547964 - RNA, 19 nt, Artificial Sequence
  Description of Artificial Sequence: Synthetic oligonucleotide
  Sense strand starting at position 3582 of SEQ ID NO: 1245246
gagcuccaguaguugagau

SEQ ID NO: 1547965 - RNA, 19 nt, Artificial Sequence
  Description of Artificial Sequence: Synthetic oligonucleotide
  Antisense strand to SEQ ID NO: 1547964
aucucaacuacuggagcuc

SEQ ID NO: 1547966 - RNA, 19 nt, Artificial Sequence
  Description of Artificial Sequence: Synthetic oligonucleotide
  Sense strand starting at position 3592 of SEQ ID NO: 1245246
aguugagauccggagacuu

SEQ ID NO: 1547967 - RNA, 19 nt, Artificial Sequence
  Description of Artificial Sequence: Synthetic oligonucleotide
  Antisense strand to SEQ ID NO: 1547966
aagucuccggaucucaacu

SEQ ID NO: 1547968 - RNA, 19 nt, Artificial Sequence
  Description of Artificial Sequence: Synthetic oligonucleotide
  Sense strand starting at position 3700 of SEQ ID NO: 1245246
uuauuagaugugcaucuuu

SEQ ID NO: 1547969 - RNA, 19 nt, Artificial Sequence
  Description of Artificial Sequence: Synthetic oligonucleotide
  Antisense strand to SEQ ID NO: 1547968
aaagaugcacaucuaauaa

SEQ ID NO: 1547970 - RNA, 19 nt, Artificial Sequence
  Description of Artificial Sequence: Synthetic oligonucleotide
  Sense strand starting at position 3705 of SEQ ID NO: 1245246
agaugugcaucuuuauaaa

SEQ ID NO: 1547971 - RNA, 19 nt, Artificial Sequence
  Description of Artificial Sequence: Synthetic oligonucleotide
  Antisense strand to SEQ ID NO: 1547970
uuuauaaagaugcacaucu

SEQ ID NO: 1547972 - RNA, 19 nt, Artificial Sequence
  Description of Artificial Sequence: Synthetic oligonucleotide
  Sense strand starting at position 3715 of SEQ ID NO: 1245246
cuuuauaaaugugcagaaa

SEQ ID NO: 1547973 - RNA, 19 nt, Artificial Sequence
  Description of Artificial Sequence: Synthetic oligonucleotide
  Antisense strand to SEQ ID NO: 1547972
uuucugcacauuuauaaag

SEQ ID NO: 1547974 - RNA, 19 nt, Artificial Sequence
  Description of Artificial Sequence: Synthetic oligonucleotide
  Sense strand starting at position 3758 of SEQ ID NO: 1245246
guggaaagcauacauaugu

SEQ ID NO: 1547975 - RNA, 19 nt, Artificial Sequence
  Description of Artificial Sequence: Synthetic oligonucleotide
  Antisense strand to SEQ ID NO: 1547974
acauauguaugcuuuccac

SEQ ID NO: 1547976 - RNA, 19 nt, Artificial Sequence
  Description of Artificial Sequence: Synthetic oligonucleotide
  Sense strand starting at position 3928 of SEQ ID NO: 1245246
uacucagagcagugucuaa

SEQ ID NO: 1547977 - RNA, 19 nt, Artificial Sequence
  Description of Artificial Sequence: Synthetic oligonucleotide
  Antisense strand to SEQ ID NO: 1547976
uuagacacugcucugagua

SEQ ID NO: 1547978 - RNA, 19 nt, Artificial Sequence
  Description of Artificial Sequence: Synthetic oligonucleotide
  Sense strand starting at position 3932 of SEQ ID NO: 1245246
cagagcagugucuaaauca

SEQ ID NO: 1547979 - RNA, 19 nt, Artificial Sequence
  Description of Artificial Sequence: Synthetic oligonucleotide
  Antisense strand to SEQ ID NO: 1547978
ugauuuagacacugcucug

SEQ ID NO: 1547980 - RNA, 19 nt, Artificial Sequence
  Description of Artificial Sequence: Synthetic oligonucleotide
  Sense strand starting at position 360 of SEQ ID NO: 1245247
uucugugggucuuggaaag

SEQ ID NO: 1547981 - RNA, 19 nt, Artificial Sequence
  Description of Artificial Sequence: Synthetic oligonucleotide
  Antisense strand to SEQ ID NO: 1547980
cuuuccaagacccacagaa

SEQ ID NO: 1547982 - RNA, 19 nt, Artificial Sequence
  Description of Artificial Sequence: Synthetic oligonucleotide
  Sense strand starting at position 499 of SEQ ID NO: 1245247
aaugaaagcucagggacaa

SEQ ID NO: 1547983 - RNA, 19 nt, Artificial Sequence
  Description of Artificial Sequence: Synthetic oligonucleotide
  Antisense strand to SEQ ID NO: 1547982
uugucccugagcuuucauu

SEQ ID NO: 1547984 - RNA, 19 nt, Artificial Sequence
  Description of Artificial Sequence: Synthetic oligonucleotide
  Sense strand starting at position 2270 of SEQ ID NO: 1245247
acgucuucuguuuggguga

SEQ ID NO: 1547985 - RNA, 19 nt, Artificial Sequence
  Description of Artificial Sequence: Synthetic oligonucleotide
  Antisense strand to SEQ ID NO: 1547984
ucacccaaacagaagacgu

SEQ ID NO: 1547986 - RNA, 19 nt, Artificial Sequence
  Description of Artificial Sequence: Synthetic oligonucleotide
  Sense strand starting at position 2610 of SEQ ID NO: 1245247
gaaagaugccgugcugugu

SEQ ID NO: 1547987 - RNA, 19 nt, Artificial Sequence
  Description of Artificial Sequence: Synthetic oligonucleotide
  Antisense strand to SEQ ID NO: 1547986
acacagcacggcaucuuuc

SEQ ID NO: 1547988 - RNA, 19 nt, Artificial Sequence
  Description of Artificial Sequence: Synthetic oligonucleotide
  Sense strand starting at position 2691 of SEQ ID NO: 1245247
aaagcuuuccuggaggcga

SEQ ID NO: 1547989 - RNA, 19 nt, Artificial Sequence
  Description of Artificial Sequence: Synthetic oligonucleotide
  Antisense strand to SEQ ID NO: 1547988
ucgccuccaggaaagcuuu

SEQ ID NO: 1547990 - RNA, 19 nt, Artificial Sequence
  Description of Artificial Sequence: Synthetic oligonucleotide
  Sense strand starting at position 2707 of SEQ ID NO: 1245247
cgaguaagccgggagcaaa

SEQ ID NO: 1547991 - RNA, 19 nt, Artificial Sequence
  Description of Artificial Sequence: Synthetic oligonucleotide
  Antisense strand to SEQ ID NO: 1547990
uuugcucccggcuuacucg

SEQ ID NO: 1547992 - RNA, 19 nt, Artificial Sequence
  Description of Artificial Sequence: Synthetic oligonucleotide
  Sense strand starting at position 2730 of SEQ ID NO: 1245247
uccgcuaugugccaguaua

SEQ ID NO: 1547993 - RNA, 19 nt, Artificial Sequence
  Description of Artificial Sequence: Synthetic oligonucleotide
  Antisense strand to SEQ ID NO: 1547992
uauacuggcacauagcgga

SEQ ID NO: 1547994 - RNA, 19 nt, Artificial Sequence
  Description of Artificial Sequence: Synthetic oligonucleotide
  Sense strand starting at position 2827 of SEQ ID NO: 1245247
gcgcuaauguauucuaaug

SEQ ID NO: 1547995 - RNA, 19 nt, Artificial Sequence
  Description of Artificial Sequence: Synthetic oligonucleotide
  Antisense strand to SEQ ID NO: 1547994
cauuagaauacauuagcgc

SEQ ID NO: 1547996 - RNA, 19 nt, Artificial Sequence
  Description of Artificial Sequence: Synthetic oligonucleotide
  Sense strand starting at position 2829 of SEQ ID NO: 1245247
gcuaauguauucuaaugca

SEQ ID NO: 1547997 - RNA, 19 nt, Artificial Sequence
  Description of Artificial Sequence: Synthetic oligonucleotide
  Antisense strand to SEQ ID NO: 1547996
ugcauuagaauacauuagc

SEQ ID NO: 1547998 - RNA, 19 nt, Artificial Sequence
  Description of Artificial Sequence: Synthetic oligonucleotide
  Sense strand starting at position 2837 of SEQ ID NO: 1245247
auucuaaugcaugguaaau

SEQ ID NO: 1547999 - RNA, 19 nt, Artificial Sequence
  Description of Artificial Sequence: Synthetic oligonucleotide
  Antisense strand to SEQ ID NO: 1547998
auuuaccaugcauuagaau

SEQ ID NO: 1548000 - RNA, 19 nt, Artificial Sequence
  Description of Artificial Sequence: Synthetic oligonucleotide
  Sense strand starting at position 2864 of SEQ ID NO: 1245247
ccgggacaugcauaaucua

SEQ ID NO: 1548001 - RNA, 19 nt, Artificial Sequence
  Description of Artificial Sequence: Synthetic oligonucleotide
  Antisense strand to SEQ ID NO: 1548000
uagauuaugcaugucccgg

SEQ ID NO: 1548002 - RNA, 19 nt, Artificial Sequence
  Description of Artificial Sequence: Synthetic oligonucleotide
  Sense strand starting at position 2874 of SEQ ID NO: 1245247
cauaaucuacgcggucaga

SEQ ID NO: 1548003 - RNA, 19 nt, Artificial Sequence
  Description of Artificial Sequence: Synthetic oligonucleotide
  Antisense strand to SEQ ID NO: 1548002
ucugaccgcguagauuaug

SEQ ID NO: 1548004 - RNA, 19 nt, Artificial Sequence
  Description of Artificial Sequence: Synthetic oligonucleotide
  Sense strand starting at position 2957 of SEQ ID NO: 1245247
agcaguaaugcaugcaaag

SEQ ID NO: 1548005 - RNA, 19 nt, Artificial Sequence
  Description of Artificial Sequence: Synthetic oligonucleotide
  Antisense strand to SEQ ID NO: 1548004
cuuugcaugcauuacugcu

SEQ ID NO: 1548006 - RNA, 19 nt, Artificial Sequence
  Description of Artificial Sequence: Synthetic oligonucleotide
  Sense strand starting at position 3024 of SEQ ID NO: 1245247
uuaugaggcuuccgaagag

SEQ ID NO: 1548007 - RNA, 19 nt, Artificial Sequence
  Description of Artificial Sequence: Synthetic oligonucleotide
  Antisense strand to SEQ ID NO: 1548006
cucuucggaagccucauaa

SEQ ID NO: 1548008 - RNA, 19 nt, Artificial Sequence
  Description of Artificial Sequence: Synthetic oligonucleotide
  Sense strand starting at position 3065 of SEQ ID NO: 1245247
acuagaauuccgggagcug

SEQ ID NO: 1548009 - RNA, 19 nt, Artificial Sequence
  Description of Artificial Sequence: Synthetic oligonucleotide
  Antisense strand to SEQ ID NO: 1548008
cagcucccggaauucuagu

SEQ ID NO: 1548010 - RNA, 19 nt, Artificial Sequence
  Description of Artificial Sequence: Synthetic oligonucleotide
  Sense strand starting at position 3074 of SEQ ID NO: 1245247
ccgggagcugccguuucaa

SEQ ID NO: 1548011 - RNA, 19 nt, Artificial Sequence
  Description of Artificial Sequence: Synthetic oligonucleotide
  Antisense strand to SEQ ID NO: 1548010
uugaaacggcagcucccgg

SEQ ID NO: 1548012 - RNA, 19 nt, Artificial Sequence
  Description of Artificial Sequence: Synthetic oligonucleotide
  Sense strand starting at position 3098 of SEQ ID NO: 1245247
ccaagugcuuucugcauca

SEQ ID NO: 1548013 - RNA, 19 nt, Artificial Sequence
  Description of Artificial Sequence: Synthetic oligonucleotide
  Antisense strand to SEQ ID NO: 1548012
ugaugcagaaagcacuugg

SEQ ID NO: 1548014 - RNA, 19 nt, Artificial Sequence
  Description of Artificial Sequence: Synthetic oligonucleotide
  Sense strand starting at position 3102 of SEQ ID NO: 1245247
gugcuuucugcaucagcga

SEQ ID NO: 1548015 - RNA, 19 nt, Artificial Sequence
  Description of Artificial Sequence: Synthetic oligonucleotide
  Antisense strand to SEQ ID NO: 1548014
ucgcugaugcagaaagcac

SEQ ID NO: 1548016 - RNA, 19 nt, Artificial Sequence
  Description of Artificial Sequence: Synthetic oligonucleotide
  Sense strand starting at position 3111 of SEQ ID NO: 1245247
gcaucagcgacuuggaaag

SEQ ID NO: 1548017 - RNA, 19 nt, Artificial Sequence
  Description of Artificial Sequence: Synthetic oligonucleotide
  Antisense strand to SEQ ID NO: 1548016
cuuuccaagucgcugaugc

SEQ ID NO: 1548018 - RNA, 19 nt, Artificial Sequence
  Description of Artificial Sequence: Synthetic oligonucleotide
  Sense strand starting at position 3177 of SEQ ID NO: 1245247
uggugucccaagugagcaa

SEQ ID NO: 1548019 - RNA, 19 nt, Artificial Sequence
  Description of Artificial Sequence: Synthetic oligonucleotide
  Antisense strand to SEQ ID NO: 1548018
uugcucacuugggacacca

SEQ ID NO: 1548020 - RNA, 19 nt, Artificial Sequence
  Description of Artificial Sequence: Synthetic oligonucleotide
  Sense strand starting at position 3319 of SEQ ID NO: 1245247
ucucaaaucccgggagaga

SEQ ID NO: 1548021 - RNA, 19 nt, Artificial Sequence
  Description of Artificial Sequence: Synthetic oligonucleotide
  Antisense strand to SEQ ID NO: 1548020
ucucucccgggauuugaga

SEQ ID NO: 1548022 - RNA, 19 nt, Artificial Sequence
  Description of Artificial Sequence: Synthetic oligonucleotide
  Sense strand starting at position 3458 of SEQ ID NO: 1245247
gcaccuacgucuuccuaga

SEQ ID NO: 1548023 - RNA, 19 nt, Artificial Sequence
  Description of Artificial Sequence: Synthetic oligonucleotide
  Antisense strand to SEQ ID NO: 1548022
ucuaggaagacguaggugc

SEQ ID NO: 1548024 - RNA, 19 nt, Artificial Sequence
  Description of Artificial Sequence: Synthetic oligonucleotide
  Sense strand starting at position 3460 of SEQ ID NO: 1245247
accuacgucuuccuagaau

SEQ ID NO: 1548025 - RNA, 19 nt, Artificial Sequence
  Description of Artificial Sequence: Synthetic oligonucleotide
  Antisense strand to SEQ ID NO: 1548024
auucuaggaagacguaggu

SEQ ID NO: 1548026 - RNA, 19 nt, Artificial Sequence
  Description of Artificial Sequence: Synthetic oligonucleotide
  Sense strand starting at position 3471 of SEQ ID NO: 1245247
ccuagaauuuccguuguuu

SEQ ID NO: 1548027 - RNA, 19 nt, Artificial Sequence
  Description of Artificial Sequence: Synthetic oligonucleotide
  Antisense strand to SEQ ID NO: 1548026
aaacaacggaaauucuagg

SEQ ID NO: 1548028 - RNA, 19 nt, Artificial Sequence
  Description of Artificial Sequence: Synthetic oligonucleotide
  Sense strand starting at position 3527 of SEQ ID NO: 1245247
gacagagaguuggagauuu

SEQ ID NO: 1548029 - RNA, 19 nt, Artificial Sequence
  Description of Artificial Sequence: Synthetic oligonucleotide
  Antisense strand to SEQ ID NO: 1548028
aaaucuccaacucucuguc

SEQ ID NO: 1548030 - RNA, 19 nt, Artificial Sequence
  Description of Artificial Sequence: Synthetic oligonucleotide
  Sense strand starting at position 3535 of SEQ ID NO: 1245247
guuggagauuucugcaguc

SEQ ID NO: 1548031 - RNA, 19 nt, Artificial Sequence
  Description of Artificial Sequence: Synthetic oligonucleotide
  Antisense strand to SEQ ID NO: 1548030
gacugcagaaaucuccaac

SEQ ID NO: 1548032 - RNA, 19 nt, Artificial Sequence
  Description of Artificial Sequence: Synthetic oligonucleotide
  Sense strand starting at position 3599 of SEQ ID NO: 1245247
ggcauaaagccuuaaacgu

SEQ ID NO: 1548033 - RNA, 19 nt, Artificial Sequence
  Description of Artificial Sequence: Synthetic oligonucleotide
  Antisense strand to SEQ ID NO: 1548032
acguuuaaggcuuuaugcc

SEQ ID NO: 1548034 - RNA, 19 nt, Artificial Sequence
  Description of Artificial Sequence: Synthetic oligonucleotide
  Sense strand starting at position 3608 of SEQ ID NO: 1245247
ccuuaaacguaacaagauu

SEQ ID NO: 1548035 - RNA, 19 nt, Artificial Sequence
  Description of Artificial Sequence: Synthetic oligonucleotide
  Antisense strand to SEQ ID NO: 1548034
aaucuuguuacguuuaagg

SEQ ID NO: 1548036 - RNA, 19 nt, Artificial Sequence
  Description of Artificial Sequence: Synthetic oligonucleotide
  Sense strand starting at position 3646 of SEQ ID NO: 1245247
ucuguuugccuccgaagau

SEQ ID NO: 1548037 - RNA, 19 nt, Artificial Sequence
  Description of Artificial Sequence: Synthetic oligonucleotide
  Antisense strand to SEQ ID NO: 1548036
aucuucggaggcaaacaga

SEQ ID NO: 1548038 - RNA, 19 nt, Artificial Sequence
  Description of Artificial Sequence: Synthetic oligonucleotide
  Sense strand starting at position 3647 of SEQ ID NO: 1245247
cuguuugccuccgaagauu

SEQ ID NO: 1548039 - RNA, 19 nt, Artificial Sequence
  Description of Artificial Sequence: Synthetic oligonucleotide
  Antisense strand to SEQ ID NO: 1548038
aaucuucggaggcaaacag

SEQ ID NO: 1548040 - RNA, 19 nt, Artificial Sequence
  Description of Artificial Sequence: Synthetic oligonucleotide
  Sense strand starting at position 3683 of SEQ ID NO: 1245247
cgcagauguugccuuuguu

SEQ ID NO: 1548041 - RNA, 19 nt, Artificial Sequence
  Description of Artificial Sequence: Synthetic oligonucleotide
  Antisense strand to SEQ ID NO: 1548040
aacaaaggcaacaucugcg

SEQ ID NO: 1548042 - RNA, 19 nt, Artificial Sequence
  Description of Artificial Sequence: Synthetic oligonucleotide
  Sense strand starting at position 3684 of SEQ ID NO: 1245247
gcagauguugccuuuguuu

SEQ ID NO: 1548043 - RNA, 19 nt, Artificial Sequence
  Description of Artificial Sequence: Synthetic oligonucleotide
  Antisense strand to SEQ ID NO: 1548042
aaacaaaggcaacaucugc

SEQ ID NO: 1548044 - RNA, 19 nt, Artificial Sequence
  Description of Artificial Sequence: Synthetic oligonucleotide
  Sense strand starting at position 3686 of SEQ ID NO: 1245247
agauguugccuuuguuuaa

SEQ ID NO: 1548045 - RNA, 19 nt, Artificial Sequence
  Description of Artificial Sequence: Synthetic oligonucleotide
  Antisense strand to SEQ ID NO: 1548044
uuaaacaaaggcaacaucu

SEQ ID NO: 1548046 - RNA, 19 nt, Artificial Sequence
  Description of Artificial Sequence: Synthetic oligonucleotide
  Sense strand starting at position 3687 of SEQ ID NO: 1245247
gauguugccuuuguuuaaa

SEQ ID NO: 1548047 - RNA, 19 nt, Artificial Sequence
  Description of Artificial Sequence: Synthetic oligonucleotide
  Antisense strand to SEQ ID NO: 1548046
uuuaaacaaaggcaacauc

SEQ ID NO: 1548048 - RNA, 19 nt, Artificial Sequence
  Description of Artificial Sequence: Synthetic oligonucleotide
  Sense strand starting at position 3689 of SEQ ID NO: 1245247
uguugccuuuguuuaaaga

SEQ ID NO: 1548049 - RNA, 19 nt, Artificial Sequence
  Description of Artificial Sequence: Synthetic oligonucleotide
  Antisense strand to SEQ ID NO: 1548048
ucuuuaaacaaaggcaaca

SEQ ID NO: 1548050 - RNA, 19 nt, Artificial Sequence
  Description of Artificial Sequence: Synthetic oligonucleotide
  Sense strand starting at position 3731 of SEQ ID NO: 1245247
acauaaguuugagaagcgu

SEQ ID NO: 1548051 - RNA, 19 nt, Artificial Sequence
  Description of Artificial Sequence: Synthetic oligonucleotide
  Antisense strand to SEQ ID NO: 1548050
acgcuucucaaacuuaugu

SEQ ID NO: 1548052 - RNA, 19 nt, Artificial Sequence
  Description of Artificial Sequence: Synthetic oligonucleotide
  Sense strand starting at position 3737 of SEQ ID NO: 1245247
guuugagaagcgugaccua

SEQ ID NO: 1548053 - RNA, 19 nt, Artificial Sequence
  Description of Artificial Sequence: Synthetic oligonucleotide
  Antisense strand to SEQ ID NO: 1548052
uaggucacgcuucucaaac

SEQ ID NO: 1548054 - RNA, 19 nt, Artificial Sequence
  Description of Artificial Sequence: Synthetic oligonucleotide
  Sense strand starting at position 3819 of SEQ ID NO: 1245247
acuuccagcuguuagagaa

SEQ ID NO: 1548055 - RNA, 19 nt, Artificial Sequence
  Description of Artificial Sequence: Synthetic oligonucleotide
  Antisense strand to SEQ ID NO: 1548054
uucucuaacagcuggaagu

SEQ ID NO: 1548056 - RNA, 19 nt, Artificial Sequence
  Description of Artificial Sequence: Synthetic oligonucleotide
  Sense strand starting at position 3879 of SEQ ID NO: 1245247
gucccuucuuggugccaga

SEQ ID NO: 1548057 - RNA, 19 nt, Artificial Sequence
  Description of Artificial Sequence: Synthetic oligonucleotide
  Antisense strand to SEQ ID NO: 1548056
ucuggcaccaagaagggac

SEQ ID NO: 1548058 - RNA, 19 nt, Artificial Sequence
  Description of Artificial Sequence: Synthetic oligonucleotide
  Sense strand starting at position 3882 of SEQ ID NO: 1245247
ccuucuuggugccagagaa

SEQ ID NO: 1548059 - RNA, 19 nt, Artificial Sequence
  Description of Artificial Sequence: Synthetic oligonucleotide
  Antisense strand to SEQ ID NO: 1548058
uucucuggcaccaagaagg

SEQ ID NO: 1548060 - RNA, 19 nt, Artificial Sequence
  Description of Artificial Sequence: Synthetic oligonucleotide
  Sense strand starting at position 29 of SEQ ID NO: 1245248
ucaguccuagaaugacuaa

SEQ ID NO: 1548061 - RNA, 19 nt, Artificial Sequence
  Description of Artificial Sequence: Synthetic oligonucleotide
  Antisense strand to SEQ ID NO: 1548060
uuagucauucuaggacuga

SEQ ID NO: 1548062 - RNA, 19 nt, Artificial Sequence
  Description of Artificial Sequence: Synthetic oligonucleotide
  Sense strand starting at position 32 of SEQ ID NO: 1245248
guccuagaaugacuaauuc

SEQ ID NO: 1548063 - RNA, 19 nt, Artificial Sequence
  Description of Artificial Sequence: Synthetic oligonucleotide
  Antisense strand to SEQ ID NO: 1548062
gaauuagucauucuaggac

SEQ ID NO: 1548064 - RNA, 19 nt, Artificial Sequence
  Description of Artificial Sequence: Synthetic oligonucleotide
  Sense strand starting at position 54 of SEQ ID NO: 1245248
uuagaaugucuauagguau

SEQ ID NO: 1548065 - RNA, 19 nt, Artificial Sequence
  Description of Artificial Sequence: Synthetic oligonucleotide
  Antisense strand to SEQ ID NO: 1548064
auaccuauagacauucuaa

SEQ ID NO: 1548066 - RNA, 19 nt, Artificial Sequence
  Description of Artificial Sequence: Synthetic oligonucleotide
  Sense strand starting at position 57 of SEQ ID NO: 1245248
gaaugucuauagguaucaa

SEQ ID NO: 1548067 - RNA, 19 nt, Artificial Sequence
  Description of Artificial Sequence: Synthetic oligonucleotide
  Antisense strand to SEQ ID NO: 1548066
uugauaccuauagacauuc

SEQ ID NO: 1548068 - RNA, 19 nt, Artificial Sequence
  Description of Artificial Sequence: Synthetic oligonucleotide
  Sense strand starting at position 593 of SEQ ID NO: 1245248
cucuguuggagaggaacau

SEQ ID NO: 1548069 - RNA, 19 nt, Artificial Sequence
  Description of Artificial Sequence: Synthetic oligonucleotide
  Antisense strand to SEQ ID NO: 1548068
auguuccucuccaacagag

SEQ ID NO: 1548070 - RNA, 19 nt, Artificial Sequence
  Description of Artificial Sequence: Synthetic oligonucleotide
  Sense strand starting at position 652 of SEQ ID NO: 1245248
ucauuaacucuaggugcaa

SEQ ID NO: 1548071 - RNA, 19 nt, Artificial Sequence
  Description of Artificial Sequence: Synthetic oligonucleotide
  Antisense strand to SEQ ID NO: 1548070
uugcaccuagaguuaauga

SEQ ID NO: 1548072 - RNA, 19 nt, Artificial Sequence
  Description of Artificial Sequence: Synthetic oligonucleotide
  Sense strand starting at position 740 of SEQ ID NO: 1245248
gaaagauauagucgagguu

SEQ ID NO: 1548073 - RNA, 19 nt, Artificial Sequence
  Description of Artificial Sequence: Synthetic oligonucleotide
  Antisense strand to SEQ ID NO: 1548072
aaccucgacuauaucuuuc

SEQ ID NO: 1548074 - RNA, 19 nt, Artificial Sequence
  Description of Artificial Sequence: Synthetic oligonucleotide
  Sense strand starting at position 743 of SEQ ID NO: 1245248
agauauagucgagguugau

SEQ ID NO: 1548075 - RNA, 19 nt, Artificial Sequence
  Description of Artificial Sequence: Synthetic oligonucleotide
  Antisense strand to SEQ ID NO: 1548074
aucaaccucgacuauaucu

SEQ ID NO: 1548076 - RNA, 19 nt, Artificial Sequence
  Description of Artificial Sequence: Synthetic oligonucleotide
  Sense strand starting at position 752 of SEQ ID NO: 1245248
cgagguugaugaccugaaa

SEQ ID NO: 1548077 - RNA, 19 nt, Artificial Sequence
  Description of Artificial Sequence: Synthetic oligonucleotide
  Antisense strand to SEQ ID NO: 1548076
uuucaggucaucaaccucg

SEQ ID NO: 1548078 - RNA, 19 nt, Artificial Sequence
  Description of Artificial Sequence: Synthetic oligonucleotide
  Sense strand starting at position 792 of SEQ ID NO: 1245248
agaaaucuugccgggaugu

SEQ ID NO: 1548079 - RNA, 19 nt, Artificial Sequence
  Description of Artificial Sequence: Synthetic oligonucleotide
  Antisense strand to SEQ ID NO: 1548078
acaucccggcaagauuucu

SEQ ID NO: 1548080 - RNA, 19 nt, Artificial Sequence
  Description of Artificial Sequence: Synthetic oligonucleotide
  Sense strand starting at position 1143 of SEQ ID NO: 1245248
aaugguauguaaguuagua

SEQ ID NO: 1548081 - RNA, 19 nt, Artificial Sequence
  Description of Artificial Sequence: Synthetic oligonucleotide
  Antisense strand to SEQ ID NO: 1548080
uacuaacuuacauaccauu

SEQ ID NO: 1548082 - RNA, 19 nt, Artificial Sequence
  Description of Artificial Sequence: Synthetic oligonucleotide
  Sense strand starting at position 1222 of SEQ ID NO: 1245248
aagauauuaguaugcuuug

SEQ ID NO: 1548083 - RNA, 19 nt, Artificial Sequence
  Description of Artificial Sequence: Synthetic oligonucleotide
  Antisense strand to SEQ ID NO: 1548082
caaagcauacuaauaucuu

SEQ ID NO: 1548084 - RNA, 19 nt, Artificial Sequence
  Description of Artificial Sequence: Synthetic oligonucleotide
  Sense strand starting at position 1267 of SEQ ID NO: 1245248
ccucuuauugacgauaggu

SEQ ID NO: 1548085 - RNA, 19 nt, Artificial Sequence
  Description of Artificial Sequence: Synthetic oligonucleotide
  Antisense strand to SEQ ID NO: 1548084
accuaucgucaauaagagg

SEQ ID NO: 1548086 - RNA, 19 nt, Artificial Sequence
  Description of Artificial Sequence: Synthetic oligonucleotide
  Sense strand starting at position 1269 of SEQ ID NO: 1245248
ucuuauugacgauagguaa

SEQ ID NO: 1548087 - RNA, 19 nt, Artificial Sequence
  Description of Artificial Sequence: Synthetic oligonucleotide
  Antisense strand to SEQ ID NO: 1548086
uuaccuaucgucaauaaga

SEQ ID NO: 1548088 - RNA, 19 nt, Artificial Sequence
  Description of Artificial Sequence: Synthetic oligonucleotide
  Sense strand starting at position 1272 of SEQ ID NO: 1245248
uauugacgauagguaaaua

SEQ ID NO: 1548089 - RNA, 19 nt, Artificial Sequence
  Description of Artificial Sequence: Synthetic oligonucleotide
  Antisense strand to SEQ ID NO: 1548088
uauuuaccuaucgucaaua

SEQ ID NO: 1548090 - RNA, 19 nt, Artificial Sequence
  Description of Artificial Sequence: Synthetic oligonucleotide
  Sense strand starting at position 1425 of SEQ ID NO: 1245248
acuuaaaugcuguaguaga

SEQ ID NO: 1548091 - RNA, 19 nt, Artificial Sequence
  Description of Artificial Sequence: Synthetic oligonucleotide
  Antisense strand to SEQ ID NO: 1548090
ucuacuacagcauuuaagu

SEQ ID NO: 1548092 - RNA, 19 nt, Artificial Sequence
  Description of Artificial Sequence: Synthetic oligonucleotide
  Sense strand starting at position 1479 of SEQ ID NO: 1245248
uguuuaugguucucacaua

SEQ ID NO: 1548093 - RNA, 19 nt, Artificial Sequence
  Description of Artificial Sequence: Synthetic oligonucleotide
  Antisense strand to SEQ ID NO: 1548092
uaugugagaaccauaaaca

SEQ ID NO: 1548094 - RNA, 19 nt, Artificial Sequence
  Description of Artificial Sequence: Synthetic oligonucleotide
  Sense strand starting at position 1526 of SEQ ID NO: 1245248
ugguaaaggaguugucauc

SEQ ID NO: 1548095 - RNA, 19 nt, Artificial Sequence
  Description of Artificial Sequence: Synthetic oligonucleotide
  Antisense strand to SEQ ID NO: 1548094
gaugacaacuccuuuacca

SEQ ID NO: 1548096 - RNA, 19 nt, Artificial Sequence
  Description of Artificial Sequence: Synthetic oligonucleotide
  Sense strand starting at position 1532 of SEQ ID NO: 1245248
aggaguugucaucaauucu

SEQ ID NO: 1548097 - RNA, 19 nt, Artificial Sequence
  Description of Artificial Sequence: Synthetic oligonucleotide
  Antisense strand to SEQ ID NO: 1548096
agaauugaugacaacuccu

SEQ ID NO: 1548098 - RNA, 19 nt, Artificial Sequence
  Description of Artificial Sequence: Synthetic oligonucleotide
  Sense strand starting at position 1652 of SEQ ID NO: 1245248
auguaaaggucccuaaguu

SEQ ID NO: 1548099 - RNA, 19 nt, Artificial Sequence
  Description of Artificial Sequence: Synthetic oligonucleotide
  Antisense strand to SEQ ID NO: 1548098
aacuuagggaccuuuacau

SEQ ID NO: 1548100 - RNA, 19 nt, Artificial Sequence
  Description of Artificial Sequence: Synthetic oligonucleotide
  Sense strand starting at position 1653 of SEQ ID NO: 1245248
uguaaaggucccuaaguug

SEQ ID NO: 1548101 - RNA, 19 nt, Artificial Sequence
  Description of Artificial Sequence: Synthetic oligonucleotide
  Antisense strand to SEQ ID NO: 1548100
caacuuagggaccuuuaca

SEQ ID NO: 1548102 - RNA, 19 nt, Artificial Sequence
  Description of Artificial Sequence: Synthetic oligonucleotide
  Sense strand starting at position 1656 of SEQ ID NO: 1245248
aaaggucccuaaguugaua

SEQ ID NO: 1548103 - RNA, 19 nt, Artificial Sequence
  Description of Artificial Sequence: Synthetic oligonucleotide
  Antisense strand to SEQ ID NO: 1548102
uaucaacuuagggaccuuu

SEQ ID NO: 1548104 - RNA, 19 nt, Artificial Sequence
  Description of Artificial Sequence: Synthetic oligonucleotide
  Sense strand starting at position 1737 of SEQ ID NO: 1245248
gccgccaacucauuuaauu

SEQ ID NO: 1548105 - RNA, 19 nt, Artificial Sequence
  Description of Artificial Sequence: Synthetic oligonucleotide
  Antisense strand to SEQ ID NO: 1548104
aauuaaaugaguuggcggc

SEQ ID NO: 1548106 - RNA, 19 nt, Artificial Sequence
  Description of Artificial Sequence: Synthetic oligonucleotide
  Sense strand starting at position 1838 of SEQ ID NO: 1245248
aguucuaauucuuccgaac

SEQ ID NO: 1548107 - RNA, 19 nt, Artificial Sequence
  Description of Artificial Sequence: Synthetic oligonucleotide
  Antisense strand to SEQ ID NO: 1548106
guucggaagaauuagaacu

SEQ ID NO: 1548108 - RNA, 19 nt, Artificial Sequence
  Description of Artificial Sequence: Synthetic oligonucleotide
  Sense strand starting at position 2116 of SEQ ID NO: 1245248
cucugaaaugugcagugaa

SEQ ID NO: 1548109 - RNA, 19 nt, Artificial Sequence
  Description of Artificial Sequence: Synthetic oligonucleotide
  Antisense strand to SEQ ID NO: 1548108
uucacugcacauuucagag

SEQ ID NO: 1548110 - RNA, 19 nt, Artificial Sequence
  Description of Artificial Sequence: Synthetic oligonucleotide
  Sense strand starting at position 2196 of SEQ ID NO: 1245248
aaaugacggucuguuaaca

SEQ ID NO: 1548111 - RNA, 19 nt, Artificial Sequence
  Description of Artificial Sequence: Synthetic oligonucleotide
  Antisense strand to SEQ ID NO: 1548110
uguuaacagaccgucauuu

SEQ ID NO: 1548112 - RNA, 19 nt, Artificial Sequence
  Description of Artificial Sequence: Synthetic oligonucleotide
  Sense strand starting at position 2295 of SEQ ID NO: 1245248
auuugauaguauuaccaug

SEQ ID NO: 1548113 - RNA, 19 nt, Artificial Sequence
  Description of Artificial Sequence: Synthetic oligonucleotide
  Antisense strand to SEQ ID NO: 1548112
caugguaauacuaucaaau

SEQ ID NO: 1548114 - RNA, 19 nt, Artificial Sequence
  Description of Artificial Sequence: Synthetic oligonucleotide
  Sense strand starting at position 2362 of SEQ ID NO: 1245248
uuucuauuguugucagaaa

SEQ ID NO: 1548115 - RNA, 19 nt, Artificial Sequence
  Description of Artificial Sequence: Synthetic oligonucleotide
  Antisense strand to SEQ ID NO: 1548114
uuucugacaacaauagaaa

SEQ ID NO: 1548116 - RNA, 19 nt, Artificial Sequence
  Description of Artificial Sequence: Synthetic oligonucleotide
  Sense strand starting at position 2444 of SEQ ID NO: 1245248
agcuauaaaggucagguua

SEQ ID NO: 1548117 - RNA, 19 nt, Artificial Sequence
  Description of Artificial Sequence: Synthetic oligonucleotide
  Antisense strand to SEQ ID NO: 1548116
uaaccugaccuuuauagcu

SEQ ID NO: 1548118 - RNA, 19 nt, Artificial Sequence
  Description of Artificial Sequence: Synthetic oligonucleotide
  Sense strand starting at position 2569 of SEQ ID NO: 1245248
gcagaauguucuucuauug

SEQ ID NO: 1548119 - RNA, 19 nt, Artificial Sequence
  Description of Artificial Sequence: Synthetic oligonucleotide
  Antisense strand to SEQ ID NO: 1548118
caauagaagaacauucugc

SEQ ID NO: 1548120 - RNA, 19 nt, Artificial Sequence
  Description of Artificial Sequence: Synthetic oligonucleotide
  Sense strand starting at position 2591 of SEQ ID NO: 1245248
ccagccaguccugaaauca

SEQ ID NO: 1548121 - RNA, 19 nt, Artificial Sequence
  Description of Artificial Sequence: Synthetic oligonucleotide
  Antisense strand to SEQ ID NO: 1548120
ugauuucaggacuggcugg

SEQ ID NO: 1548122 - RNA, 19 nt, Artificial Sequence
  Description of Artificial Sequence: Synthetic oligonucleotide
  Sense strand starting at position 2756 of SEQ ID NO: 1245248
gggucucuuguccaugaua

SEQ ID NO: 1548123 - RNA, 19 nt, Artificial Sequence
  Description of Artificial Sequence: Synthetic oligonucleotide
  Antisense strand to SEQ ID NO: 1548122
uaucauggacaagagaccc

SEQ ID NO: 1548124 - RNA, 19 nt, Artificial Sequence
  Description of Artificial Sequence: Synthetic oligonucleotide
  Sense strand starting at position 2759 of SEQ ID NO: 1245248
ucucuuguccaugauaugu

SEQ ID NO: 1548125 - RNA, 19 nt, Artificial Sequence
  Description of Artificial Sequence: Synthetic oligonucleotide
  Antisense strand to SEQ ID NO: 1548124
acauaucauggacaagaga

SEQ ID NO: 1548126 - RNA, 19 nt, Artificial Sequence
  Description of Artificial Sequence: Synthetic oligonucleotide
  Sense strand starting at position 2767 of SEQ ID NO: 1245248
ccaugauaugucuggauaa

SEQ ID NO: 1548127 - RNA, 19 nt, Artificial Sequence
  Description of Artificial Sequence: Synthetic oligonucleotide
  Antisense strand to SEQ ID NO: 1548126
uuauccagacauaucaugg

SEQ ID NO: 1548128 - RNA, 19 nt, Artificial Sequence
  Description of Artificial Sequence: Synthetic oligonucleotide
  Sense strand starting at position 3211 of SEQ ID NO: 1245248
gaguuagauuguuuagggu

SEQ ID NO: 1548129 - RNA, 19 nt, Artificial Sequence
  Description of Artificial Sequence: Synthetic oligonucleotide
  Antisense strand to SEQ ID NO: 1548128
acccuaaacaaucuaacuc

SEQ ID NO: 1548130 - RNA, 19 nt, Artificial Sequence
  Description of Artificial Sequence: Synthetic oligonucleotide
  Sense strand starting at position 3239 of SEQ ID NO: 1245248
ggccaaaguuuaccacuuu

SEQ ID NO: 1548131 - RNA, 19 nt, Artificial Sequence
  Description of Artificial Sequence: Synthetic oligonucleotide
  Antisense strand to SEQ ID NO: 1548130
aaagugguaaacuuuggcc

SEQ ID NO: 1548132 - RNA, 19 nt, Artificial Sequence
  Description of Artificial Sequence: Synthetic oligonucleotide
  Sense strand starting at position 3949 of SEQ ID NO: 1245248
aagugacugcaccauaagu

SEQ ID NO: 1548133 - RNA, 19 nt, Artificial Sequence
  Description of Artificial Sequence: Synthetic oligonucleotide
  Antisense strand to SEQ ID NO: 1548132
acuuauggugcagucacuu

SEQ ID NO: 1548134 - RNA, 19 nt, Artificial Sequence
  Description of Artificial Sequence: Synthetic oligonucleotide
  Sense strand starting at position 3951 of SEQ ID NO: 1245248
gugacugcaccauaaguau

SEQ ID NO: 1548135 - RNA, 19 nt, Artificial Sequence
  Description of Artificial Sequence: Synthetic oligonucleotide
  Antisense strand to SEQ ID NO: 1548134
auacuuauggugcagucac

SEQ ID NO: 1548136 - RNA, 19 nt, Artificial Sequence
  Description of Artificial Sequence: Synthetic oligonucleotide
  Sense strand starting at position 3960 of SEQ ID NO: 1245248
ccauaaguauuggucaagu

SEQ ID NO: 1548137 - RNA, 19 nt, Artificial Sequence
  Description of Artificial Sequence: Synthetic oligonucleotide
  Antisense strand to SEQ ID NO: 1548136
acuugaccaauacuuaugg

SEQ ID NO: 1548138 - RNA, 19 nt, Artificial Sequence
  Description of Artificial Sequence: Synthetic oligonucleotide
  Sense strand starting at position 3962 of SEQ ID NO: 1245248
auaaguauuggucaaguaa

SEQ ID NO: 1548139 - RNA, 19 nt, Artificial Sequence
  Description of Artificial Sequence: Synthetic oligonucleotide
  Antisense strand to SEQ ID NO: 1548138
uuacuugaccaauacuuau

SEQ ID NO: 1548140 - RNA, 19 nt, Artificial Sequence
  Description of Artificial Sequence: Synthetic oligonucleotide
  Sense strand starting at position 6 of SEQ ID NO: 1245249
guacauggagcuuagauua

SEQ ID NO: 1548141 - RNA, 19 nt, Artificial Sequence
  Description of Artificial Sequence: Synthetic oligonucleotide
  Antisense strand to SEQ ID NO: 1548140
uaaucuaagcuccauguac

SEQ ID NO: 1548142 - RNA, 19 nt, Artificial Sequence
  Description of Artificial Sequence: Synthetic oligonucleotide
  Sense strand starting at position 92 of SEQ ID NO: 1245249
cccugaguaucaguaagac

SEQ ID NO: 1548143 - RNA, 19 nt, Artificial Sequence
  Description of Artificial Sequence: Synthetic oligonucleotide
  Antisense strand to SEQ ID NO: 1548142
gucuuacugauacucaggg

SEQ ID NO: 1548144 - RNA, 19 nt, Artificial Sequence
  Description of Artificial Sequence: Synthetic oligonucleotide
  Sense strand starting at position 104 of SEQ ID NO: 1245249
guaagaccuuugcuuuaau

SEQ ID NO: 1548145 - RNA, 19 nt, Artificial Sequence
  Description of Artificial Sequence: Synthetic oligonucleotide
  Antisense strand to SEQ ID NO: 1548144
auuaaagcaaaggucuuac

SEQ ID NO: 1548146 - RNA, 19 nt, Artificial Sequence
  Description of Artificial Sequence: Synthetic oligonucleotide
  Sense strand starting at position 186 of SEQ ID NO: 1245249
agaaauuauacgggucacu

SEQ ID NO: 1548147 - RNA, 19 nt, Artificial Sequence
  Description of Artificial Sequence: Synthetic oligonucleotide
  Antisense strand to SEQ ID NO: 1548146
agugacccguauaauuucu

SEQ ID NO: 1548148 - RNA, 19 nt, Artificial Sequence
  Description of Artificial Sequence: Synthetic oligonucleotide
  Sense strand starting at position 262 of SEQ ID NO: 1245249
acuagaguccagcaacuau

SEQ ID NO: 1548149 - RNA, 19 nt, Artificial Sequence
  Description of Artificial Sequence: Synthetic oligonucleotide
  Antisense strand to SEQ ID NO: 1548148
auaguugcuggacucuagu

SEQ ID NO: 1548150 - RNA, 19 nt, Artificial Sequence
  Description of Artificial Sequence: Synthetic oligonucleotide
  Sense strand starting at position 345 of SEQ ID NO: 1245249
gaaauagcucccugguagu

SEQ ID NO: 1548151 - RNA, 19 nt, Artificial Sequence
  Description of Artificial Sequence: Synthetic oligonucleotide
  Antisense strand to SEQ ID NO: 1548150
acuaccagggagcuauuuc

SEQ ID NO: 1548152 - RNA, 19 nt, Artificial Sequence
  Description of Artificial Sequence: Synthetic oligonucleotide
  Sense strand starting at position 358 of SEQ ID NO: 1245249
gguaguuaugcucagauua

SEQ ID NO: 1548153 - RNA, 19 nt, Artificial Sequence
  Description of Artificial Sequence: Synthetic oligonucleotide
  Antisense strand to SEQ ID NO: 1548152
uaaucugagcauaacuacc

SEQ ID NO: 1548154 - RNA, 19 nt, Artificial Sequence
  Description of Artificial Sequence: Synthetic oligonucleotide
  Sense strand starting at position 397 of SEQ ID NO: 1245249
ugaguuaccuugccaaaga

SEQ ID NO: 1548155 - RNA, 19 nt, Artificial Sequence
  Description of Artificial Sequence: Synthetic oligonucleotide
  Antisense strand to SEQ ID NO: 1548154
ucuuuggcaagguaacuca

SEQ ID NO: 1548156 - RNA, 19 nt, Artificial Sequence
  Description of Artificial Sequence: Synthetic oligonucleotide
  Sense strand starting at position 407 of SEQ ID NO: 1245249
ugccaaagacaucagcuua

SEQ ID NO: 1548157 - RNA, 19 nt, Artificial Sequence
  Description of Artificial Sequence: Synthetic oligonucleotide
  Antisense strand to SEQ ID NO: 1548156
uaagcugaugucuuuggca

SEQ ID NO: 1548158 - RNA, 19 nt, Artificial Sequence
  Description of Artificial Sequence: Synthetic oligonucleotide
  Sense strand starting at position 814 of SEQ ID NO: 1245249
gaaagccugugaguaauca

SEQ ID NO: 1548159 - RNA, 19 nt, Artificial Sequence
  Description of Artificial Sequence: Synthetic oligonucleotide
  Antisense strand to SEQ ID NO: 1548158
ugauuacucacaggcuuuc

SEQ ID NO: 1548160 - RNA, 19 nt, Artificial Sequence
  Description of Artificial Sequence: Synthetic oligonucleotide
  Sense strand starting at position 815 of SEQ ID NO: 1245249
aaagccugugaguaaucaa

SEQ ID NO: 1548161 - RNA, 19 nt, Artificial Sequence
  Description of Artificial Sequence: Synthetic oligonucleotide
  Antisense strand to SEQ ID NO: 1548160
uugauuacucacaggcuuu

SEQ ID NO: 1548162 - RNA, 19 nt, Artificial Sequence
  Description of Artificial Sequence: Synthetic oligonucleotide
  Sense strand starting at position 928 of SEQ ID NO: 1245249
ucucguauucuuggaauuu

SEQ ID NO: 1548163 - RNA, 19 nt, Artificial Sequence
  Description of Artificial Sequence: Synthetic oligonucleotide
  Antisense strand to SEQ ID NO: 1548162
aaauuccaagaauacgaga

SEQ ID NO: 1548164 - RNA, 19 nt, Artificial Sequence
  Description of Artificial Sequence: Synthetic oligonucleotide
  Sense strand starting at position 1016 of SEQ ID NO: 1245249
acuaacuuggaagguuauu

SEQ ID NO: 1548165 - RNA, 19 nt, Artificial Sequence
  Description of Artificial Sequence: Synthetic oligonucleotide
  Antisense strand to SEQ ID NO: 1548164
aauaaccuuccaaguuagu

SEQ ID NO: 1548166 - RNA, 19 nt, Artificial Sequence
  Description of Artificial Sequence: Synthetic oligonucleotide
  Sense strand starting at position 1025 of SEQ ID NO: 1245249
gaagguuauuuaggacaau

SEQ ID NO: 1548167 - RNA, 19 nt, Artificial Sequence
  Description of Artificial Sequence: Synthetic oligonucleotide
  Antisense strand to SEQ ID NO: 1548166
auuguccuaaauaaccuuc

SEQ ID NO: 1548168 - RNA, 19 nt, Artificial Sequence
  Description of Artificial Sequence: Synthetic oligonucleotide
  Sense strand starting at position 1026 of SEQ ID NO: 1245249
aagguuauuuaggacaaua

SEQ ID NO: 1548169 - RNA, 19 nt, Artificial Sequence
  Description of Artificial Sequence: Synthetic oligonucleotide
  Antisense strand to SEQ ID NO: 1548168
uauuguccuaaauaaccuu

SEQ ID NO: 1548170 - RNA, 19 nt, Artificial Sequence
  Description of Artificial Sequence: Synthetic oligonucleotide
  Sense strand starting at position 1260 of SEQ ID NO: 1245249
guccaacuauucuuggauc

SEQ ID NO: 1548171 - RNA, 19 nt, Artificial Sequence
  Description of Artificial Sequence: Synthetic oligonucleotide
  Antisense strand to SEQ ID NO: 1548170
gauccaagaauaguuggac

SEQ ID NO: 1548172 - RNA, 19 nt, Artificial Sequence
  Description of Artificial Sequence: Synthetic oligonucleotide
  Sense strand starting at position 2128 of SEQ ID NO: 1245249
ucgcguuuacgguuccaaa

SEQ ID NO: 1548173 - RNA, 19 nt, Artificial Sequence
  Description of Artificial Sequence: Synthetic oligonucleotide
  Antisense strand to SEQ ID NO: 1548172
uuuggaaccguaaacgcga

SEQ ID NO: 1548174 - RNA, 19 nt, Artificial Sequence
  Description of Artificial Sequence: Synthetic oligonucleotide
  Sense strand starting at position 2240 of SEQ ID NO: 1245249
cgugaaaccuacuuaggua

SEQ ID NO: 1548175 - RNA, 19 nt, Artificial Sequence
  Description of Artificial Sequence: Synthetic oligonucleotide
  Antisense strand to SEQ ID NO: 1548174
uaccuaaguagguuucacg

SEQ ID NO: 1548176 - RNA, 19 nt, Artificial Sequence
  Description of Artificial Sequence: Synthetic oligonucleotide
  Sense strand starting at position 2366 of SEQ ID NO: 1245249
acuguaacacucugaugga

SEQ ID NO: 1548177 - RNA, 19 nt, Artificial Sequence
  Description of Artificial Sequence: Synthetic oligonucleotide
  Antisense strand to SEQ ID NO: 1548176
uccaucagaguguuacagu

SEQ ID NO: 1548178 - RNA, 19 nt, Artificial Sequence
  Description of Artificial Sequence: Synthetic oligonucleotide
  Sense strand starting at position 2429 of SEQ ID NO: 1245249
uuacuaaaguguuuaacuc

SEQ ID NO: 1548179 - RNA, 19 nt, Artificial Sequence
  Description of Artificial Sequence: Synthetic oligonucleotide
  Antisense strand to SEQ ID NO: 1548178
gaguuaaacacuuuaguaa

SEQ ID NO: 1548180 - RNA, 19 nt, Artificial Sequence
  Description of Artificial Sequence: Synthetic oligonucleotide
  Sense strand starting at position 2451 of SEQ ID NO: 1245249
ccucauacuuuagugaguu

SEQ ID NO: 1548181 - RNA, 19 nt, Artificial Sequence
  Description of Artificial Sequence: Synthetic oligonucleotide
  Antisense strand to SEQ ID NO: 1548180
aacucacuaaaguaugagg

SEQ ID NO: 1548182 - RNA, 19 nt, Artificial Sequence
  Description of Artificial Sequence: Synthetic oligonucleotide
  Sense strand starting at position 2505 of SEQ ID NO: 1245249
acaagauccuagguacuuu

SEQ ID NO: 1548183 - RNA, 19 nt, Artificial Sequence
  Description of Artificial Sequence: Synthetic oligonucleotide
  Antisense strand to SEQ ID NO: 1548182
aaaguaccuaggaucuugu

SEQ ID NO: 1548184 - RNA, 19 nt, Artificial Sequence
  Description of Artificial Sequence: Synthetic oligonucleotide
  Sense strand starting at position 2509 of SEQ ID NO: 1245249
gauccuagguacuuuaagu

SEQ ID NO: 1548185 - RNA, 19 nt, Artificial Sequence
  Description of Artificial Sequence: Synthetic oligonucleotide
  Antisense strand to SEQ ID NO: 1548184
acuuaaaguaccuaggauc

SEQ ID NO: 1548186 - RNA, 19 nt, Artificial Sequence
  Description of Artificial Sequence: Synthetic oligonucleotide
  Sense strand starting at position 2548 of SEQ ID NO: 1245249
cuguaauugcacuacagac

SEQ ID NO: 1548187 - RNA, 19 nt, Artificial Sequence
  Description of Artificial Sequence: Synthetic oligonucleotide
  Antisense strand to SEQ ID NO: 1548186
gucuguagugcaauuacag

SEQ ID NO: 1548188 - RNA, 19 nt, Artificial Sequence
  Description of Artificial Sequence: Synthetic oligonucleotide
  Sense strand starting at position 2564 of SEQ ID NO: 1245249
gaccuagaauguguuaaag

SEQ ID NO: 1548189 - RNA, 19 nt, Artificial Sequence
  Description of Artificial Sequence: Synthetic oligonucleotide
  Antisense strand to SEQ ID NO: 1548188
cuuuaacacauucuagguc

SEQ ID NO: 1548190 - RNA, 19 nt, Artificial Sequence
  Description of Artificial Sequence: Synthetic oligonucleotide
  Sense strand starting at position 2612 of SEQ ID NO: 1245249
gaaugaaugucagugaggu

SEQ ID NO: 1548191 - RNA, 19 nt, Artificial Sequence
  Description of Artificial Sequence: Synthetic oligonucleotide
  Antisense strand to SEQ ID NO: 1548190
accucacugacauucauuc

SEQ ID NO: 1548192 - RNA, 19 nt, Artificial Sequence
  Description of Artificial Sequence: Synthetic oligonucleotide
  Sense strand starting at position 2613 of SEQ ID NO: 1245249
aaugaaugucagugagguu

SEQ ID NO: 1548193 - RNA, 19 nt, Artificial Sequence
  Description of Artificial Sequence: Synthetic oligonucleotide
  Antisense strand to SEQ ID NO: 1548192
aaccucacugacauucauu

SEQ ID NO: 1548194 - RNA, 19 nt, Artificial Sequence
  Description of Artificial Sequence: Synthetic oligonucleotide
  Sense strand starting at position 2614 of SEQ ID NO: 1245249
augaaugucagugagguuu

SEQ ID NO: 1548195 - RNA, 19 nt, Artificial Sequence
  Description of Artificial Sequence: Synthetic oligonucleotide
  Antisense strand to SEQ ID NO: 1548194
aaaccucacugacauucau

SEQ ID NO: 1548196 - RNA, 19 nt, Artificial Sequence
  Description of Artificial Sequence: Synthetic oligonucleotide
  Sense strand starting at position 3034 of SEQ ID NO: 1245249
cuguuacuguacuuggaaa

SEQ ID NO: 1548197 - RNA, 19 nt, Artificial Sequence
  Description of Artificial Sequence: Synthetic oligonucleotide
  Antisense strand to SEQ ID NO: 1548196
uuuccaaguacaguaacag

SEQ ID NO: 1548198 - RNA, 19 nt, Artificial Sequence
  Description of Artificial Sequence: Synthetic oligonucleotide
  Sense strand starting at position 3134 of SEQ ID NO: 1245249
aguagugcuagguagcaaa

SEQ ID NO: 1548199 - RNA, 19 nt, Artificial Sequence
  Description of Artificial Sequence: Synthetic oligonucleotide
  Antisense strand to SEQ ID NO: 1548198
uuugcuaccuagcacuacu

SEQ ID NO: 1548200 - RNA, 19 nt, Artificial Sequence
  Description of Artificial Sequence: Synthetic oligonucleotide
  Sense strand starting at position 3326 of SEQ ID NO: 1245249
aguuuagauccagauuggu

SEQ ID NO: 1548201 - RNA, 19 nt, Artificial Sequence
  Description of Artificial Sequence: Synthetic oligonucleotide
  Antisense strand to SEQ ID NO: 1548200
accaaucuggaucuaaacu

SEQ ID NO: 1548202 - RNA, 19 nt, Artificial Sequence
  Description of Artificial Sequence: Synthetic oligonucleotide
  Sense strand starting at position 3332 of SEQ ID NO: 1245249
gauccagauuggucugauc

SEQ ID NO: 1548203 - RNA, 19 nt, Artificial Sequence
  Description of Artificial Sequence: Synthetic oligonucleotide
  Antisense strand to SEQ ID NO: 1548202
gaucagaccaaucuggauc

SEQ ID NO: 1548204 - RNA, 19 nt, Artificial Sequence
  Description of Artificial Sequence: Synthetic oligonucleotide
  Sense strand starting at position 3454 of SEQ ID NO: 1245249
uacaguugcuuccuuagga

SEQ ID NO: 1548205 - RNA, 19 nt, Artificial Sequence
  Description of Artificial Sequence: Synthetic oligonucleotide
  Antisense strand to SEQ ID NO: 1548204
uccuaaggaagcaacugua

SEQ ID NO: 1548206 - RNA, 19 nt, Artificial Sequence
  Description of Artificial Sequence: Synthetic oligonucleotide
  Sense strand starting at position 3455 of SEQ ID NO: 1245249
acaguugcuuccuuaggaa

SEQ ID NO: 1548207 - RNA, 19 nt, Artificial Sequence
  Description of Artificial Sequence: Synthetic oligonucleotide
  Antisense strand to SEQ ID NO: 1548206
uuccuaaggaagcaacugu

SEQ ID NO: 1548208 - RNA, 19 nt, Artificial Sequence
  Description of Artificial Sequence: Synthetic oligonucleotide
  Sense strand starting at position 3471 of SEQ ID NO: 1245249
gaagcuccaguuugugaau

SEQ ID NO: 1548209 - RNA, 19 nt, Artificial Sequence
  Description of Artificial Sequence: Synthetic oligonucleotide
  Antisense strand to SEQ ID NO: 1548208
auucacaaacuggagcuuc

SEQ ID NO: 1548210 - RNA, 19 nt, Artificial Sequence
  Description of Artificial Sequence: Synthetic oligonucleotide
  Sense strand starting at position 3472 of SEQ ID NO: 1245249
aagcuccaguuugugaaua

SEQ ID NO: 1548211 - RNA, 19 nt, Artificial Sequence
  Description of Artificial Sequence: Synthetic oligonucleotide
  Antisense strand to SEQ ID NO: 1548210
uauucacaaacuggagcuu

SEQ ID NO: 1548212 - RNA, 19 nt, Artificial Sequence
  Description of Artificial Sequence: Synthetic oligonucleotide
  Sense strand starting at position 3477 of SEQ ID NO: 1245249
ccaguuugugaauauauaa

SEQ ID NO: 1548213 - RNA, 19 nt, Artificial Sequence
  Description of Artificial Sequence: Synthetic oligonucleotide
  Antisense strand to SEQ ID NO: 1548212
uuauauauucacaaacugg

SEQ ID NO: 1548214 - RNA, 19 nt, Artificial Sequence
  Description of Artificial Sequence: Synthetic oligonucleotide
  Sense strand starting at position 3579 of SEQ ID NO: 1245249
guaugaggaaaugguuaca

SEQ ID NO: 1548215 - RNA, 19 nt, Artificial Sequence
  Description of Artificial Sequence: Synthetic oligonucleotide
  Antisense strand to SEQ ID NO: 1548214
uguaaccauuuccucauac

SEQ ID NO: 1548216 - RNA, 19 nt, Artificial Sequence
  Description of Artificial Sequence: Synthetic oligonucleotide
  Sense strand starting at position 3590 of SEQ ID NO: 1245249
ugguuacagucauccaaca

SEQ ID NO: 1548217 - RNA, 19 nt, Artificial Sequence
  Description of Artificial Sequence: Synthetic oligonucleotide
  Antisense strand to SEQ ID NO: 1548216
uguuggaugacuguaacca

SEQ ID NO: 1548218 - RNA, 19 nt, Artificial Sequence
  Description of Artificial Sequence: Synthetic oligonucleotide
  Sense strand starting at position 3607 of SEQ ID NO: 1245249
cagagcagccuugagaauu

SEQ ID NO: 1548219 - RNA, 19 nt, Artificial Sequence
  Description of Artificial Sequence: Synthetic oligonucleotide
  Antisense strand to SEQ ID NO: 1548218
aauucucaaggcugcucug

SEQ ID NO: 1548220 - RNA, 19 nt, Artificial Sequence
  Description of Artificial Sequence: Synthetic oligonucleotide
  Sense strand starting at position 68 of SEQ ID NO: 1245250
gaaauaauaucuguggcuc

SEQ ID NO: 1548221 - RNA, 19 nt, Artificial Sequence
  Description of Artificial Sequence: Synthetic oligonucleotide
  Antisense strand to SEQ ID NO: 1548220
gagccacagauauuauuuc

SEQ ID NO: 1548222 - RNA, 19 nt, Artificial Sequence
  Description of Artificial Sequence: Synthetic oligonucleotide
  Sense strand starting at position 385 of SEQ ID NO: 1245250
auaccugacugcucugaau

SEQ ID NO: 1548223 - RNA, 19 nt, Artificial Sequence
  Description of Artificial Sequence: Synthetic oligonucleotide
  Antisense strand to SEQ ID NO: 1548222
auucagagcagucagguau

SEQ ID NO: 1548224 - RNA, 19 nt, Artificial Sequence
  Description of Artificial Sequence: Synthetic oligonucleotide
  Sense strand starting at position 387 of SEQ ID NO: 1245250
accugacugcucugaauca

SEQ ID NO: 1548225 - RNA, 19 nt, Artificial Sequence
  Description of Artificial Sequence: Synthetic oligonucleotide
  Antisense strand to SEQ ID NO: 1548224
ugauucagagcagucaggu

SEQ ID NO: 1548226 - RNA, 19 nt, Artificial Sequence
  Description of Artificial Sequence: Synthetic oligonucleotide
  Sense strand starting at position 400 of SEQ ID NO: 1245250
gaaucaaagucggcuacaa

SEQ ID NO: 1548227 - RNA, 19 nt, Artificial Sequence
  Description of Artificial Sequence: Synthetic oligonucleotide
  Antisense strand to SEQ ID NO: 1548226
uuguagccgacuuugauuc

SEQ ID NO: 1548228 - RNA, 19 nt, Artificial Sequence
  Description of Artificial Sequence: Synthetic oligonucleotide
  Sense strand starting at position 402 of SEQ ID NO: 1245250
aucaaagucggcuacaaua

SEQ ID NO: 1548229 - RNA, 19 nt, Artificial Sequence
  Description of Artificial Sequence: Synthetic oligonucleotide
  Antisense strand to SEQ ID NO: 1548228
uauuguagccgacuuugau

SEQ ID NO: 1548230 - RNA, 19 nt, Artificial Sequence
  Description of Artificial Sequence: Synthetic oligonucleotide
  Sense strand starting at position 568 of SEQ ID NO: 1245250
acucaaacuuuggcaguua

SEQ ID NO: 1548231 - RNA, 19 nt, Artificial Sequence
  Description of Artificial Sequence: Synthetic oligonucleotide
  Antisense strand to SEQ ID NO: 1548230
uaacugccaaaguuugagu

SEQ ID NO: 1548232 - RNA, 19 nt, Artificial Sequence
  Description of Artificial Sequence: Synthetic oligonucleotide
  Sense strand starting at position 627 of SEQ ID NO: 1245250
guuacacugccugggagaa

SEQ ID NO: 1548233 - RNA, 19 nt, Artificial Sequence
  Description of Artificial Sequence: Synthetic oligonucleotide
  Antisense strand to SEQ ID NO: 1548232
uucucccaggcaguguaac

SEQ ID NO: 1548234 - RNA, 19 nt, Artificial Sequence
  Description of Artificial Sequence: Synthetic oligonucleotide
  Sense strand starting at position 628 of SEQ ID NO: 1245250
uuacacugccugggagaaa

SEQ ID NO: 1548235 - RNA, 19 nt, Artificial Sequence
  Description of Artificial Sequence: Synthetic oligonucleotide
  Antisense strand to SEQ ID NO: 1548234
uuucucccaggcaguguaa

SEQ ID NO: 1548236 - RNA, 19 nt, Artificial Sequence
  Description of Artificial Sequence: Synthetic oligonucleotide
  Sense strand starting at position 728 of SEQ ID NO: 1245250
cccaccuagugguuuagaa

SEQ ID NO: 1548237 - RNA, 19 nt, Artificial Sequence
  Description of Artificial Sequence: Synthetic oligonucleotide
  Antisense strand to SEQ ID NO: 1548236
uucuaaaccacuagguggg

SEQ ID NO: 1548238 - RNA, 19 nt, Artificial Sequence
  Description of Artificial Sequence: Synthetic oligonucleotide
  Sense strand starting at position 730 of SEQ ID NO: 1245250
caccuagugguuuagaauu

SEQ ID NO: 1548239 - RNA, 19 nt, Artificial Sequence
  Description of Artificial Sequence: Synthetic oligonucleotide
  Antisense strand to SEQ ID NO: 1548238
aauucuaaaccacuaggug

SEQ ID NO: 1548240 - RNA, 19 nt, Artificial Sequence
  Description of Artificial Sequence: Synthetic oligonucleotide
  Sense strand starting at position 771 of SEQ ID NO: 1245250
guuacuaugcuguaauuaa

SEQ ID NO: 1548241 - RNA, 19 nt, Artificial Sequence
  Description of Artificial Sequence: Synthetic oligonucleotide
  Antisense strand to SEQ ID NO: 1548240
uuaauuacagcauaguaac

SEQ ID NO: 1548242 - RNA, 19 nt, Artificial Sequence
  Description of Artificial Sequence: Synthetic oligonucleotide
  Sense strand starting at position 931 of SEQ ID NO: 1245250
uucccagaugcugaguaaa

SEQ ID NO: 1548243 - RNA, 19 nt, Artificial Sequence
  Description of Artificial Sequence: Synthetic oligonucleotide
  Antisense strand to SEQ ID NO: 1548242
uuuacucagcaucugggaa

SEQ ID NO: 1548244 - RNA, 19 nt, Artificial Sequence
  Description of Artificial Sequence: Synthetic oligonucleotide
  Sense strand starting at position 933 of SEQ ID NO: 1245250
cccagaugcugaguaaaga

SEQ ID NO: 1548245 - RNA, 19 nt, Artificial Sequence
  Description of Artificial Sequence: Synthetic oligonucleotide
  Antisense strand to SEQ ID NO: 1548244
ucuuuacucagcaucuggg

SEQ ID NO: 1548246 - RNA, 19 nt, Artificial Sequence
  Description of Artificial Sequence: Synthetic oligonucleotide
  Sense strand starting at position 1249 of SEQ ID NO: 1245250
ggauaagugaauuguuaaa

SEQ ID NO: 1548247 - RNA, 19 nt, Artificial Sequence
  Description of Artificial Sequence: Synthetic oligonucleotide
  Antisense strand to SEQ ID NO: 1548246
uuuaacaauucacuuaucc

SEQ ID NO: 1548248 - RNA, 19 nt, Artificial Sequence
  Description of Artificial Sequence: Synthetic oligonucleotide
  Sense strand starting at position 1301 of SEQ ID NO: 1245250
agaaucucccuuggauauu

SEQ ID NO: 1548249 - RNA, 19 nt, Artificial Sequence
  Description of Artificial Sequence: Synthetic oligonucleotide
  Antisense strand to SEQ ID NO: 1548248
aauauccaagggagauucu

SEQ ID NO: 1548250 - RNA, 19 nt, Artificial Sequence
  Description of Artificial Sequence: Synthetic oligonucleotide
  Sense strand starting at position 1377 of SEQ ID NO: 1245250
gcgugacuuccauugugca

SEQ ID NO: 1548251 - RNA, 19 nt, Artificial Sequence
  Description of Artificial Sequence: Synthetic oligonucleotide
  Antisense strand to SEQ ID NO: 1548250
ugcacaauggaagucacgc

SEQ ID NO: 1548252 - RNA, 19 nt, Artificial Sequence
  Description of Artificial Sequence: Synthetic oligonucleotide
  Sense strand starting at position 2222 of SEQ ID NO: 1245250
aggccuuacccggagacua

SEQ ID NO: 1548253 - RNA, 19 nt, Artificial Sequence
  Description of Artificial Sequence: Synthetic oligonucleotide
  Antisense strand to SEQ ID NO: 1548252
uagucuccggguaaggccu

SEQ ID NO: 1548254 - RNA, 19 nt, Artificial Sequence
  Description of Artificial Sequence: Synthetic oligonucleotide
  Sense strand starting at position 2289 of SEQ ID NO: 1245250
aauauaaguccuggguuaa

SEQ ID NO: 1548255 - RNA, 19 nt, Artificial Sequence
  Description of Artificial Sequence: Synthetic oligonucleotide
  Antisense strand to SEQ ID NO: 1548254
uuaacccaggacuuauauu

SEQ ID NO: 1548256 - RNA, 19 nt, Artificial Sequence
  Description of Artificial Sequence: Synthetic oligonucleotide
  Sense strand starting at position 2290 of SEQ ID NO: 1245250
auauaaguccuggguuaau

SEQ ID NO: 1548257 - RNA, 19 nt, Artificial Sequence
  Description of Artificial Sequence: Synthetic oligonucleotide
  Antisense strand to SEQ ID NO: 1548256
auuaacccaggacuuauau

SEQ ID NO: 1548258 - RNA, 19 nt, Artificial Sequence
  Description of Artificial Sequence: Synthetic oligonucleotide
  Sense strand starting at position 2299 of SEQ ID NO: 1245250
cuggguuaauagucugaag

SEQ ID NO: 1548259 - RNA, 19 nt, Artificial Sequence
  Description of Artificial Sequence: Synthetic oligonucleotide
  Antisense strand to SEQ ID NO: 1548258
cuucagacuauuaacccag

SEQ ID NO: 1548260 - RNA, 19 nt, Artificial Sequence
  Description of Artificial Sequence: Synthetic oligonucleotide
  Sense strand starting at position 2314 of SEQ ID NO: 1245250
gaagucugucauuaagcaa

SEQ ID NO: 1548261 - RNA, 19 nt, Artificial Sequence
  Description of Artificial Sequence: Synthetic oligonucleotide
  Antisense strand to SEQ ID NO: 1548260
uugcuuaaugacagacuuc

SEQ ID NO: 1548262 - RNA, 19 nt, Artificial Sequence
  Description of Artificial Sequence: Synthetic oligonucleotide
  Sense strand starting at position 2389 of SEQ ID NO: 1245250
gugggaacuuaauuggcaa

SEQ ID NO: 1548263 - RNA, 19 nt, Artificial Sequence
  Description of Artificial Sequence: Synthetic oligonucleotide
  Antisense strand to SEQ ID NO: 1548262
uugccaauuaaguucccac

SEQ ID NO: 1548264 - RNA, 19 nt, Artificial Sequence
  Description of Artificial Sequence: Synthetic oligonucleotide
  Sense strand starting at position 2396 of SEQ ID NO: 1245250
cuuaauuggcaauguaaau

SEQ ID NO: 1548265 - RNA, 19 nt, Artificial Sequence
  Description of Artificial Sequence: Synthetic oligonucleotide
  Antisense strand to SEQ ID NO: 1548264
auuuacauugccaauuaag

SEQ ID NO: 1548266 - RNA, 19 nt, Artificial Sequence
  Description of Artificial Sequence: Synthetic oligonucleotide
  Sense strand starting at position 2476 of SEQ ID NO: 1245250
gccauacagguguaaccau

SEQ ID NO: 1548267 - RNA, 19 nt, Artificial Sequence
  Description of Artificial Sequence: Synthetic oligonucleotide
  Antisense strand to SEQ ID NO: 1548266
augguuacaccuguauggc

SEQ ID NO: 1548268 - RNA, 19 nt, Artificial Sequence
  Description of Artificial Sequence: Synthetic oligonucleotide
  Sense strand starting at position 2496 of SEQ ID NO: 1245250
auagaauagauaugcguga

SEQ ID NO: 1548269 - RNA, 19 nt, Artificial Sequence
  Description of Artificial Sequence: Synthetic oligonucleotide
  Antisense strand to SEQ ID NO: 1548268
ucacgcauaucuauucuau

SEQ ID NO: 1548270 - RNA, 19 nt, Artificial Sequence
  Description of Artificial Sequence: Synthetic oligonucleotide
  Sense strand starting at position 2498 of SEQ ID NO: 1245250
agaauagauaugcgugaga

SEQ ID NO: 1548271 - RNA, 19 nt, Artificial Sequence
  Description of Artificial Sequence: Synthetic oligonucleotide
  Antisense strand to SEQ ID NO: 1548270
ucucacgcauaucuauucu

SEQ ID NO: 1548272 - RNA, 19 nt, Artificial Sequence
  Description of Artificial Sequence: Synthetic oligonucleotide
  Sense strand starting at position 2500 of SEQ ID NO: 1245250
aauagauaugcgugagaca

SEQ ID NO: 1548273 - RNA, 19 nt, Artificial Sequence
  Description of Artificial Sequence: Synthetic oligonucleotide
  Antisense strand to SEQ ID NO: 1548272
ugucucacgcauaucuauu

SEQ ID NO: 1548274 - RNA, 19 nt, Artificial Sequence
  Description of Artificial Sequence: Synthetic oligonucleotide
  Sense strand starting at position 2501 of SEQ ID NO: 1245250
auagauaugcgugagacaa

SEQ ID NO: 1548275 - RNA, 19 nt, Artificial Sequence
  Description of Artificial Sequence: Synthetic oligonucleotide
  Antisense strand to SEQ ID NO: 1548274
uugucucacgcauaucuau

SEQ ID NO: 1548276 - RNA, 19 nt, Artificial Sequence
  Description of Artificial Sequence: Synthetic oligonucleotide
  Sense strand starting at position 2582 of SEQ ID NO: 1245250
ggaguuagcaaauagucua

SEQ ID NO: 1548277 - RNA, 19 nt, Artificial Sequence
  Description of Artificial Sequence: Synthetic oligonucleotide
  Antisense strand to SEQ ID NO: 1548276
uagacuauuugcuaacucc

SEQ ID NO: 1548278 - RNA, 19 nt, Artificial Sequence
  Description of Artificial Sequence: Synthetic oligonucleotide
  Sense strand starting at position 2585 of SEQ ID NO: 1245250
guuagcaaauagucuauaa

SEQ ID NO: 1548279 - RNA, 19 nt, Artificial Sequence
  Description of Artificial Sequence: Synthetic oligonucleotide
  Antisense strand to SEQ ID NO: 1548278
uuauagacuauuugcuaac

SEQ ID NO: 1548280 - RNA, 19 nt, Artificial Sequence
  Description of Artificial Sequence: Synthetic oligonucleotide
  Sense strand starting at position 2589 of SEQ ID NO: 1245250
gcaaauagucuauaacgug

SEQ ID NO: 1548281 - RNA, 19 nt, Artificial Sequence
  Description of Artificial Sequence: Synthetic oligonucleotide
  Antisense strand to SEQ ID NO: 1548280
cacguuauagacuauuugc

SEQ ID NO: 1548282 - RNA, 19 nt, Artificial Sequence
  Description of Artificial Sequence: Synthetic oligonucleotide
  Sense strand starting at position 2595 of SEQ ID NO: 1245250
agucuauaacgugaagguu

SEQ ID NO: 1548283 - RNA, 19 nt, Artificial Sequence
  Description of Artificial Sequence: Synthetic oligonucleotide
  Antisense strand to SEQ ID NO: 1548282
aaccuucacguuauagacu

SEQ ID NO: 1548284 - RNA, 19 nt, Artificial Sequence
  Description of Artificial Sequence: Synthetic oligonucleotide
  Sense strand starting at position 2975 of SEQ ID NO: 1245250
ggaaauuacgagcauacga

SEQ ID NO: 1548285 - RNA, 19 nt, Artificial Sequence
  Description of Artificial Sequence: Synthetic oligonucleotide
  Antisense strand to SEQ ID NO: 1548284
ucguaugcucguaauuucc

SEQ ID NO: 1548286 - RNA, 19 nt, Artificial Sequence
  Description of Artificial Sequence: Synthetic oligonucleotide
  Sense strand starting at position 3101 of SEQ ID NO: 1245250
ccaucaagucuagaagcau

SEQ ID NO: 1548287 - RNA, 19 nt, Artificial Sequence
  Description of Artificial Sequence: Synthetic oligonucleotide
  Antisense strand to SEQ ID NO: 1548286
augcuucuagacuugaugg

SEQ ID NO: 1548288 - RNA, 19 nt, Artificial Sequence
  Description of Artificial Sequence: Synthetic oligonucleotide
  Sense strand starting at position 3170 of SEQ ID NO: 1245250
cagcauauggcagaucuuu

SEQ ID NO: 1548289 - RNA, 19 nt, Artificial Sequence
  Description of Artificial Sequence: Synthetic oligonucleotide
  Antisense strand to SEQ ID NO: 1548288
aaagaucugccauaugcug

SEQ ID NO: 1548290 - RNA, 19 nt, Artificial Sequence
  Description of Artificial Sequence: Synthetic oligonucleotide
  Sense strand starting at position 3299 of SEQ ID NO: 1245250
augugugguaacuaaagca

SEQ ID NO: 1548291 - RNA, 19 nt, Artificial Sequence
  Description of Artificial Sequence: Synthetic oligonucleotide
  Antisense strand to SEQ ID NO: 1548290
ugcuuuaguuaccacacau

SEQ ID NO: 1548292 - RNA, 19 nt, Artificial Sequence
  Description of Artificial Sequence: Synthetic oligonucleotide
  Sense strand starting at position 3348 of SEQ ID NO: 1245250
agggcuuacuaucuaagga

SEQ ID NO: 1548293 - RNA, 19 nt, Artificial Sequence
  Description of Artificial Sequence: Synthetic oligonucleotide
  Antisense strand to SEQ ID NO: 1548292
uccuuagauaguaagcccu

SEQ ID NO: 1548294 - RNA, 19 nt, Artificial Sequence
  Description of Artificial Sequence: Synthetic oligonucleotide
  Sense strand starting at position 3860 of SEQ ID NO: 1245250
aguaguaaucacuacaguu

SEQ ID NO: 1548295 - RNA, 19 nt, Artificial Sequence
  Description of Artificial Sequence: Synthetic oligonucleotide
  Antisense strand to SEQ ID NO: 1548294
aacuguagugauuacuacu

SEQ ID NO: 1548296 - RNA, 19 nt, Artificial Sequence
  Description of Artificial Sequence: Synthetic oligonucleotide
  Sense strand starting at position 3891 of SEQ ID NO: 1245250
aguuccaaucuugauagca

SEQ ID NO: 1548297 - RNA, 19 nt, Artificial Sequence
  Description of Artificial Sequence: Synthetic oligonucleotide
  Antisense strand to SEQ ID NO: 1548296
ugcuaucaagauuggaacu

SEQ ID NO: 1548298 - RNA, 19 nt, Artificial Sequence
  Description of Artificial Sequence: Synthetic oligonucleotide
  Sense strand starting at position 3934 of SEQ ID NO: 1245250
aggacuuuauuugguauuu

SEQ ID NO: 1548299 - RNA, 19 nt, Artificial Sequence
  Description of Artificial Sequence: Synthetic oligonucleotide
  Antisense strand to SEQ ID NO: 1548298
aaauaccaaauaaaguccu

SEQ ID NO: 1548300 - RNA, 19 nt, Artificial Sequence
  Description of Artificial Sequence: Synthetic oligonucleotide
  Sense strand starting at position 23 of SEQ ID NO: 1245251
gugcuagucacacgagaug

SEQ ID NO: 1548301 - RNA, 19 nt, Artificial Sequence
  Description of Artificial Sequence: Synthetic oligonucleotide
  Antisense strand to SEQ ID NO: 1548300
caucucgugugacuagcac

SEQ ID NO: 1548302 - RNA, 19 nt, Artificial Sequence
  Description of Artificial Sequence: Synthetic oligonucleotide
  Sense strand starting at position 167 of SEQ ID NO: 1245251
gugcuuauugucuacugua

SEQ ID NO: 1548303 - RNA, 19 nt, Artificial Sequence
  Description of Artificial Sequence: Synthetic oligonucleotide
  Antisense strand to SEQ ID NO: 1548302
uacaguagacaauaagcac

SEQ ID NO: 1548304 - RNA, 19 nt, Artificial Sequence
  Description of Artificial Sequence: Synthetic oligonucleotide
  Sense strand starting at position 205 of SEQ ID NO: 1245251
agagcuguguucccacuga

SEQ ID NO: 1548305 - RNA, 19 nt, Artificial Sequence
  Description of Artificial Sequence: Synthetic oligonucleotide
  Antisense strand to SEQ ID NO: 1548304
ucagugggaacacagcucu

SEQ ID NO: 1548306 - RNA, 19 nt, Artificial Sequence
  Description of Artificial Sequence: Synthetic oligonucleotide
  Sense strand starting at position 209 of SEQ ID NO: 1245251
cuguguucccacugagcua

SEQ ID NO: 1548307 - RNA, 19 nt, Artificial Sequence
  Description of Artificial Sequence: Synthetic oligonucleotide
  Antisense strand to SEQ ID NO: 1548306
uagcucagugggaacacag

SEQ ID NO: 1548308 - RNA, 19 nt, Artificial Sequence
  Description of Artificial Sequence: Synthetic oligonucleotide
  Sense strand starting at position 312 of SEQ ID NO: 1245251
uucugugcuccagagaaga

SEQ ID NO: 1548309 - RNA, 19 nt, Artificial Sequence
  Description of Artificial Sequence: Synthetic oligonucleotide
  Antisense strand to SEQ ID NO: 1548308
ucuucucuggagcacagaa

SEQ ID NO: 1548310 - RNA, 19 nt, Artificial Sequence
  Description of Artificial Sequence: Synthetic oligonucleotide
  Sense strand starting at position 364 of SEQ ID NO: 1245251
aggacaggaucuuaugaua

SEQ ID NO: 1548311 - RNA, 19 nt, Artificial Sequence
  Description of Artificial Sequence: Synthetic oligonucleotide
  Antisense strand to SEQ ID NO: 1548310
uaucauaagauccuguccu

SEQ ID NO: 1548312 - RNA, 19 nt, Artificial Sequence
  Description of Artificial Sequence: Synthetic oligonucleotide
  Sense strand starting at position 367 of SEQ ID NO: 1245251
acaggaucuuaugauaaau

SEQ ID NO: 1548313 - RNA, 19 nt, Artificial Sequence
  Description of Artificial Sequence: Synthetic oligonucleotide
  Antisense strand to SEQ ID NO: 1548312
auuuaucauaagauccugu

SEQ ID NO: 1548314 - RNA, 19 nt, Artificial Sequence
  Description of Artificial Sequence: Synthetic oligonucleotide
  Sense strand starting at position 369 of SEQ ID NO: 1245251
aggaucuuaugauaaauga

SEQ ID NO: 1548315 - RNA, 19 nt, Artificial Sequence
  Description of Artificial Sequence: Synthetic oligonucleotide
  Antisense strand to SEQ ID NO: 1548314
ucauuuaucauaagauccu

SEQ ID NO: 1548316 - RNA, 19 nt, Artificial Sequence
  Description of Artificial Sequence: Synthetic oligonucleotide
  Sense strand starting at position 489 of SEQ ID NO: 1245251
gccucaauccucugcagac

SEQ ID NO: 1548317 - RNA, 19 nt, Artificial Sequence
  Description of Artificial Sequence: Synthetic oligonucleotide
  Antisense strand to SEQ ID NO: 1548316
gucugcagaggauugaggc

SEQ ID NO: 1548318 - RNA, 19 nt, Artificial Sequence
  Description of Artificial Sequence: Synthetic oligonucleotide
  Sense strand starting at position 650 of SEQ ID NO: 1245251
uuaggagccuuucccacaa

SEQ ID NO: 1548319 - RNA, 19 nt, Artificial Sequence
  Description of Artificial Sequence: Synthetic oligonucleotide
  Antisense strand to SEQ ID NO: 1548318
uugugggaaaggcuccuaa

SEQ ID NO: 1548320 - RNA, 19 nt, Artificial Sequence
  Description of Artificial Sequence: Synthetic oligonucleotide
  Sense strand starting at position 711 of SEQ ID NO: 1245251
gcucaacucccagagagua

SEQ ID NO: 1548321 - RNA, 19 nt, Artificial Sequence
  Description of Artificial Sequence: Synthetic oligonucleotide
  Antisense strand to SEQ ID NO: 1548320
uacucucugggaguugagc

SEQ ID NO: 1548322 - RNA, 19 nt, Artificial Sequence
  Description of Artificial Sequence: Synthetic oligonucleotide
  Sense strand starting at position 723 of SEQ ID NO: 1245251
gagaguagccagcgaaaga

SEQ ID NO: 1548323 - RNA, 19 nt, Artificial Sequence
  Description of Artificial Sequence: Synthetic oligonucleotide
  Antisense strand to SEQ ID NO: 1548322
ucuuucgcuggcuacucuc

SEQ ID NO: 1548324 - RNA, 19 nt, Artificial Sequence
  Description of Artificial Sequence: Synthetic oligonucleotide
  Sense strand starting at position 1232 of SEQ ID NO: 1245251
ccuagauguuugguaccga

SEQ ID NO: 1548325 - RNA, 19 nt, Artificial Sequence
  Description of Artificial Sequence: Synthetic oligonucleotide
  Antisense strand to SEQ ID NO: 1548324
ucgguaccaaacaucuagg

SEQ ID NO: 1548326 - RNA, 19 nt, Artificial Sequence
  Description of Artificial Sequence: Synthetic oligonucleotide
  Sense strand starting at position 1460 of SEQ ID NO: 1245251
ucgccucucacucguggaa

SEQ ID NO: 1548327 - RNA, 19 nt, Artificial Sequence
  Description of Artificial Sequence: Synthetic oligonucleotide
  Antisense strand to SEQ ID NO: 1548326
uuccacgagugagaggcga

SEQ ID NO: 1548328 - RNA, 19 nt, Artificial Sequence
  Description of Artificial Sequence: Synthetic oligonucleotide
  Sense strand starting at position 1463 of SEQ ID NO: 1245251
ccucucacucguggaacaa

SEQ ID NO: 1548329 - RNA, 19 nt, Artificial Sequence
  Description of Artificial Sequence: Synthetic oligonucleotide
  Antisense strand to SEQ ID NO: 1548328
uuguuccacgagugagagg

SEQ ID NO: 1548330 - RNA, 19 nt, Artificial Sequence
  Description of Artificial Sequence: Synthetic oligonucleotide
  Sense strand starting at position 1781 of SEQ ID NO: 1245251
ugcgcugcaaucguagaau

SEQ ID NO: 1548331 - RNA, 19 nt, Artificial Sequence
  Description of Artificial Sequence: Synthetic oligonucleotide
  Antisense strand to SEQ ID NO: 1548330
auucuacgauugcagcgca

SEQ ID NO: 1548332 - RNA, 19 nt, Artificial Sequence
  Description of Artificial Sequence: Synthetic oligonucleotide
  Sense strand starting at position 1792 of SEQ ID NO: 1245251
cguagaaucgcaaggucug

SEQ ID NO: 1548333 - RNA, 19 nt, Artificial Sequence
  Description of Artificial Sequence: Synthetic oligonucleotide
  Antisense strand to SEQ ID NO: 1548332
cagaccuugcgauucuacg

SEQ ID NO: 1548334 - RNA, 19 nt, Artificial Sequence
  Description of Artificial Sequence: Synthetic oligonucleotide
  Sense strand starting at position 1793 of SEQ ID NO: 1245251
guagaaucgcaaggucuga

SEQ ID NO: 1548335 - RNA, 19 nt, Artificial Sequence
  Description of Artificial Sequence: Synthetic oligonucleotide
  Antisense strand to SEQ ID NO: 1548334
ucagaccuugcgauucuac

SEQ ID NO: 1548336 - RNA, 19 nt, Artificial Sequence
  Description of Artificial Sequence: Synthetic oligonucleotide
  Sense strand starting at position 1804 of SEQ ID NO: 1245251
aggucugagacuugugaaa

SEQ ID NO: 1548337 - RNA, 19 nt, Artificial Sequence
  Description of Artificial Sequence: Synthetic oligonucleotide
  Antisense strand to SEQ ID NO: 1548336
uuucacaagucucagaccu

SEQ ID NO: 1548338 - RNA, 19 nt, Artificial Sequence
  Description of Artificial Sequence: Synthetic oligonucleotide
  Sense strand starting at position 2390 of SEQ ID NO: 1245251
aucaccugucaguacuaau

SEQ ID NO: 1548339 - RNA, 19 nt, Artificial Sequence
  Description of Artificial Sequence: Synthetic oligonucleotide
  Antisense strand to SEQ ID NO: 1548338
auuaguacugacaggugau

SEQ ID NO: 1548340 - RNA, 19 nt, Artificial Sequence
  Description of Artificial Sequence: Synthetic oligonucleotide
  Sense strand starting at position 2417 of SEQ ID NO: 1245251
ugcugauggccugggagaa

SEQ ID NO: 1548341 - RNA, 19 nt, Artificial Sequence
  Description of Artificial Sequence: Synthetic oligonucleotide
  Antisense strand to SEQ ID NO: 1548340
uucucccaggccaucagca

SEQ ID NO: 1548342 - RNA, 19 nt, Artificial Sequence
  Description of Artificial Sequence: Synthetic oligonucleotide
  Sense strand starting at position 2443 of SEQ ID NO: 1245251
aucaaauaggcuuagagca

SEQ ID NO: 1548343 - RNA, 19 nt, Artificial Sequence
  Description of Artificial Sequence: Synthetic oligonucleotide
  Antisense strand to SEQ ID NO: 1548342
ugcucuaagccuauuugau

SEQ ID NO: 1548344 - RNA, 19 nt, Artificial Sequence
  Description of Artificial Sequence: Synthetic oligonucleotide
  Sense strand starting at position 2876 of SEQ ID NO: 1245251
auccuugcccuugaggaau

SEQ ID NO: 1548345 - RNA, 19 nt, Artificial Sequence
  Description of Artificial Sequence: Synthetic oligonucleotide
  Antisense strand to SEQ ID NO: 1548344
auuccucaagggcaaggau

SEQ ID NO: 1548346 - RNA, 19 nt, Artificial Sequence
  Description of Artificial Sequence: Synthetic oligonucleotide
  Sense strand starting at position 2887 of SEQ ID NO: 1245251
ugaggaauuugugaugaag

SEQ ID NO: 1548347 - RNA, 19 nt, Artificial Sequence
  Description of Artificial Sequence: Synthetic oligonucleotide
  Antisense strand to SEQ ID NO: 1548346
cuucaucacaaauuccuca

SEQ ID NO: 1548348 - RNA, 19 nt, Artificial Sequence
  Description of Artificial Sequence: Synthetic oligonucleotide
  Sense strand starting at position 2889 of SEQ ID NO: 1245251
aggaauuugugaugaaguu

SEQ ID NO: 1548349 - RNA, 19 nt, Artificial Sequence
  Description of Artificial Sequence: Synthetic oligonucleotide
  Antisense strand to SEQ ID NO: 1548348
aacuucaucacaaauuccu

SEQ ID NO: 1548350 - RNA, 19 nt, Artificial Sequence
  Description of Artificial Sequence: Synthetic oligonucleotide
  Sense strand starting at position 2940 of SEQ ID NO: 1245251
ugaaguauacuaugaauug

SEQ ID NO: 1548351 - RNA, 19 nt, Artificial Sequence
  Description of Artificial Sequence: Synthetic oligonucleotide
  Antisense strand to SEQ ID NO: 1548350
caauucauaguauacuuca

SEQ ID NO: 1548352 - RNA, 19 nt, Artificial Sequence
  Description of Artificial Sequence: Synthetic oligonucleotide
  Sense strand starting at position 2941 of SEQ ID NO: 1245251
gaaguauacuaugaauugu

SEQ ID NO: 1548353 - RNA, 19 nt, Artificial Sequence
  Description of Artificial Sequence: Synthetic oligonucleotide
  Antisense strand to SEQ ID NO: 1548352
acaauucauaguauacuuc

SEQ ID NO: 1548354 - RNA, 19 nt, Artificial Sequence
  Description of Artificial Sequence: Synthetic oligonucleotide
  Sense strand starting at position 3081 of SEQ ID NO: 1245251
uguauuaaccuuuggugua

SEQ ID NO: 1548355 - RNA, 19 nt, Artificial Sequence
  Description of Artificial Sequence: Synthetic oligonucleotide
  Antisense strand to SEQ ID NO: 1548354
uacaccaaagguuaauaca

SEQ ID NO: 1548356 - RNA, 19 nt, Artificial Sequence
  Description of Artificial Sequence: Synthetic oligonucleotide
  Sense strand starting at position 3238 of SEQ ID NO: 1245251
uugcuaugucgcccauguu

SEQ ID NO: 1548357 - RNA, 19 nt, Artificial Sequence
  Description of Artificial Sequence: Synthetic oligonucleotide
  Antisense strand to SEQ ID NO: 1548356
aacaugggcgacauagcaa

SEQ ID NO: 1548358 - RNA, 19 nt, Artificial Sequence
  Description of Artificial Sequence: Synthetic oligonucleotide
  Sense strand starting at position 3248 of SEQ ID NO: 1245251
gcccauguuguagugcaau

SEQ ID NO: 1548359 - RNA, 19 nt, Artificial Sequence
  Description of Artificial Sequence: Synthetic oligonucleotide
  Antisense strand to SEQ ID NO: 1548358
auugcacuacaacaugggc

SEQ ID NO: 1548360 - RNA, 19 nt, Artificial Sequence
  Description of Artificial Sequence: Synthetic oligonucleotide
  Sense strand starting at position 3254 of SEQ ID NO: 1245251
guuguagugcaaugccaua

SEQ ID NO: 1548361 - RNA, 19 nt, Artificial Sequence
  Description of Artificial Sequence: Synthetic oligonucleotide
  Antisense strand to SEQ ID NO: 1548360
uauggcauugcacuacaac

SEQ ID NO: 1548362 - RNA, 19 nt, Artificial Sequence
  Description of Artificial Sequence: Synthetic oligonucleotide
  Sense strand starting at position 3480 of SEQ ID NO: 1245251
ccacuauacucggccagaa

SEQ ID NO: 1548363 - RNA, 19 nt, Artificial Sequence
  Description of Artificial Sequence: Synthetic oligonucleotide
  Antisense strand to SEQ ID NO: 1548362
uucuggccgaguauagugg

SEQ ID NO: 1548364 - RNA, 19 nt, Artificial Sequence
  Description of Artificial Sequence: Synthetic oligonucleotide
  Sense strand starting at position 3513 of SEQ ID NO: 1245251
guucuuagagaagauguuu

SEQ ID NO: 1548365 - RNA, 19 nt, Artificial Sequence
  Description of Artificial Sequence: Synthetic oligonucleotide
  Antisense strand to SEQ ID NO: 1548364
aaacaucuucucuaagaac

SEQ ID NO: 1548366 - RNA, 19 nt, Artificial Sequence
  Description of Artificial Sequence: Synthetic oligonucleotide
  Sense strand starting at position 3596 of SEQ ID NO: 1245251
agauguuuccacuguuaag

SEQ ID NO: 1548367 - RNA, 19 nt, Artificial Sequence
  Description of Artificial Sequence: Synthetic oligonucleotide
  Antisense strand to SEQ ID NO: 1548366
cuuaacaguggaaacaucu

SEQ ID NO: 1548368 - RNA, 19 nt, Artificial Sequence
  Description of Artificial Sequence: Synthetic oligonucleotide
  Sense strand starting at position 3776 of SEQ ID NO: 1245251
cuguuauaugcugggacuu

SEQ ID NO: 1548369 - RNA, 19 nt, Artificial Sequence
  Description of Artificial Sequence: Synthetic oligonucleotide
  Antisense strand to SEQ ID NO: 1548368
aagucccagcauauaacag

SEQ ID NO: 1548370 - RNA, 19 nt, Artificial Sequence
  Description of Artificial Sequence: Synthetic oligonucleotide
  Sense strand starting at position 3777 of SEQ ID NO: 1245251
uguuauaugcugggacuua

SEQ ID NO: 1548371 - RNA, 19 nt, Artificial Sequence
  Description of Artificial Sequence: Synthetic oligonucleotide
  Antisense strand to SEQ ID NO: 1548370
uaagucccagcauauaaca

SEQ ID NO: 1548372 - RNA, 19 nt, Artificial Sequence
  Description of Artificial Sequence: Synthetic oligonucleotide
  Sense strand starting at position 3790 of SEQ ID NO: 1245251
gacuuagugccagggagua

SEQ ID NO: 1548373 - RNA, 19 nt, Artificial Sequence
  Description of Artificial Sequence: Synthetic oligonucleotide
  Antisense strand to SEQ ID NO: 1548372
uacucccuggcacuaaguc

SEQ ID NO: 1548374 - RNA, 19 nt, Artificial Sequence
  Description of Artificial Sequence: Synthetic oligonucleotide
  Sense strand starting at position 3812 of SEQ ID NO: 1245251
uuacaaagccacugaguua

SEQ ID NO: 1548375 - RNA, 19 nt, Artificial Sequence
  Description of Artificial Sequence: Synthetic oligonucleotide
  Antisense strand to SEQ ID NO: 1548374
uaacucaguggcuuuguaa

SEQ ID NO: 1548376 - RNA, 19 nt, Artificial Sequence
  Description of Artificial Sequence: Synthetic oligonucleotide
  Sense strand starting at position 3833 of SEQ ID NO: 1245251
aucacugcccuuuagagaa

SEQ ID NO: 1548377 - RNA, 19 nt, Artificial Sequence
  Description of Artificial Sequence: Synthetic oligonucleotide
  Antisense strand to SEQ ID NO: 1548376
uucucuaaagggcagugau

SEQ ID NO: 1548378 - RNA, 19 nt, Artificial Sequence
  Description of Artificial Sequence: Synthetic oligonucleotide
  Sense strand starting at position 3873 of SEQ ID NO: 1245251
cggauauguaaacagaguu

SEQ ID NO: 1548379 - RNA, 19 nt, Artificial Sequence
  Description of Artificial Sequence: Synthetic oligonucleotide
  Antisense strand to SEQ ID NO: 1548378
aacucuguuuacauauccg

SEQ ID NO: 1548380 - RNA, 19 nt, Artificial Sequence
  Description of Artificial Sequence: Synthetic oligonucleotide
  Sense strand starting at position 45 of SEQ ID NO: 1245252
agcuguaaaguuuaagaca

SEQ ID NO: 1548381 - RNA, 19 nt, Artificial Sequence
  Description of Artificial Sequence: Synthetic oligonucleotide
  Antisense strand to SEQ ID NO: 1548380
ugucuuaaacuuuacagcu

SEQ ID NO: 1548382 - RNA, 19 nt, Artificial Sequence
  Description of Artificial Sequence: Synthetic oligonucleotide
  Sense strand starting at position 48 of SEQ ID NO: 1245252
uguaaaguuuaagacaaag

SEQ ID NO: 1548383 - RNA, 19 nt, Artificial Sequence
  Description of Artificial Sequence: Synthetic oligonucleotide
  Antisense strand to SEQ ID NO: 1548382
cuuugucuuaaacuuuaca

SEQ ID NO: 1548384 - RNA, 19 nt, Artificial Sequence
  Description of Artificial Sequence: Synthetic oligonucleotide
  Sense strand starting at position 2057 of SEQ ID NO: 1245252
cggaucugggcucauugaa

SEQ ID NO: 1548385 - RNA, 19 nt, Artificial Sequence
  Description of Artificial Sequence: Synthetic oligonucleotide
  Antisense strand to SEQ ID NO: 1548384
uucaaugagcccagauccg

SEQ ID NO: 1548386 - RNA, 19 nt, Artificial Sequence
  Description of Artificial Sequence: Synthetic oligonucleotide
  Sense strand starting at position 2128 of SEQ ID NO: 1245252
ccgcgugugccucauaaau

SEQ ID NO: 1548387 - RNA, 19 nt, Artificial Sequence
  Description of Artificial Sequence: Synthetic oligonucleotide
  Antisense strand to SEQ ID NO: 1548386
auuuaugaggcacacgcgg

SEQ ID NO: 1548388 - RNA, 19 nt, Artificial Sequence
  Description of Artificial Sequence: Synthetic oligonucleotide
  Sense strand starting at position 2145 of SEQ ID NO: 1245252
auauucaucgccggcauga

SEQ ID NO: 1548389 - RNA, 19 nt, Artificial Sequence
  Description of Artificial Sequence: Synthetic oligonucleotide
  Antisense strand to SEQ ID NO: 1548388
ucaugccggcgaugaauau

SEQ ID NO: 1548390 - RNA, 19 nt, Artificial Sequence
  Description of Artificial Sequence: Synthetic oligonucleotide
  Sense strand starting at position 2164 of SEQ ID NO: 1245252
cggcauuccagggaggagu

SEQ ID NO: 1548391 - RNA, 19 nt, Artificial Sequence
  Description of Artificial Sequence: Synthetic oligonucleotide
  Antisense strand to SEQ ID NO: 1548390
acuccucccuggaaugccg

SEQ ID NO: 1548392 - RNA, 19 nt, Artificial Sequence
  Description of Artificial Sequence: Synthetic oligonucleotide
  Sense strand starting at position 2261 of SEQ ID NO: 1245252
ggcaguuucccgggagguu

SEQ ID NO: 1548393 - RNA, 19 nt, Artificial Sequence
  Description of Artificial Sequence: Synthetic oligonucleotide
  Antisense strand to SEQ ID NO: 1548392
aaccucccgggaaacugcc

SEQ ID NO: 1548394 - RNA, 19 nt, Artificial Sequence
  Description of Artificial Sequence: Synthetic oligonucleotide
  Sense strand starting at position 2319 of SEQ ID NO: 1245252
cgcgguaaaccuugggagu

SEQ ID NO: 1548395 - RNA, 19 nt, Artificial Sequence
  Description of Artificial Sequence: Synthetic oligonucleotide
  Antisense strand to SEQ ID NO: 1548394
acucccaagguuuaccgcg

SEQ ID NO: 1548396 - RNA, 19 nt, Artificial Sequence
  Description of Artificial Sequence: Synthetic oligonucleotide
  Sense strand starting at position 2320 of SEQ ID NO: 1245252
gcgguaaaccuugggaguu

SEQ ID NO: 1548397 - RNA, 19 nt, Artificial Sequence
  Description of Artificial Sequence: Synthetic oligonucleotide
  Antisense strand to SEQ ID NO: 1548396
aacucccaagguuuaccgc

SEQ ID NO: 1548398 - RNA, 19 nt, Artificial Sequence
  Description of Artificial Sequence: Synthetic oligonucleotide
  Sense strand starting at position 2467 of SEQ ID NO: 1245252
cguugaacucugugccaga

SEQ ID NO: 1548399 - RNA, 19 nt, Artificial Sequence
  Description of Artificial Sequence: Synthetic oligonucleotide
  Antisense strand to SEQ ID NO: 1548398
ucuggcacagaguucaacg

SEQ ID NO: 1548400 - RNA, 19 nt, Artificial Sequence
  Description of Artificial Sequence: Synthetic oligonucleotide
  Sense strand starting at position 2478 of SEQ ID NO: 1245252
gugccagaguucuuaauga

SEQ ID NO: 1548401 - RNA, 19 nt, Artificial Sequence
  Description of Artificial Sequence: Synthetic oligonucleotide
  Antisense strand to SEQ ID NO: 1548400
ucauuaagaacucuggcac

SEQ ID NO: 1548402 - RNA, 19 nt, Artificial Sequence
  Description of Artificial Sequence: Synthetic oligonucleotide
  Sense strand starting at position 2486 of SEQ ID NO: 1245252
guucuuaaugaacacgaau

SEQ ID NO: 1548403 - RNA, 19 nt, Artificial Sequence
  Description of Artificial Sequence: Synthetic oligonucleotide
  Antisense strand to SEQ ID NO: 1548402
auucguguucauuaagaac

SEQ ID NO: 1548404 - RNA, 19 nt, Artificial Sequence
  Description of Artificial Sequence: Synthetic oligonucleotide
  Sense strand starting at position 2538 of SEQ ID NO: 1245252
uccagcuugccagaugacu

SEQ ID NO: 1548405 - RNA, 19 nt, Artificial Sequence
  Description of Artificial Sequence: Synthetic oligonucleotide
  Antisense strand to SEQ ID NO: 1548404
agucaucuggcaagcugga

SEQ ID NO: 1548406 - RNA, 19 nt, Artificial Sequence
  Description of Artificial Sequence: Synthetic oligonucleotide
  Sense strand starting at position 2636 of SEQ ID NO: 1245252
gcgcccauuguaugagaua

SEQ ID NO: 1548407 - RNA, 19 nt, Artificial Sequence
  Description of Artificial Sequence: Synthetic oligonucleotide
  Antisense strand to SEQ ID NO: 1548406
uaucucauacaaugggcgc

SEQ ID NO: 1548408 - RNA, 19 nt, Artificial Sequence
  Description of Artificial Sequence: Synthetic oligonucleotide
  Sense strand starting at position 2755 of SEQ ID NO: 1245252
gggaauucuaacugaggcu

SEQ ID NO: 1548409 - RNA, 19 nt, Artificial Sequence
  Description of Artificial Sequence: Synthetic oligonucleotide
  Antisense strand to SEQ ID NO: 1548408
agccucaguuagaauuccc

SEQ ID NO: 1548410 - RNA, 19 nt, Artificial Sequence
  Description of Artificial Sequence: Synthetic oligonucleotide
  Sense strand starting at position 2767 of SEQ ID NO: 1245252
ugaggcugucguugaaugu

SEQ ID NO: 1548411 - RNA, 19 nt, Artificial Sequence
  Description of Artificial Sequence: Synthetic oligonucleotide
  Antisense strand to SEQ ID NO: 1548410
acauucaacgacagccuca

SEQ ID NO: 1548412 - RNA, 19 nt, Artificial Sequence
  Description of Artificial Sequence: Synthetic oligonucleotide
  Sense strand starting at position 2777 of SEQ ID NO: 1245252
guugaaugugcuuguucga

SEQ ID NO: 1548413 - RNA, 19 nt, Artificial Sequence
  Description of Artificial Sequence: Synthetic oligonucleotide
  Antisense strand to SEQ ID NO: 1548412
ucgaacaagcacauucaac

SEQ ID NO: 1548414 - RNA, 19 nt, Artificial Sequence
  Description of Artificial Sequence: Synthetic oligonucleotide
  Sense strand starting at position 2880 of SEQ ID NO: 1245252
gcucuugaagucugaagua

SEQ ID NO: 1548415 - RNA, 19 nt, Artificial Sequence
  Description of Artificial Sequence: Synthetic oligonucleotide
  Antisense strand to SEQ ID NO: 1548414
uacuucagacuucaagagc

SEQ ID NO: 1548416 - RNA, 19 nt, Artificial Sequence
  Description of Artificial Sequence: Synthetic oligonucleotide
  Sense strand starting at position 2885 of SEQ ID NO: 1245252
ugaagucugaaguaguuua

SEQ ID NO: 1548417 - RNA, 19 nt, Artificial Sequence
  Description of Artificial Sequence: Synthetic oligonucleotide
  Antisense strand to SEQ ID NO: 1548416
uaaacuacuucagacuuca

SEQ ID NO: 1548418 - RNA, 19 nt, Artificial Sequence
  Description of Artificial Sequence: Synthetic oligonucleotide
  Sense strand starting at position 2896 of SEQ ID NO: 1245252
guaguuuaaugacacagaa

SEQ ID NO: 1548419 - RNA, 19 nt, Artificial Sequence
  Description of Artificial Sequence: Synthetic oligonucleotide
  Antisense strand to SEQ ID NO: 1548418
uucugugucauuaaacuac

SEQ ID NO: 1548420 - RNA, 19 nt, Artificial Sequence
  Description of Artificial Sequence: Synthetic oligonucleotide
  Sense strand starting at position 2909 of SEQ ID NO: 1245252
acagaaagcacugguaagu

SEQ ID NO: 1548421 - RNA, 19 nt, Artificial Sequence
  Description of Artificial Sequence: Synthetic oligonucleotide
  Antisense strand to SEQ ID NO: 1548420
acuuaccagugcuuucugu

SEQ ID NO: 1548422 - RNA, 19 nt, Artificial Sequence
  Description of Artificial Sequence: Synthetic oligonucleotide
  Sense strand starting at position 2929 of SEQ ID NO: 1245252
gaagaaacauuagaaugga

SEQ ID NO: 1548423 - RNA, 19 nt, Artificial Sequence
  Description of Artificial Sequence: Synthetic oligonucleotide
  Antisense strand to SEQ ID NO: 1548422
uccauucuaauguuucuuc

SEQ ID NO: 1548424 - RNA, 19 nt, Artificial Sequence
  Description of Artificial Sequence: Synthetic oligonucleotide
  Sense strand starting at position 2944 of SEQ ID NO: 1245252
uggaguaugagaugggcuu

SEQ ID NO: 1548425 - RNA, 19 nt, Artificial Sequence
  Description of Artificial Sequence: Synthetic oligonucleotide
  Antisense strand to SEQ ID NO: 1548424
aagcccaucucauacucca

SEQ ID NO: 1548426 - RNA, 19 nt, Artificial Sequence
  Description of Artificial Sequence: Synthetic oligonucleotide
  Sense strand starting at position 2945 of SEQ ID NO: 1245252
ggaguaugagaugggcuuu

SEQ ID NO: 1548427 - RNA, 19 nt, Artificial Sequence
  Description of Artificial Sequence: Synthetic oligonucleotide
  Antisense strand to SEQ ID NO: 1548426
aaagcccaucucauacucc

SEQ ID NO: 1548428 - RNA, 19 nt, Artificial Sequence
  Description of Artificial Sequence: Synthetic oligonucleotide
  Sense strand starting at position 2968 of SEQ ID NO: 1245252
acguguucugucuuaacgu

SEQ ID NO: 1548429 - RNA, 19 nt, Artificial Sequence
  Description of Artificial Sequence: Synthetic oligonucleotide
  Antisense strand to SEQ ID NO: 1548428
acguuaagacagaacacgu

SEQ ID NO: 1548430 - RNA, 19 nt, Artificial Sequence
  Description of Artificial Sequence: Synthetic oligonucleotide
  Sense strand starting at position 3046 of SEQ ID NO: 1245252
auguuuagucguggucuga

SEQ ID NO: 1548431 - RNA, 19 nt, Artificial Sequence
  Description of Artificial Sequence: Synthetic oligonucleotide
  Antisense strand to SEQ ID NO: 1548430
ucagaccacgacuaaacau

SEQ ID NO: 1548432 - RNA, 19 nt, Artificial Sequence
  Description of Artificial Sequence: Synthetic oligonucleotide
  Sense strand starting at position 3095 of SEQ ID NO: 1245252
guuguaaucauugggcagu

SEQ ID NO: 1548433 - RNA, 19 nt, Artificial Sequence
  Description of Artificial Sequence: Synthetic oligonucleotide
  Antisense strand to SEQ ID NO: 1548432
acugcccaaugauuacaac

SEQ ID NO: 1548434 - RNA, 19 nt, Artificial Sequence
  Description of Artificial Sequence: Synthetic oligonucleotide
  Sense strand starting at position 3097 of SEQ ID NO: 1245252
uguaaucauugggcaguuu

SEQ ID NO: 1548435 - RNA, 19 nt, Artificial Sequence
  Description of Artificial Sequence: Synthetic oligonucleotide
  Antisense strand to SEQ ID NO: 1548434
aaacugcccaaugauuaca

SEQ ID NO: 1548436 - RNA, 19 nt, Artificial Sequence
  Description of Artificial Sequence: Synthetic oligonucleotide
  Sense strand starting at position 3098 of SEQ ID NO: 1245252
guaaucauugggcaguuua

SEQ ID NO: 1548437 - RNA, 19 nt, Artificial Sequence
  Description of Artificial Sequence: Synthetic oligonucleotide
  Antisense strand to SEQ ID NO: 1548436
uaaacugcccaaugauuac

SEQ ID NO: 1548438 - RNA, 19 nt, Artificial Sequence
  Description of Artificial Sequence: Synthetic oligonucleotide
  Sense strand starting at position 3106 of SEQ ID NO: 1245252
ugggcaguuuacuauuuaa

SEQ ID NO: 1548439 - RNA, 19 nt, Artificial Sequence
  Description of Artificial Sequence: Synthetic oligonucleotide
  Antisense strand to SEQ ID NO: 1548438
uuaaauaguaaacugccca

SEQ ID NO: 1548440 - RNA, 19 nt, Artificial Sequence
  Description of Artificial Sequence: Synthetic oligonucleotide
  Sense strand starting at position 3169 of SEQ ID NO: 1245252
ugcuuuguaauucgggauu

SEQ ID NO: 1548441 - RNA, 19 nt, Artificial Sequence
  Description of Artificial Sequence: Synthetic oligonucleotide
  Antisense strand to SEQ ID NO: 1548440
aaucccgaauuacaaagca

SEQ ID NO: 1548442 - RNA, 19 nt, Artificial Sequence
  Description of Artificial Sequence: Synthetic oligonucleotide
  Sense strand starting at position 3436 of SEQ ID NO: 1245252
ccggcaggucucaagcgau

SEQ ID NO: 1548443 - RNA, 19 nt, Artificial Sequence
  Description of Artificial Sequence: Synthetic oligonucleotide
  Antisense strand to SEQ ID NO: 1548442
aucgcuugagaccugccgg

SEQ ID NO: 1548444 - RNA, 19 nt, Artificial Sequence
  Description of Artificial Sequence: Synthetic oligonucleotide
  Sense strand starting at position 3596 of SEQ ID NO: 1245252
ugacuaaacuugcagauga

SEQ ID NO: 1548445 - RNA, 19 nt, Artificial Sequence
  Description of Artificial Sequence: Synthetic oligonucleotide
  Antisense strand to SEQ ID NO: 1548444
ucaucugcaaguuuaguca

SEQ ID NO: 1548446 - RNA, 19 nt, Artificial Sequence
  Description of Artificial Sequence: Synthetic oligonucleotide
  Sense strand starting at position 3648 of SEQ ID NO: 1245252
gaacuuaccgcuuagguua

SEQ ID NO: 1548447 - RNA, 19 nt, Artificial Sequence
  Description of Artificial Sequence: Synthetic oligonucleotide
  Antisense strand to SEQ ID NO: 1548446
uaaccuaagcgguaaguuc

SEQ ID NO: 1548448 - RNA, 19 nt, Artificial Sequence
  Description of Artificial Sequence: Synthetic oligonucleotide
  Sense strand starting at position 3655 of SEQ ID NO: 1245252
ccgcuuagguuaucacagu

SEQ ID NO: 1548449 - RNA, 19 nt, Artificial Sequence
  Description of Artificial Sequence: Synthetic oligonucleotide
  Antisense strand to SEQ ID NO: 1548448
acugugauaaccuaagcgg

SEQ ID NO: 1548450 - RNA, 19 nt, Artificial Sequence
  Description of Artificial Sequence: Synthetic oligonucleotide
  Sense strand starting at position 3854 of SEQ ID NO: 1245252
auugcaaguucucccaaga

SEQ ID NO: 1548451 - RNA, 19 nt, Artificial Sequence
  Description of Artificial Sequence: Synthetic oligonucleotide
  Antisense strand to SEQ ID NO: 1548450
ucuugggagaacuugcaau

SEQ ID NO: 1548452 - RNA, 19 nt, Artificial Sequence
  Description of Artificial Sequence: Synthetic oligonucleotide
  Sense strand starting at position 3859 of SEQ ID NO: 1245252
aaguucucccaagagugau

SEQ ID NO: 1548453 - RNA, 19 nt, Artificial Sequence
  Description of Artificial Sequence: Synthetic oligonucleotide
  Antisense strand to SEQ ID NO: 1548452
aucacucuugggagaacuu

SEQ ID NO: 1548454 - RNA, 19 nt, Artificial Sequence
  Description of Artificial Sequence: Synthetic oligonucleotide
  Sense strand starting at position 3865 of SEQ ID NO: 1245252
ucccaagagugauaacauu

SEQ ID NO: 1548455 - RNA, 19 nt, Artificial Sequence
  Description of Artificial Sequence: Synthetic oligonucleotide
  Antisense strand to SEQ ID NO: 1548454
aauguuaucacucuuggga

SEQ ID NO: 1548456 - RNA, 19 nt, Artificial Sequence
  Description of Artificial Sequence: Synthetic oligonucleotide
  Sense strand starting at position 3926 of SEQ ID NO: 1245252
uguaccagucaccguguua

SEQ ID NO: 1548457 - RNA, 19 nt, Artificial Sequence
  Description of Artificial Sequence: Synthetic oligonucleotide
  Antisense strand to SEQ ID NO: 1548456
uaacacggugacugguaca

SEQ ID NO: 1548458 - RNA, 19 nt, Artificial Sequence
  Description of Artificial Sequence: Synthetic oligonucleotide
  Sense strand starting at position 3941 of SEQ ID NO: 1245252
guuauagcaguugaauaaa

SEQ ID NO: 1548459 - RNA, 19 nt, Artificial Sequence
  Description of Artificial Sequence: Synthetic oligonucleotide
  Antisense strand to SEQ ID NO: 1548458
uuuauucaacugcuauaac

SEQ ID NO: 1548460 - RNA, 19 nt, Artificial Sequence
  Description of Artificial Sequence: Synthetic oligonucleotide
  Sense strand starting at position 13 of SEQ ID NO: 1245253
acagcugauuuacaggaaa

SEQ ID NO: 1548461 - RNA, 19 nt, Artificial Sequence
  Description of Artificial Sequence: Synthetic oligonucleotide
  Antisense strand to SEQ ID NO: 1548460
uuuccuguaaaucagcugu

SEQ ID NO: 1548462 - RNA, 19 nt, Artificial Sequence
  Description of Artificial Sequence: Synthetic oligonucleotide
  Sense strand starting at position 35 of SEQ ID NO: 1245253
ggaugaagcugauccacaa

SEQ ID NO: 1548463 - RNA, 19 nt, Artificial Sequence
  Description of Artificial Sequence: Synthetic oligonucleotide
  Antisense strand to SEQ ID NO: 1548462
uuguggaucagcuucaucc

SEQ ID NO: 1548464 - RNA, 19 nt, Artificial Sequence
  Description of Artificial Sequence: Synthetic oligonucleotide
  Sense strand starting at position 165 of SEQ ID NO: 1245253
cucuauaagagcgaguaaa

SEQ ID NO: 1548465 - RNA, 19 nt, Artificial Sequence
  Description of Artificial Sequence: Synthetic oligonucleotide
  Antisense strand to SEQ ID NO: 1548464
uuuacucgcucuuauagag

SEQ ID NO: 1548466 - RNA, 19 nt, Artificial Sequence
  Description of Artificial Sequence: Synthetic oligonucleotide
  Sense strand starting at position 201 of SEQ ID NO: 1245253
agcuuuggccaacaacauu

SEQ ID NO: 1548467 - RNA, 19 nt, Artificial Sequence
  Description of Artificial Sequence: Synthetic oligonucleotide
  Antisense strand to SEQ ID NO: 1548466
aauguuguuggccaaagcu

SEQ ID NO: 1548468 - RNA, 19 nt, Artificial Sequence
  Description of Artificial Sequence: Synthetic oligonucleotide
  Sense strand starting at position 287 of SEQ ID NO: 1245253
uuguauacaucuguuacua

SEQ ID NO: 1548469 - RNA, 19 nt, Artificial Sequence
  Description of Artificial Sequence: Synthetic oligonucleotide
  Antisense strand to SEQ ID NO: 1548468
uaguaacagauguauacaa

SEQ ID NO: 1548470 - RNA, 19 nt, Artificial Sequence
  Description of Artificial Sequence: Synthetic oligonucleotide
  Sense strand starting at position 517 of SEQ ID NO: 1245253
ugguucucugcauaaacua

SEQ ID NO: 1548471 - RNA, 19 nt, Artificial Sequence
  Description of Artificial Sequence: Synthetic oligonucleotide
  Antisense strand to SEQ ID NO: 1548470
uaguuuaugcagagaacca

SEQ ID NO: 1548472 - RNA, 19 nt, Artificial Sequence
  Description of Artificial Sequence: Synthetic oligonucleotide
  Sense strand starting at position 560 of SEQ ID NO: 1245253
auguguuuacugggaacuu

SEQ ID NO: 1548473 - RNA, 19 nt, Artificial Sequence
  Description of Artificial Sequence: Synthetic oligonucleotide
  Antisense strand to SEQ ID NO: 1548472
aaguucccaguaaacacau

SEQ ID NO: 1548474 - RNA, 19 nt, Artificial Sequence
  Description of Artificial Sequence: Synthetic oligonucleotide
  Sense strand starting at position 631 of SEQ ID NO: 1245253
ccaacaaucuccguuuaga

SEQ ID NO: 1548475 - RNA, 19 nt, Artificial Sequence
  Description of Artificial Sequence: Synthetic oligonucleotide
  Antisense strand to SEQ ID NO: 1548474
ucuaaacggagauuguugg

SEQ ID NO: 1548476 - RNA, 19 nt, Artificial Sequence
  Description of Artificial Sequence: Synthetic oligonucleotide
  Sense strand starting at position 641 of SEQ ID NO: 1245253
ccguuuagagcagaggaua

SEQ ID NO: 1548477 - RNA, 19 nt, Artificial Sequence
  Description of Artificial Sequence: Synthetic oligonucleotide
  Antisense strand to SEQ ID NO: 1548476
uauccucugcucuaaacgg

SEQ ID NO: 1548478 - RNA, 19 nt, Artificial Sequence
  Description of Artificial Sequence: Synthetic oligonucleotide
  Sense strand starting at position 910 of SEQ ID NO: 1245253
ucauuuaugucgccaguaa

SEQ ID NO: 1548479 - RNA, 19 nt, Artificial Sequence
  Description of Artificial Sequence: Synthetic oligonucleotide
  Antisense strand to SEQ ID NO: 1548478
uuacuggcgacauaaauga

SEQ ID NO: 1548480 - RNA, 19 nt, Artificial Sequence
  Description of Artificial Sequence: Synthetic oligonucleotide
  Sense strand starting at position 911 of SEQ ID NO: 1245253
cauuuaugucgccaguaau

SEQ ID NO: 1548481 - RNA, 19 nt, Artificial Sequence
  Description of Artificial Sequence: Synthetic oligonucleotide
  Antisense strand to SEQ ID NO: 1548480
auuacuggcgacauaaaug

SEQ ID NO: 1548482 - RNA, 19 nt, Artificial Sequence
  Description of Artificial Sequence: Synthetic oligonucleotide
  Sense strand starting at position 974 of SEQ ID NO: 1245253
gacuuuaaagguuaucagu

SEQ ID NO: 1548483 - RNA, 19 nt, Artificial Sequence
  Description of Artificial Sequence: Synthetic oligonucleotide
  Antisense strand to SEQ ID NO: 1548482
acugauaaccuuuaaaguc

SEQ ID NO: 1548484 - RNA, 19 nt, Artificial Sequence
  Description of Artificial Sequence: Synthetic oligonucleotide
  Sense strand starting at position 976 of SEQ ID NO: 1245253
cuuuaaagguuaucagucu

SEQ ID NO: 1548485 - RNA, 19 nt, Artificial Sequence
  Description of Artificial Sequence: Synthetic oligonucleotide
  Antisense strand to SEQ ID NO: 1548484
agacugauaaccuuuaaag

SEQ ID NO: 1548486 - RNA, 19 nt, Artificial Sequence
  Description of Artificial Sequence: Synthetic oligonucleotide
  Sense strand starting at position 1195 of SEQ ID NO: 1245253
agguuuaaggccgauuauu

SEQ ID NO: 1548487 - RNA, 19 nt, Artificial Sequence
  Description of Artificial Sequence: Synthetic oligonucleotide
  Antisense strand to SEQ ID NO: 1548486
aauaaucggccuuaaaccu

SEQ ID NO: 1548488 - RNA, 19 nt, Artificial Sequence
  Description of Artificial Sequence: Synthetic oligonucleotide
  Sense strand starting at position 1232 of SEQ ID NO: 1245253
acauuagguuccucgaaga

SEQ ID NO: 1548489 - RNA, 19 nt, Artificial Sequence
  Description of Artificial Sequence: Synthetic oligonucleotide
  Antisense strand to SEQ ID NO: 1548488
ucuucgaggaaccuaaugu

SEQ ID NO: 1548490 - RNA, 19 nt, Artificial Sequence
  Description of Artificial Sequence: Synthetic oligonucleotide
  Sense strand starting at position 1237 of SEQ ID NO: 1245253
agguuccucgaagauguua

SEQ ID NO: 1548491 - RNA, 19 nt, Artificial Sequence
  Description of Artificial Sequence: Synthetic oligonucleotide
  Antisense strand to SEQ ID NO: 1548490
uaacaucuucgaggaaccu

SEQ ID NO: 1548492 - RNA, 19 nt, Artificial Sequence
  Description of Artificial Sequence: Synthetic oligonucleotide
  Sense strand starting at position 1286 of SEQ ID NO: 1245253
ucgugacagaccugacuaa

SEQ ID NO: 1548493 - RNA, 19 nt, Artificial Sequence
  Description of Artificial Sequence: Synthetic oligonucleotide
  Antisense strand to SEQ ID NO: 1548492
uuagucaggucugucacga

SEQ ID NO: 1548494 - RNA, 19 nt, Artificial Sequence
  Description of Artificial Sequence: Synthetic oligonucleotide
  Sense strand starting at position 1307 of SEQ ID NO: 1245253
gguagcaucagccauaaga

SEQ ID NO: 1548495 - RNA, 19 nt, Artificial Sequence
  Description of Artificial Sequence: Synthetic oligonucleotide
  Antisense strand to SEQ ID NO: 1548494
ucuuauggcugaugcuacc

SEQ ID NO: 1548496 - RNA, 19 nt, Artificial Sequence
  Description of Artificial Sequence: Synthetic oligonucleotide
  Sense strand starting at position 1395 of SEQ ID NO: 1245253
acuugugaauagccacaga

SEQ ID NO: 1548497 - RNA, 19 nt, Artificial Sequence
  Description of Artificial Sequence: Synthetic oligonucleotide
  Antisense strand to SEQ ID NO: 1548496
ucuguggcuauucacaagu

SEQ ID NO: 1548498 - RNA, 19 nt, Artificial Sequence
  Description of Artificial Sequence: Synthetic oligonucleotide
  Sense strand starting at position 2312 of SEQ ID NO: 1245253
gugccuauggacggagaaa

SEQ ID NO: 1548499 - RNA, 19 nt, Artificial Sequence
  Description of Artificial Sequence: Synthetic oligonucleotide
  Antisense strand to SEQ ID NO: 1548498
uuucuccguccauaggcac

SEQ ID NO: 1548500 - RNA, 19 nt, Artificial Sequence
  Description of Artificial Sequence: Synthetic oligonucleotide
  Sense strand starting at position 2384 of SEQ ID NO: 1245253
auggguguuggguaagcua

SEQ ID NO: 1548501 - RNA, 19 nt, Artificial Sequence
  Description of Artificial Sequence: Synthetic oligonucleotide
  Antisense strand to SEQ ID NO: 1548500
uagcuuacccaacacccau

SEQ ID NO: 1548502 - RNA, 19 nt, Artificial Sequence
  Description of Artificial Sequence: Synthetic oligonucleotide
  Sense strand starting at position 2386 of SEQ ID NO: 1245253
ggguguuggguaagcuauu

SEQ ID NO: 1548503 - RNA, 19 nt, Artificial Sequence
  Description of Artificial Sequence: Synthetic oligonucleotide
  Antisense strand to SEQ ID NO: 1548502
aauagcuuacccaacaccc

SEQ ID NO: 1548504 - RNA, 19 nt, Artificial Sequence
  Description of Artificial Sequence: Synthetic oligonucleotide
  Sense strand starting at position 2428 of SEQ ID NO: 1245253
ugugacaccucuuugaauu

SEQ ID NO: 1548505 - RNA, 19 nt, Artificial Sequence
  Description of Artificial Sequence: Synthetic oligonucleotide
  Antisense strand to SEQ ID NO: 1548504
aauucaaagaggugucaca

SEQ ID NO: 1548506 - RNA, 19 nt, Artificial Sequence
  Description of Artificial Sequence: Synthetic oligonucleotide
  Sense strand starting at position 2429 of SEQ ID NO: 1245253
gugacaccucuuugaauug

SEQ ID NO: 1548507 - RNA, 19 nt, Artificial Sequence
  Description of Artificial Sequence: Synthetic oligonucleotide
  Antisense strand to SEQ ID NO: 1548506
caauucaaagaggugucac

SEQ ID NO: 1548508 - RNA, 19 nt, Artificial Sequence
  Description of Artificial Sequence: Synthetic oligonucleotide
  Sense strand starting at position 2576 of SEQ ID NO: 1245253
ucagaagggccaugcuaaa

SEQ ID NO: 1548509 - RNA, 19 nt, Artificial Sequence
  Description of Artificial Sequence: Synthetic oligonucleotide
  Antisense strand to SEQ ID NO: 1548508
uuuagcauggcccuucuga

SEQ ID NO: 1548510 - RNA, 19 nt, Artificial Sequence
  Description of Artificial Sequence: Synthetic oligonucleotide
  Sense strand starting at position 2675 of SEQ ID NO: 1245253
ccguaaugugcugauauag

SEQ ID NO: 1548511 - RNA, 19 nt, Artificial Sequence
  Description of Artificial Sequence: Synthetic oligonucleotide
  Antisense strand to SEQ ID NO: 1548510
cuauaucagcacauuacgg

SEQ ID NO: 1548512 - RNA, 19 nt, Artificial Sequence
  Description of Artificial Sequence: Synthetic oligonucleotide
  Sense strand starting at position 2681 of SEQ ID NO: 1245253
ugugcugauauaggaugaa

SEQ ID NO: 1548513 - RNA, 19 nt, Artificial Sequence
  Description of Artificial Sequence: Synthetic oligonucleotide
  Antisense strand to SEQ ID NO: 1548512
uucauccuauaucagcaca

SEQ ID NO: 1548514 - RNA, 19 nt, Artificial Sequence
  Description of Artificial Sequence: Synthetic oligonucleotide
  Sense strand starting at position 2700 of SEQ ID NO: 1245253
ggaagaugcugagucaaga

SEQ ID NO: 1548515 - RNA, 19 nt, Artificial Sequence
  Description of Artificial Sequence: Synthetic oligonucleotide
  Antisense strand to SEQ ID NO: 1548514
ucuugacucagcaucuucc

SEQ ID NO: 1548516 - RNA, 19 nt, Artificial Sequence
  Description of Artificial Sequence: Synthetic oligonucleotide
  Sense strand starting at position 2710 of SEQ ID NO: 1245253
gagucaagauggccagaaa

SEQ ID NO: 1548517 - RNA, 19 nt, Artificial Sequence
  Description of Artificial Sequence: Synthetic oligonucleotide
  Antisense strand to SEQ ID NO: 1548516
uuucuggccaucuugacuc

SEQ ID NO: 1548518 - RNA, 19 nt, Artificial Sequence
  Description of Artificial Sequence: Synthetic oligonucleotide
  Sense strand starting at position 3049 of SEQ ID NO: 1245253
aguagcugcgauuguauuu

SEQ ID NO: 1548519 - RNA, 19 nt, Artificial Sequence
  Description of Artificial Sequence: Synthetic oligonucleotide
  Antisense strand to SEQ ID NO: 1548518
aaauacaaucgcagcuacu

SEQ ID NO: 1548520 - RNA, 19 nt, Artificial Sequence
  Description of Artificial Sequence: Synthetic oligonucleotide
  Sense strand starting at position 3075 of SEQ ID NO: 1245253
aaacgagguuucuccaagu

SEQ ID NO: 1548521 - RNA, 19 nt, Artificial Sequence
  Description of Artificial Sequence: Synthetic oligonucleotide
  Antisense strand to SEQ ID NO: 1548520
acuuggagaaaccucguuu

SEQ ID NO: 1548522 - RNA, 19 nt, Artificial Sequence
  Description of Artificial Sequence: Synthetic oligonucleotide
  Sense strand starting at position 3210 of SEQ ID NO: 1245253
ucuaaauguugauccuuga

SEQ ID NO: 1548523 - RNA, 19 nt, Artificial Sequence
  Description of Artificial Sequence: Synthetic oligonucleotide
  Antisense strand to SEQ ID NO: 1548522
ucaaggaucaacauuuaga

SEQ ID NO: 1548524 - RNA, 19 nt, Artificial Sequence
  Description of Artificial Sequence: Synthetic oligonucleotide
  Sense strand starting at position 3296 of SEQ ID NO: 1245253
gugucacuuccucaggaag

SEQ ID NO: 1548525 - RNA, 19 nt, Artificial Sequence
  Description of Artificial Sequence: Synthetic oligonucleotide
  Antisense strand to SEQ ID NO: 1548524
cuuccugaggaagugacac

SEQ ID NO: 1548526 - RNA, 19 nt, Artificial Sequence
  Description of Artificial Sequence: Synthetic oligonucleotide
  Sense strand starting at position 3394 of SEQ ID NO: 1245253
cugagaugucuccauggua

SEQ ID NO: 1548527 - RNA, 19 nt, Artificial Sequence
  Description of Artificial Sequence: Synthetic oligonucleotide
  Antisense strand to SEQ ID NO: 1548526
uaccauggagacaucucag

SEQ ID NO: 1548528 - RNA, 19 nt, Artificial Sequence
  Description of Artificial Sequence: Synthetic oligonucleotide
  Sense strand starting at position 3397 of SEQ ID NO: 1245253
agaugucuccaugguaauu

SEQ ID NO: 1548529 - RNA, 19 nt, Artificial Sequence
  Description of Artificial Sequence: Synthetic oligonucleotide
  Antisense strand to SEQ ID NO: 1548528
aauuaccauggagacaucu

SEQ ID NO: 1548530 - RNA, 19 nt, Artificial Sequence
  Description of Artificial Sequence: Synthetic oligonucleotide
  Sense strand starting at position 3402 of SEQ ID NO: 1245253
ucuccaugguaauuaugua

SEQ ID NO: 1548531 - RNA, 19 nt, Artificial Sequence
  Description of Artificial Sequence: Synthetic oligonucleotide
  Antisense strand to SEQ ID NO: 1548530
uacauaauuaccauggaga

SEQ ID NO: 1548532 - RNA, 19 nt, Artificial Sequence
  Description of Artificial Sequence: Synthetic oligonucleotide
  Sense strand starting at position 3406 of SEQ ID NO: 1245253
caugguaauuauguaggua

SEQ ID NO: 1548533 - RNA, 19 nt, Artificial Sequence
  Description of Artificial Sequence: Synthetic oligonucleotide
  Antisense strand to SEQ ID NO: 1548532
uaccuacauaauuaccaug

SEQ ID NO: 1548534 - RNA, 19 nt, Artificial Sequence
  Description of Artificial Sequence: Synthetic oligonucleotide
  Sense strand starting at position 3407 of SEQ ID NO: 1245253
augguaauuauguagguau

SEQ ID NO: 1548535 - RNA, 19 nt, Artificial Sequence
  Description of Artificial Sequence: Synthetic oligonucleotide
  Antisense strand to SEQ ID NO: 1548534
auaccuacauaauuaccau

SEQ ID NO: 1548536 - RNA, 19 nt, Artificial Sequence
  Description of Artificial Sequence: Synthetic oligonucleotide
  Sense strand starting at position 3414 of SEQ ID NO: 1245253
uuauguagguauuugugua

SEQ ID NO: 1548537 - RNA, 19 nt, Artificial Sequence
  Description of Artificial Sequence: Synthetic oligonucleotide
  Antisense strand to SEQ ID NO: 1548536
uacacaaauaccuacauaa

SEQ ID NO: 1548538 - RNA, 19 nt, Artificial Sequence
  Description of Artificial Sequence: Synthetic oligonucleotide
  Sense strand starting at position 3418 of SEQ ID NO: 1245253
guagguauuuguguaauug

SEQ ID NO: 1548539 - RNA, 19 nt, Artificial Sequence
  Description of Artificial Sequence: Synthetic oligonucleotide
  Antisense strand to SEQ ID NO: 1548538
caauuacacaaauaccuac

SEQ ID NO: 1548540 - RNA, 19 nt, Artificial Sequence
  Description of Artificial Sequence: Synthetic oligonucleotide
  Sense strand starting at position 230 of SEQ ID NO: 1245254
uuuguuaacucggucacua

SEQ ID NO: 1548541 - RNA, 19 nt, Artificial Sequence
  Description of Artificial Sequence: Synthetic oligonucleotide
  Antisense strand to SEQ ID NO: 1548540
uagugaccgaguuaacaaa

SEQ ID NO: 1548542 - RNA, 19 nt, Artificial Sequence
  Description of Artificial Sequence: Synthetic oligonucleotide
  Sense strand starting at position 292 of SEQ ID NO: 1245254
gcgcuuaggauacagagau

SEQ ID NO: 1548543 - RNA, 19 nt, Artificial Sequence
  Description of Artificial Sequence: Synthetic oligonucleotide
  Antisense strand to SEQ ID NO: 1548542
aucucuguauccuaagcgc

SEQ ID NO: 1548544 - RNA, 19 nt, Artificial Sequence
  Description of Artificial Sequence: Synthetic oligonucleotide
  Sense strand starting at position 304 of SEQ ID NO: 1245254
cagagaugaucccugagca

SEQ ID NO: 1548545 - RNA, 19 nt, Artificial Sequence
  Description of Artificial Sequence: Synthetic oligonucleotide
  Antisense strand to SEQ ID NO: 1548544
ugcucagggaucaucucug

SEQ ID NO: 1548546 - RNA, 19 nt, Artificial Sequence
  Description of Artificial Sequence: Synthetic oligonucleotide
  Sense strand starting at position 305 of SEQ ID NO: 1245254
agagaugaucccugagcag

SEQ ID NO: 1548547 - RNA, 19 nt, Artificial Sequence
  Description of Artificial Sequence: Synthetic oligonucleotide
  Antisense strand to SEQ ID NO: 1548546
cugcucagggaucaucucu

SEQ ID NO: 1548548 - RNA, 19 nt, Artificial Sequence
  Description of Artificial Sequence: Synthetic oligonucleotide
  Sense strand starting at position 308 of SEQ ID NO: 1245254
gaugaucccugagcaguga

SEQ ID NO: 1548549 - RNA, 19 nt, Artificial Sequence
  Description of Artificial Sequence: Synthetic oligonucleotide
  Antisense strand to SEQ ID NO: 1548548
ucacugcucagggaucauc

SEQ ID NO: 1548550 - RNA, 19 nt, Artificial Sequence
  Description of Artificial Sequence: Synthetic oligonucleotide
  Sense strand starting at position 337 of SEQ ID NO: 1245254
guguaaggcaccugaagaa

SEQ ID NO: 1548551 - RNA, 19 nt, Artificial Sequence
  Description of Artificial Sequence: Synthetic oligonucleotide
  Antisense strand to SEQ ID NO: 1548550
uucuucaggugccuuacac

SEQ ID NO: 1548552 - RNA, 19 nt, Artificial Sequence
  Description of Artificial Sequence: Synthetic oligonucleotide
  Sense strand starting at position 428 of SEQ ID NO: 1245254
caucuaugcgagugagacu

SEQ ID NO: 1548553 - RNA, 19 nt, Artificial Sequence
  Description of Artificial Sequence: Synthetic oligonucleotide
  Antisense strand to SEQ ID NO: 1548552
agucucacucgcauagaug

SEQ ID NO: 1548554 - RNA, 19 nt, Artificial Sequence
  Description of Artificial Sequence: Synthetic oligonucleotide
  Sense strand starting at position 429 of SEQ ID NO: 1245254
aucuaugcgagugagacua

SEQ ID NO: 1548555 - RNA, 19 nt, Artificial Sequence
  Description of Artificial Sequence: Synthetic oligonucleotide
  Antisense strand to SEQ ID NO: 1548554
uagucucacucgcauagau

SEQ ID NO: 1548556 - RNA, 19 nt, Artificial Sequence
  Description of Artificial Sequence: Synthetic oligonucleotide
  Sense strand starting at position 617 of SEQ ID NO: 1245254
ucacucacgaaguguguua

SEQ ID NO: 1548557 - RNA, 19 nt, Artificial Sequence
  Description of Artificial Sequence: Synthetic oligonucleotide
  Antisense strand to SEQ ID NO: 1548556
uaacacacuucgugaguga

SEQ ID NO: 1548558 - RNA, 19 nt, Artificial Sequence
  Description of Artificial Sequence: Synthetic oligonucleotide
  Sense strand starting at position 716 of SEQ ID NO: 1245254
uuaacacaggugugaucaa

SEQ ID NO: 1548559 - RNA, 19 nt, Artificial Sequence
  Description of Artificial Sequence: Synthetic oligonucleotide
  Antisense strand to SEQ ID NO: 1548558
uugaucacaccuguguuaa

SEQ ID NO: 1548560 - RNA, 19 nt, Artificial Sequence
  Description of Artificial Sequence: Synthetic oligonucleotide
  Sense strand starting at position 726 of SEQ ID NO: 1245254
ugugaucaaccucggucaa

SEQ ID NO: 1548561 - RNA, 19 nt, Artificial Sequence
  Description of Artificial Sequence: Synthetic oligonucleotide
  Antisense strand to SEQ ID NO: 1548560
uugaccgagguugaucaca

SEQ ID NO: 1548562 - RNA, 19 nt, Artificial Sequence
  Description of Artificial Sequence: Synthetic oligonucleotide
  Sense strand starting at position 728 of SEQ ID NO: 1245254
ugaucaaccucggucaaga

SEQ ID NO: 1548563 - RNA, 19 nt, Artificial Sequence
  Description of Artificial Sequence: Synthetic oligonucleotide
  Antisense strand to SEQ ID NO: 1548562
ucuugaccgagguugauca

SEQ ID NO: 1548564 - RNA, 19 nt, Artificial Sequence
  Description of Artificial Sequence: Synthetic oligonucleotide
  Sense strand starting at position 739 of SEQ ID NO: 1245254
ggucaagaugcagagucau

SEQ ID NO: 1548565 - RNA, 19 nt, Artificial Sequence
  Description of Artificial Sequence: Synthetic oligonucleotide
  Antisense strand to SEQ ID NO: 1548564
augacucugcaucuugacc

SEQ ID NO: 1548566 - RNA, 19 nt, Artificial Sequence
  Description of Artificial Sequence: Synthetic oligonucleotide
  Sense strand starting at position 745 of SEQ ID NO: 1245254
gaugcagagucaucaaccu

SEQ ID NO: 1548567 - RNA, 19 nt, Artificial Sequence
  Description of Artificial Sequence: Synthetic oligonucleotide
  Antisense strand to SEQ ID NO: 1548566
agguugaugacucugcauc

SEQ ID NO: 1548568 - RNA, 19 nt, Artificial Sequence
  Description of Artificial Sequence: Synthetic oligonucleotide
  Sense strand starting at position 752 of SEQ ID NO: 1245254
agucaucaaccucggucaa

SEQ ID NO: 1548569 - RNA, 19 nt, Artificial Sequence
  Description of Artificial Sequence: Synthetic oligonucleotide
  Antisense strand to SEQ ID NO: 1548568
uugaccgagguugaugacu

SEQ ID NO: 1548570 - RNA, 19 nt, Artificial Sequence
  Description of Artificial Sequence: Synthetic oligonucleotide
  Sense strand starting at position 754 of SEQ ID NO: 1245254
ucaucaaccucggucaaga

SEQ ID NO: 1548571 - RNA, 19 nt, Artificial Sequence
  Description of Artificial Sequence: Synthetic oligonucleotide
  Antisense strand to SEQ ID NO: 1548570
ucuugaccgagguugauga

SEQ ID NO: 1548572 - RNA, 19 nt, Artificial Sequence
  Description of Artificial Sequence: Synthetic oligonucleotide
  Sense strand starting at position 817 of SEQ ID NO: 1245254
uacaguuacuacuugguga

SEQ ID NO: 1548573 - RNA, 19 nt, Artificial Sequence
  Description of Artificial Sequence: Synthetic oligonucleotide
  Antisense strand to SEQ ID NO: 1548572
ucaccaaguaguaacugua

SEQ ID NO: 1548574 - RNA, 19 nt, Artificial Sequence
  Description of Artificial Sequence: Synthetic oligonucleotide
  Sense strand starting at position 819 of SEQ ID NO: 1245254
caguuacuacuuggugaaa

SEQ ID NO: 1548575 - RNA, 19 nt, Artificial Sequence
  Description of Artificial Sequence: Synthetic oligonucleotide
  Antisense strand to SEQ ID NO: 1548574
uuucaccaaguaguaacug

SEQ ID NO: 1548576 - RNA, 19 nt, Artificial Sequence
  Description of Artificial Sequence: Synthetic oligonucleotide
  Sense strand starting at position 851 of SEQ ID NO: 1245254
cuagcucuuguuggugaga

SEQ ID NO: 1548577 - RNA, 19 nt, Artificial Sequence
  Description of Artificial Sequence: Synthetic oligonucleotide
  Antisense strand to SEQ ID NO: 1548576
ucucaccaacaagagcuag

SEQ ID NO: 1548578 - RNA, 19 nt, Artificial Sequence
  Description of Artificial Sequence: Synthetic oligonucleotide
  Sense strand starting at position 894 of SEQ ID NO: 1245254
gcauucuuacgagaggaau

SEQ ID NO: 1548579 - RNA, 19 nt, Artificial Sequence
  Description of Artificial Sequence: Synthetic oligonucleotide
  Antisense strand to SEQ ID NO: 1548578
auuccucucguaagaaugc

SEQ ID NO: 1548580 - RNA, 19 nt, Artificial Sequence
  Description of Artificial Sequence: Synthetic oligonucleotide
  Sense strand starting at position 896 of SEQ ID NO: 1245254
auucuuacgagaggaauuc

SEQ ID NO: 1548581 - RNA, 19 nt, Artificial Sequence
  Description of Artificial Sequence: Synthetic oligonucleotide
  Antisense strand to SEQ ID NO: 1548580
gaauuccucucguaagaau

SEQ ID NO: 1548582 - RNA, 19 nt, Artificial Sequence
  Description of Artificial Sequence: Synthetic oligonucleotide
  Sense strand starting at position 1160 of SEQ ID NO: 1245254
ggucuauagccuuagcauc

SEQ ID NO: 1548583 - RNA, 19 nt, Artificial Sequence
  Description of Artificial Sequence: Synthetic oligonucleotide
  Antisense strand to SEQ ID NO: 1548582
gaugcuaaggcuauagacc

SEQ ID NO: 1548584 - RNA, 19 nt, Artificial Sequence
  Description of Artificial Sequence: Synthetic oligonucleotide
  Sense strand starting at position 1460 of SEQ ID NO: 1245254
uggccauccuuaguacaca

SEQ ID NO: 1548585 - RNA, 19 nt, Artificial Sequence
  Description of Artificial Sequence: Synthetic oligonucleotide
  Antisense strand to SEQ ID NO: 1548584
uguguacuaaggauggcca

SEQ ID NO: 1548586 - RNA, 19 nt, Artificial Sequence
  Description of Artificial Sequence: Synthetic oligonucleotide
  Sense strand starting at position 1478 of SEQ ID NO: 1245254
aagucaguacuccacgaaa

SEQ ID NO: 1548587 - RNA, 19 nt, Artificial Sequence
  Description of Artificial Sequence: Synthetic oligonucleotide
  Antisense strand to SEQ ID NO: 1548586
uuucguggaguacugacuu

SEQ ID NO: 1548588 - RNA, 19 nt, Artificial Sequence
  Description of Artificial Sequence: Synthetic oligonucleotide
  Sense strand starting at position 1480 of SEQ ID NO: 1245254
gucaguacuccacgaaaga

SEQ ID NO: 1548589 - RNA, 19 nt, Artificial Sequence
  Description of Artificial Sequence: Synthetic oligonucleotide
  Antisense strand to SEQ ID NO: 1548588
ucuuucguggaguacugac

SEQ ID NO: 1548590 - RNA, 19 nt, Artificial Sequence
  Description of Artificial Sequence: Synthetic oligonucleotide
  Sense strand starting at position 1501 of SEQ ID NO: 1245254
auccacguguaacuaaauu

SEQ ID NO: 1548591 - RNA, 19 nt, Artificial Sequence
  Description of Artificial Sequence: Synthetic oligonucleotide
  Antisense strand to SEQ ID NO: 1548590
aauuuaguuacacguggau

SEQ ID NO: 1548592 - RNA, 19 nt, Artificial Sequence
  Description of Artificial Sequence: Synthetic oligonucleotide
  Sense strand starting at position 3335 of SEQ ID NO: 1245254
cugggaaaucccgggucuu

SEQ ID NO: 1548593 - RNA, 19 nt, Artificial Sequence
  Description of Artificial Sequence: Synthetic oligonucleotide
  Antisense strand to SEQ ID NO: 1548592
aagacccgggauuucccag

SEQ ID NO: 1548594 - RNA, 19 nt, Artificial Sequence
  Description of Artificial Sequence: Synthetic oligonucleotide
  Sense strand starting at position 3336 of SEQ ID NO: 1245254
ugggaaaucccgggucuuc

SEQ ID NO: 1548595 - RNA, 19 nt, Artificial Sequence
  Description of Artificial Sequence: Synthetic oligonucleotide
  Antisense strand to SEQ ID NO: 1548594
gaagacccgggauuuccca

SEQ ID NO: 1548596 - RNA, 19 nt, Artificial Sequence
  Description of Artificial Sequence: Synthetic oligonucleotide
  Sense strand starting at position 3448 of SEQ ID NO: 1245254
gagcguuggcacugagaau

SEQ ID NO: 1548597 - RNA, 19 nt, Artificial Sequence
  Description of Artificial Sequence: Synthetic oligonucleotide
  Antisense strand to SEQ ID NO: 1548596
auucucagugccaacgcuc

SEQ ID NO: 1548598 - RNA, 19 nt, Artificial Sequence
  Description of Artificial Sequence: Synthetic oligonucleotide
  Sense strand starting at position 3449 of SEQ ID NO: 1245254
agcguuggcacugagaaua

SEQ ID NO: 1548599 - RNA, 19 nt, Artificial Sequence
  Description of Artificial Sequence: Synthetic oligonucleotide
  Antisense strand to SEQ ID NO: 1548598
uauucucagugccaacgcu

SEQ ID NO: 1548600 - RNA, 19 nt, Artificial Sequence
  Description of Artificial Sequence: Synthetic oligonucleotide
  Sense strand starting at position 3498 of SEQ ID NO: 1245254
gccuguucuaggcaagauc

SEQ ID NO: 1548601 - RNA, 19 nt, Artificial Sequence
  Description of Artificial Sequence: Synthetic oligonucleotide
  Antisense strand to SEQ ID NO: 1548600
gaucuugccuagaacaggc

SEQ ID NO: 1548602 - RNA, 19 nt, Artificial Sequence
  Description of Artificial Sequence: Synthetic oligonucleotide
  Sense strand starting at position 3518 of SEQ ID NO: 1245254
agagaaaucuggcucuagc

SEQ ID NO: 1548603 - RNA, 19 nt, Artificial Sequence
  Description of Artificial Sequence: Synthetic oligonucleotide
  Antisense strand to SEQ ID NO: 1548602
gcuagagccagauuucucu

SEQ ID NO: 1548604 - RNA, 19 nt, Artificial Sequence
  Description of Artificial Sequence: Synthetic oligonucleotide
  Sense strand starting at position 3564 of SEQ ID NO: 1245254
uuauuuaacuguuauccga

SEQ ID NO: 1548605 - RNA, 19 nt, Artificial Sequence
  Description of Artificial Sequence: Synthetic oligonucleotide
  Antisense strand to SEQ ID NO: 1548604
ucggauaacaguuaaauaa

SEQ ID NO: 1548606 - RNA, 19 nt, Artificial Sequence
  Description of Artificial Sequence: Synthetic oligonucleotide
  Sense strand starting at position 3568 of SEQ ID NO: 1245254
uuaacuguuauccgagagu

SEQ ID NO: 1548607 - RNA, 19 nt, Artificial Sequence
  Description of Artificial Sequence: Synthetic oligonucleotide
  Antisense strand to SEQ ID NO: 1548606
acucucggauaacaguuaa

SEQ ID NO: 1548608 - RNA, 19 nt, Artificial Sequence
  Description of Artificial Sequence: Synthetic oligonucleotide
  Sense strand starting at position 3571 of SEQ ID NO: 1245254
acuguuauccgagagugga

SEQ ID NO: 1548609 - RNA, 19 nt, Artificial Sequence
  Description of Artificial Sequence: Synthetic oligonucleotide
  Antisense strand to SEQ ID NO: 1548608
uccacucucggauaacagu

SEQ ID NO: 1548610 - RNA, 19 nt, Artificial Sequence
  Description of Artificial Sequence: Synthetic oligonucleotide
  Sense strand starting at position 3640 of SEQ ID NO: 1245254
cuguuagcaucuguagaga

SEQ ID NO: 1548611 - RNA, 19 nt, Artificial Sequence
  Description of Artificial Sequence: Synthetic oligonucleotide
  Antisense strand to SEQ ID NO: 1548610
ucucuacagaugcuaacag

SEQ ID NO: 1548612 - RNA, 19 nt, Artificial Sequence
  Description of Artificial Sequence: Synthetic oligonucleotide
  Sense strand starting at position 3727 of SEQ ID NO: 1245254
acauuccuggcuugcauua

SEQ ID NO: 1548613 - RNA, 19 nt, Artificial Sequence
  Description of Artificial Sequence: Synthetic oligonucleotide
  Antisense strand to SEQ ID NO: 1548612
uaaugcaagccaggaaugu

SEQ ID NO: 1548614 - RNA, 19 nt, Artificial Sequence
  Description of Artificial Sequence: Synthetic oligonucleotide
  Sense strand starting at position 3758 of SEQ ID NO: 1245254
agagcagugagcugaugaa

SEQ ID NO: 1548615 - RNA, 19 nt, Artificial Sequence
  Description of Artificial Sequence: Synthetic oligonucleotide
  Antisense strand to SEQ ID NO: 1548614
uucaucagcucacugcucu

SEQ ID NO: 1548616 - RNA, 19 nt, Artificial Sequence
  Description of Artificial Sequence: Synthetic oligonucleotide
  Sense strand starting at position 3874 of SEQ ID NO: 1245254
ucacgaauucucugagaau

SEQ ID NO: 1548617 - RNA, 19 nt, Artificial Sequence
  Description of Artificial Sequence: Synthetic oligonucleotide
  Antisense strand to SEQ ID NO: 1548616
auucucagagaauucguga

SEQ ID NO: 1548618 - RNA, 19 nt, Artificial Sequence
  Description of Artificial Sequence: Synthetic oligonucleotide
  Sense strand starting at position 3937 of SEQ ID NO: 1245254
acaguuggcauauggugaa

SEQ ID NO: 1548619 - RNA, 19 nt, Artificial Sequence
  Description of Artificial Sequence: Synthetic oligonucleotide
  Antisense strand to SEQ ID NO: 1548618
uucaccauaugccaacugu

SEQ ID NO: 1548620 - RNA, 19 nt, Artificial Sequence
  Description of Artificial Sequence: Synthetic oligonucleotide
  Sense strand starting at position 10 of SEQ ID NO: 1245255
auccuaaaugcaggagauu

SEQ ID NO: 1548621 - RNA, 19 nt, Artificial Sequence
  Description of Artificial Sequence: Synthetic oligonucleotide
  Antisense strand to SEQ ID NO: 1548620
aaucuccugcauuuaggau

SEQ ID NO: 1548622 - RNA, 19 nt, Artificial Sequence
  Description of Artificial Sequence: Synthetic oligonucleotide
  Sense strand starting at position 34 of SEQ ID NO: 1245255
auuucccaaucauggagau

SEQ ID NO: 1548623 - RNA, 19 nt, Artificial Sequence
  Description of Artificial Sequence: Synthetic oligonucleotide
  Antisense strand to SEQ ID NO: 1548622
aucuccaugauugggaaau

SEQ ID NO: 1548624 - RNA, 19 nt, Artificial Sequence
  Description of Artificial Sequence: Synthetic oligonucleotide
  Sense strand starting at position 314 of SEQ ID NO: 1245255
gggaacuaauguccuauaa

SEQ ID NO: 1548625 - RNA, 19 nt, Artificial Sequence
  Description of Artificial Sequence: Synthetic oligonucleotide
  Antisense strand to SEQ ID NO: 1548624
uuauaggacauuaguuccc

SEQ ID NO: 1548626 - RNA, 19 nt, Artificial Sequence
  Description of Artificial Sequence: Synthetic oligonucleotide
  Sense strand starting at position 428 of SEQ ID NO: 1245255
uauugagccuggguauauu

SEQ ID NO: 1548627 - RNA, 19 nt, Artificial Sequence
  Description of Artificial Sequence: Synthetic oligonucleotide
  Antisense strand to SEQ ID NO: 1548626
aauauacccaggcucaaua

SEQ ID NO: 1548628 - RNA, 19 nt, Artificial Sequence
  Description of Artificial Sequence: Synthetic oligonucleotide
  Sense strand starting at position 501 of SEQ ID NO: 1245255
cugaccuaagguuauguaa

SEQ ID NO: 1548629 - RNA, 19 nt, Artificial Sequence
  Description of Artificial Sequence: Synthetic oligonucleotide
  Antisense strand to SEQ ID NO: 1548628
uuacauaaccuuaggucag

SEQ ID NO: 1548630 - RNA, 19 nt, Artificial Sequence
  Description of Artificial Sequence: Synthetic oligonucleotide
  Sense strand starting at position 504 of SEQ ID NO: 1245255
accuaagguuauguaagaa

SEQ ID NO: 1548631 - RNA, 19 nt, Artificial Sequence
  Description of Artificial Sequence: Synthetic oligonucleotide
  Antisense strand to SEQ ID NO: 1548630
uucuuacauaaccuuaggu

SEQ ID NO: 1548632 - RNA, 19 nt, Artificial Sequence
  Description of Artificial Sequence: Synthetic oligonucleotide
  Sense strand starting at position 555 of SEQ ID NO: 1245255
ggagauacuuuacugugga

SEQ ID NO: 1548633 - RNA, 19 nt, Artificial Sequence
  Description of Artificial Sequence: Synthetic oligonucleotide
  Antisense strand to SEQ ID NO: 1548632
uccacaguaaaguaucucc

SEQ ID NO: 1548634 - RNA, 19 nt, Artificial Sequence
  Description of Artificial Sequence: Synthetic oligonucleotide
  Sense strand starting at position 558 of SEQ ID NO: 1245255
gauacuuuacuguggaaug

SEQ ID NO: 1548635 - RNA, 19 nt, Artificial Sequence
  Description of Artificial Sequence: Synthetic oligonucleotide
  Antisense strand to SEQ ID NO: 1548634
cauuccacaguaaaguauc

SEQ ID NO: 1548636 - RNA, 19 nt, Artificial Sequence
  Description of Artificial Sequence: Synthetic oligonucleotide
  Sense strand starting at position 560 of SEQ ID NO: 1245255
uacuuuacuguggaauguu

SEQ ID NO: 1548637 - RNA, 19 nt, Artificial Sequence
  Description of Artificial Sequence: Synthetic oligonucleotide
  Antisense strand to SEQ ID NO: 1548636
aacauuccacaguaaagua

SEQ ID NO: 1548638 - RNA, 19 nt, Artificial Sequence
  Description of Artificial Sequence: Synthetic oligonucleotide
  Sense strand starting at position 569 of SEQ ID NO: 1245255
guggaauguuuacuacaca

SEQ ID NO: 1548639 - RNA, 19 nt, Artificial Sequence
  Description of Artificial Sequence: Synthetic oligonucleotide
  Antisense strand to SEQ ID NO: 1548638
uguguaguaaacauuccac

SEQ ID NO: 1548640 - RNA, 19 nt, Artificial Sequence
  Description of Artificial Sequence: Synthetic oligonucleotide
  Sense strand starting at position 682 of SEQ ID NO: 1245255
gaaauagcagucuaauugu

SEQ ID NO: 1548641 - RNA, 19 nt, Artificial Sequence
  Description of Artificial Sequence: Synthetic oligonucleotide
  Antisense strand to SEQ ID NO: 1548640
acaauuagacugcuauuuc

SEQ ID NO: 1548642 - RNA, 19 nt, Artificial Sequence
  Description of Artificial Sequence: Synthetic oligonucleotide
  Sense strand starting at position 695 of SEQ ID NO: 1245255
aauuguauugacuggaaau

SEQ ID NO: 1548643 - RNA, 19 nt, Artificial Sequence
  Description of Artificial Sequence: Synthetic oligonucleotide
  Antisense strand to SEQ ID NO: 1548642
auuuccagucaauacaauu

SEQ ID NO: 1548644 - RNA, 19 nt, Artificial Sequence
  Description of Artificial Sequence: Synthetic oligonucleotide
  Sense strand starting at position 752 of SEQ ID NO: 1245255
aaagauaaacguugaucuu

SEQ ID NO: 1548645 - RNA, 19 nt, Artificial Sequence
  Description of Artificial Sequence: Synthetic oligonucleotide
  Antisense strand to SEQ ID NO: 1548644
aagaucaacguuuaucuuu

SEQ ID NO: 1548646 - RNA, 19 nt, Artificial Sequence
  Description of Artificial Sequence: Synthetic oligonucleotide
  Sense strand starting at position 755 of SEQ ID NO: 1245255
gauaaacguugaucuucua

SEQ ID NO: 1548647 - RNA, 19 nt, Artificial Sequence
  Description of Artificial Sequence: Synthetic oligonucleotide
  Antisense strand to SEQ ID NO: 1548646
uagaagaucaacguuuauc

SEQ ID NO: 1548648 - RNA, 19 nt, Artificial Sequence
  Description of Artificial Sequence: Synthetic oligonucleotide
  Sense strand starting at position 883 of SEQ ID NO: 1245255
gcaugaacgagucagaaau

SEQ ID NO: 1548649 - RNA, 19 nt, Artificial Sequence
  Description of Artificial Sequence: Synthetic oligonucleotide
  Antisense strand to SEQ ID NO: 1548648
auuucugacucguucaugc

SEQ ID NO: 1548650 - RNA, 19 nt, Artificial Sequence
  Description of Artificial Sequence: Synthetic oligonucleotide
  Sense strand starting at position 896 of SEQ ID NO: 1245255
agaaauguugcaggagaca

SEQ ID NO: 1548651 - RNA, 19 nt, Artificial Sequence
  Description of Artificial Sequence: Synthetic oligonucleotide
  Antisense strand to SEQ ID NO: 1548650
ugucuccugcaacauuucu

SEQ ID NO: 1548652 - RNA, 19 nt, Artificial Sequence
  Description of Artificial Sequence: Synthetic oligonucleotide
  Sense strand starting at position 918 of SEQ ID NO: 1245255
gauaaagaaucguuuggga

SEQ ID NO: 1548653 - RNA, 19 nt, Artificial Sequence
  Description of Artificial Sequence: Synthetic oligonucleotide
  Antisense strand to SEQ ID NO: 1548652
ucccaaacgauucuuuauc

SEQ ID NO: 1548654 - RNA, 19 nt, Artificial Sequence
  Description of Artificial Sequence: Synthetic oligonucleotide
  Sense strand starting at position 920 of SEQ ID NO: 1245255
uaaagaaucguuugggaca

SEQ ID NO: 1548655 - RNA, 19 nt, Artificial Sequence
  Description of Artificial Sequence: Synthetic oligonucleotide
  Antisense strand to SEQ ID NO: 1548654
ugucccaaacgauucuuua

SEQ ID NO: 1548656 - RNA, 19 nt, Artificial Sequence
  Description of Artificial Sequence: Synthetic oligonucleotide
  Sense strand starting at position 964 of SEQ ID NO: 1245255
gacuccuuauuagcggaau

SEQ ID NO: 1548657 - RNA, 19 nt, Artificial Sequence
  Description of Artificial Sequence: Synthetic oligonucleotide
  Antisense strand to SEQ ID NO: 1548656
auuccgcuaauaaggaguc

SEQ ID NO: 1548658 - RNA, 19 nt, Artificial Sequence
  Description of Artificial Sequence: Synthetic oligonucleotide
  Sense strand starting at position 967 of SEQ ID NO: 1245255
uccuuauuagcggaauuga

SEQ ID NO: 1548659 - RNA, 19 nt, Artificial Sequence
  Description of Artificial Sequence: Synthetic oligonucleotide
  Antisense strand to SEQ ID NO: 1548658
ucaauuccgcuaauaagga

SEQ ID NO: 1548660 - RNA, 19 nt, Artificial Sequence
  Description of Artificial Sequence: Synthetic oligonucleotide
  Sense strand starting at position 1313 of SEQ ID NO: 1245255
ccacucuuggcuuaaguuu

SEQ ID NO: 1548661 - RNA, 19 nt, Artificial Sequence
  Description of Artificial Sequence: Synthetic oligonucleotide
  Antisense strand to SEQ ID NO: 1548660
aaacuuaagccaagagugg

SEQ ID NO: 1548662 - RNA, 19 nt, Artificial Sequence
  Description of Artificial Sequence: Synthetic oligonucleotide
  Sense strand starting at position 1355 of SEQ ID NO: 1245255
agcauuagauauucugaag

SEQ ID NO: 1548663 - RNA, 19 nt, Artificial Sequence
  Description of Artificial Sequence: Synthetic oligonucleotide
  Antisense strand to SEQ ID NO: 1548662
cuucagaauaucuaaugcu

SEQ ID NO: 1548664 - RNA, 19 nt, Artificial Sequence
  Description of Artificial Sequence: Synthetic oligonucleotide
  Sense strand starting at position 1384 of SEQ ID NO: 1245255
guguaaaucguguauuaaa

SEQ ID NO: 1548665 - RNA, 19 nt, Artificial Sequence
  Description of Artificial Sequence: Synthetic oligonucleotide
  Antisense strand to SEQ ID NO: 1548664
uuuaauacacgauuuacac

SEQ ID NO: 1548666 - RNA, 19 nt, Artificial Sequence
  Description of Artificial Sequence: Synthetic oligonucleotide
  Sense strand starting at position 1453 of SEQ ID NO: 1245255
uucccagauccaggcaaau

SEQ ID NO: 1548667 - RNA, 19 nt, Artificial Sequence
  Description of Artificial Sequence: Synthetic oligonucleotide
  Antisense strand to SEQ ID NO: 1548666
auuugccuggaucugggaa

SEQ ID NO: 1548668 - RNA, 19 nt, Artificial Sequence
  Description of Artificial Sequence: Synthetic oligonucleotide
  Sense strand starting at position 1551 of SEQ ID NO: 1245255
agaagucgugcugucgcua

SEQ ID NO: 1548669 - RNA, 19 nt, Artificial Sequence
  Description of Artificial Sequence: Synthetic oligonucleotide
  Antisense strand to SEQ ID NO: 1548668
uagcgacagcacgacuucu

SEQ ID NO: 1548670 - RNA, 19 nt, Artificial Sequence
  Description of Artificial Sequence: Synthetic oligonucleotide
  Sense strand starting at position 1778 of SEQ ID NO: 1245255
ugaacuuuaccuggagcuu

SEQ ID NO: 1548671 - RNA, 19 nt, Artificial Sequence
  Description of Artificial Sequence: Synthetic oligonucleotide
  Antisense strand to SEQ ID NO: 1548670
aagcuccagguaaaguuca

SEQ ID NO: 1548672 - RNA, 19 nt, Artificial Sequence
  Description of Artificial Sequence: Synthetic oligonucleotide
  Sense strand starting at position 1911 of SEQ ID NO: 1245255
ggguauuccuaagccacca

SEQ ID NO: 1548673 - RNA, 19 nt, Artificial Sequence
  Description of Artificial Sequence: Synthetic oligonucleotide
  Antisense strand to SEQ ID NO: 1548672
ugguggcuuaggaauaccc

SEQ ID NO: 1548674 - RNA, 19 nt, Artificial Sequence
  Description of Artificial Sequence: Synthetic oligonucleotide
  Sense strand starting at position 1977 of SEQ ID NO: 1245255
gcugcugcuaucgcgauaa

SEQ ID NO: 1548675 - RNA, 19 nt, Artificial Sequence
  Description of Artificial Sequence: Synthetic oligonucleotide
  Antisense strand to SEQ ID NO: 1548674
uuaucgcgauagcagcagc

SEQ ID NO: 1548676 - RNA, 19 nt, Artificial Sequence
  Description of Artificial Sequence: Synthetic oligonucleotide
  Sense strand starting at position 3207 of SEQ ID NO: 1245255
uggugucaguaucuauaaa

SEQ ID NO: 1548677 - RNA, 19 nt, Artificial Sequence
  Description of Artificial Sequence: Synthetic oligonucleotide
  Antisense strand to SEQ ID NO: 1548676
uuuauagauacugacacca

SEQ ID NO: 1548678 - RNA, 19 nt, Artificial Sequence
  Description of Artificial Sequence: Synthetic oligonucleotide
  Sense strand starting at position 3342 of SEQ ID NO: 1245255
gaaauaguguuaccugaau

SEQ ID NO: 1548679 - RNA, 19 nt, Artificial Sequence
  Description of Artificial Sequence: Synthetic oligonucleotide
  Antisense strand to SEQ ID NO: 1548678
auucagguaacacuauuuc

SEQ ID NO: 1548680 - RNA, 19 nt, Artificial Sequence
  Description of Artificial Sequence: Synthetic oligonucleotide
  Sense strand starting at position 3379 of SEQ ID NO: 1245255
gagucugagccaggagaga

SEQ ID NO: 1548681 - RNA, 19 nt, Artificial Sequence
  Description of Artificial Sequence: Synthetic oligonucleotide
  Antisense strand to SEQ ID NO: 1548680
ucucuccuggcucagacuc

SEQ ID NO: 1548682 - RNA, 19 nt, Artificial Sequence
  Description of Artificial Sequence: Synthetic oligonucleotide
  Sense strand starting at position 3515 of SEQ ID NO: 1245255
uugagauaaaguugaugua

SEQ ID NO: 1548683 - RNA, 19 nt, Artificial Sequence
  Description of Artificial Sequence: Synthetic oligonucleotide
  Antisense strand to SEQ ID NO: 1548682
uacaucaacuuuaucucaa

SEQ ID NO: 1548684 - RNA, 19 nt, Artificial Sequence
  Description of Artificial Sequence: Synthetic oligonucleotide
  Sense strand starting at position 3648 of SEQ ID NO: 1245255
uucucuuugcauuagauag

SEQ ID NO: 1548685 - RNA, 19 nt, Artificial Sequence
  Description of Artificial Sequence: Synthetic oligonucleotide
  Antisense strand to SEQ ID NO: 1548684
cuaucuaaugcaaagagaa

SEQ ID NO: 1548686 - RNA, 19 nt, Artificial Sequence
  Description of Artificial Sequence: Synthetic oligonucleotide
  Sense strand starting at position 3761 of SEQ ID NO: 1245255
cugucaaagauguagugua

SEQ ID NO: 1548687 - RNA, 19 nt, Artificial Sequence
  Description of Artificial Sequence: Synthetic oligonucleotide
  Antisense strand to SEQ ID NO: 1548686
uacacuacaucuuugacag

SEQ ID NO: 1548688 - RNA, 19 nt, Artificial Sequence
  Description of Artificial Sequence: Synthetic oligonucleotide
  Sense strand starting at position 3766 of SEQ ID NO: 1245255
aaagauguaguguacugua

SEQ ID NO: 1548689 - RNA, 19 nt, Artificial Sequence
  Description of Artificial Sequence: Synthetic oligonucleotide
  Antisense strand to SEQ ID NO: 1548688
uacaguacacuacaucuuu

SEQ ID NO: 1548690 - RNA, 19 nt, Artificial Sequence
  Description of Artificial Sequence: Synthetic oligonucleotide
  Sense strand starting at position 3775 of SEQ ID NO: 1245255
guguacuguauguaggauu

SEQ ID NO: 1548691 - RNA, 19 nt, Artificial Sequence
  Description of Artificial Sequence: Synthetic oligonucleotide
  Antisense strand to SEQ ID NO: 1548690
aauccuacauacaguacac

SEQ ID NO: 1548692 - RNA, 19 nt, Artificial Sequence
  Description of Artificial Sequence: Synthetic oligonucleotide
  Sense strand starting at position 3832 of SEQ ID NO: 1245255
cuuacuaauguauggagau

SEQ ID NO: 1548693 - RNA, 19 nt, Artificial Sequence
  Description of Artificial Sequence: Synthetic oligonucleotide
  Antisense strand to SEQ ID NO: 1548692
aucuccauacauuaguaag

SEQ ID NO: 1548694 - RNA, 19 nt, Artificial Sequence
  Description of Artificial Sequence: Synthetic oligonucleotide
  Sense strand starting at position 3854 of SEQ ID NO: 1245255
uuaguaugaggccauauau

SEQ ID NO: 1548695 - RNA, 19 nt, Artificial Sequence
  Description of Artificial Sequence: Synthetic oligonucleotide
  Antisense strand to SEQ ID NO: 1548694
auauauggccucauacuaa

SEQ ID NO: 1548696 - RNA, 19 nt, Artificial Sequence
  Description of Artificial Sequence: Synthetic oligonucleotide
  Sense strand starting at position 3950 of SEQ ID NO: 1245255
ugaauagugccagagacuu

SEQ ID NO: 1548697 - RNA, 19 nt, Artificial Sequence
  Description of Artificial Sequence: Synthetic oligonucleotide
  Antisense strand to SEQ ID NO: 1548696
aagucucuggcacuauuca

SEQ ID NO: 1548698 - RNA, 19 nt, Artificial Sequence
  Description of Artificial Sequence: Synthetic oligonucleotide
  Sense strand starting at position 3956 of SEQ ID NO: 1245255
gugccagagacuuaaauug

SEQ ID NO: 1548699 - RNA, 19 nt, Artificial Sequence
  Description of Artificial Sequence: Synthetic oligonucleotide
  Antisense strand to SEQ ID NO: 1548698
caauuuaagucucuggcac

SEQ ID NO: 1548700 - RNA, 19 nt, Artificial Sequence
  Description of Artificial Sequence: Synthetic oligonucleotide
  Sense strand starting at position 212 of SEQ ID NO: 1245256
auaugcauugucugaucau

SEQ ID NO: 1548701 - RNA, 19 nt, Artificial Sequence
  Description of Artificial Sequence: Synthetic oligonucleotide
  Antisense strand to SEQ ID NO: 1548700
augaucagacaaugcauau

SEQ ID NO: 1548702 - RNA, 19 nt, Artificial Sequence
  Description of Artificial Sequence: Synthetic oligonucleotide
  Sense strand starting at position 215 of SEQ ID NO: 1245256
ugcauugucugaucauuuc

SEQ ID NO: 1548703 - RNA, 19 nt, Artificial Sequence
  Description of Artificial Sequence: Synthetic oligonucleotide
  Antisense strand to SEQ ID NO: 1548702
gaaaugaucagacaaugca

SEQ ID NO: 1548704 - RNA, 19 nt, Artificial Sequence
  Description of Artificial Sequence: Synthetic oligonucleotide
  Sense strand starting at position 322 of SEQ ID NO: 1245256
gauacugugccaggcauuu

SEQ ID NO: 1548705 - RNA, 19 nt, Artificial Sequence
  Description of Artificial Sequence: Synthetic oligonucleotide
  Antisense strand to SEQ ID NO: 1548704
aaaugccuggcacaguauc

SEQ ID NO: 1548706 - RNA, 19 nt, Artificial Sequence
  Description of Artificial Sequence: Synthetic oligonucleotide
  Sense strand starting at position 474 of SEQ ID NO: 1245256
ggccaaagccaauauucuu

SEQ ID NO: 1548707 - RNA, 19 nt, Artificial Sequence
  Description of Artificial Sequence: Synthetic oligonucleotide
  Antisense strand to SEQ ID NO: 1548706
aagaauauuggcuuuggcc

SEQ ID NO: 1548708 - RNA, 19 nt, Artificial Sequence
  Description of Artificial Sequence: Synthetic oligonucleotide
  Sense strand starting at position 584 of SEQ ID NO: 1245256
cugaacaaugcaugagagu

SEQ ID NO: 1548709 - RNA, 19 nt, Artificial Sequence
  Description of Artificial Sequence: Synthetic oligonucleotide
  Antisense strand to SEQ ID NO: 1548708
acucucaugcauuguucag

SEQ ID NO: 1548710 - RNA, 19 nt, Artificial Sequence
  Description of Artificial Sequence: Synthetic oligonucleotide
  Sense strand starting at position 591 of SEQ ID NO: 1245256
augcaugagaguugaagca

SEQ ID NO: 1548711 - RNA, 19 nt, Artificial Sequence
  Description of Artificial Sequence: Synthetic oligonucleotide
  Antisense strand to SEQ ID NO: 1548710
ugcuucaacucucaugcau

SEQ ID NO: 1548712 - RNA, 19 nt, Artificial Sequence
  Description of Artificial Sequence: Synthetic oligonucleotide
  Sense strand starting at position 615 of SEQ ID NO: 1245256
agcagaacgucaucccaaa

SEQ ID NO: 1548713 - RNA, 19 nt, Artificial Sequence
  Description of Artificial Sequence: Synthetic oligonucleotide
  Antisense strand to SEQ ID NO: 1548712
uuugggaugacguucugcu

SEQ ID NO: 1548714 - RNA, 19 nt, Artificial Sequence
  Description of Artificial Sequence: Synthetic oligonucleotide
  Sense strand starting at position 843 of SEQ ID NO: 1245256
accuuaaaugaguguauaa

SEQ ID NO: 1548715 - RNA, 19 nt, Artificial Sequence
  Description of Artificial Sequence: Synthetic oligonucleotide
  Antisense strand to SEQ ID NO: 1548714
uuauacacucauuuaaggu

SEQ ID NO: 1548716 - RNA, 19 nt, Artificial Sequence
  Description of Artificial Sequence: Synthetic oligonucleotide
  Sense strand starting at position 933 of SEQ ID NO: 1245256
aaguauuugucagcgaaua

SEQ ID NO: 1548717 - RNA, 19 nt, Artificial Sequence
  Description of Artificial Sequence: Synthetic oligonucleotide
  Antisense strand to SEQ ID NO: 1548716
uauucgcugacaaauacuu

SEQ ID NO: 1548718 - RNA, 19 nt, Artificial Sequence
  Description of Artificial Sequence: Synthetic oligonucleotide
  Sense strand starting at position 934 of SEQ ID NO: 1245256
aguauuugucagcgaauaa

SEQ ID NO: 1548719 - RNA, 19 nt, Artificial Sequence
  Description of Artificial Sequence: Synthetic oligonucleotide
  Antisense strand to SEQ ID NO: 1548718
uuauucgcugacaaauacu

SEQ ID NO: 1548720 - RNA, 19 nt, Artificial Sequence
  Description of Artificial Sequence: Synthetic oligonucleotide
  Sense strand starting at position 1031 of SEQ ID NO: 1245256
aggccuuugaccgacacau

SEQ ID NO: 1548721 - RNA, 19 nt, Artificial Sequence
  Description of Artificial Sequence: Synthetic oligonucleotide
  Antisense strand to SEQ ID NO: 1548720
augugucggucaaaggccu

SEQ ID NO: 1548722 - RNA, 19 nt, Artificial Sequence
  Description of Artificial Sequence: Synthetic oligonucleotide
  Sense strand starting at position 1033 of SEQ ID NO: 1245256
gccuuugaccgacacauau

SEQ ID NO: 1548723 - RNA, 19 nt, Artificial Sequence
  Description of Artificial Sequence: Synthetic oligonucleotide
  Antisense strand to SEQ ID NO: 1548722
auaugugucggucaaaggc

SEQ ID NO: 1548724 - RNA, 19 nt, Artificial Sequence
  Description of Artificial Sequence: Synthetic oligonucleotide
  Sense strand starting at position 1101 of SEQ ID NO: 1245256
ugaugcuauggucaauaau

SEQ ID NO: 1548725 - RNA, 19 nt, Artificial Sequence
  Description of Artificial Sequence: Synthetic oligonucleotide
  Antisense strand to SEQ ID NO: 1548724
auuauugaccauagcauca

SEQ ID NO: 1548726 - RNA, 19 nt, Artificial Sequence
  Description of Artificial Sequence: Synthetic oligonucleotide
  Sense strand starting at position 1120 of SEQ ID NO: 1245256
uugugauagcuuugacaac

SEQ ID NO: 1548727 - RNA, 19 nt, Artificial Sequence
  Description of Artificial Sequence: Synthetic oligonucleotide
  Antisense strand to SEQ ID NO: 1548726
guugucaaagcuaucacaa

SEQ ID NO: 1548728 - RNA, 19 nt, Artificial Sequence
  Description of Artificial Sequence: Synthetic oligonucleotide
  Sense strand starting at position 1421 of SEQ ID NO: 1245256
acaccaugugcucaucuua

SEQ ID NO: 1548729 - RNA, 19 nt, Artificial Sequence
  Description of Artificial Sequence: Synthetic oligonucleotide
  Antisense strand to SEQ ID NO: 1548728
uaagaugagcacauggugu

SEQ ID NO: 1548730 - RNA, 19 nt, Artificial Sequence
  Description of Artificial Sequence: Synthetic oligonucleotide
  Sense strand starting at position 1534 of SEQ ID NO: 1245256
ucuuacuuacgacgagacu

SEQ ID NO: 1548731 - RNA, 19 nt, Artificial Sequence
  Description of Artificial Sequence: Synthetic oligonucleotide
  Antisense strand to SEQ ID NO: 1548730
agucucgucguaaguaaga

SEQ ID NO: 1548732 - RNA, 19 nt, Artificial Sequence
  Description of Artificial Sequence: Synthetic oligonucleotide
  Sense strand starting at position 1535 of SEQ ID NO: 1245256
cuuacuuacgacgagacuu

SEQ ID NO: 1548733 - RNA, 19 nt, Artificial Sequence
  Description of Artificial Sequence: Synthetic oligonucleotide
  Antisense strand to SEQ ID NO: 1548732
aagucucgucguaaguaag

SEQ ID NO: 1548734 - RNA, 19 nt, Artificial Sequence
  Description of Artificial Sequence: Synthetic oligonucleotide
  Sense strand starting at position 1776 of SEQ ID NO: 1245256
agacgagucacguacuuuc

SEQ ID NO: 1548735 - RNA, 19 nt, Artificial Sequence
  Description of Artificial Sequence: Synthetic oligonucleotide
  Antisense strand to SEQ ID NO: 1548734
gaaaguacgugacucgucu

SEQ ID NO: 1548736 - RNA, 19 nt, Artificial Sequence
  Description of Artificial Sequence: Synthetic oligonucleotide
  Sense strand starting at position 2158 of SEQ ID NO: 1245256
ggcaaauguauacgggaaa

SEQ ID NO: 1548737 - RNA, 19 nt, Artificial Sequence
  Description of Artificial Sequence: Synthetic oligonucleotide
  Antisense strand to SEQ ID NO: 1548736
uuucccguauacauuugcc

SEQ ID NO: 1548738 - RNA, 19 nt, Artificial Sequence
  Description of Artificial Sequence: Synthetic oligonucleotide
  Sense strand starting at position 2178 of SEQ ID NO: 1245256
ggcuaaucugguuacauuc

SEQ ID NO: 1548739 - RNA, 19 nt, Artificial Sequence
  Description of Artificial Sequence: Synthetic oligonucleotide
  Antisense strand to SEQ ID NO: 1548738
gaauguaaccagauuagcc

SEQ ID NO: 1548740 - RNA, 19 nt, Artificial Sequence
  Description of Artificial Sequence: Synthetic oligonucleotide
  Sense strand starting at position 2241 of SEQ ID NO: 1245256
aagagacgcuaucauuuga

SEQ ID NO: 1548741 - RNA, 19 nt, Artificial Sequence
  Description of Artificial Sequence: Synthetic oligonucleotide
  Antisense strand to SEQ ID NO: 1548740
ucaaaugauagcgucucuu

SEQ ID NO: 1548742 - RNA, 19 nt, Artificial Sequence
  Description of Artificial Sequence: Synthetic oligonucleotide
  Sense strand starting at position 2258 of SEQ ID NO: 1245256
gagcuugagcuguaccuaa

SEQ ID NO: 1548743 - RNA, 19 nt, Artificial Sequence
  Description of Artificial Sequence: Synthetic oligonucleotide
  Antisense strand to SEQ ID NO: 1548742
uuagguacagcucaagcuc

SEQ ID NO: 1548744 - RNA, 19 nt, Artificial Sequence
  Description of Artificial Sequence: Synthetic oligonucleotide
  Sense strand starting at position 2439 of SEQ ID NO: 1245256
cucuuucugcucuaaagag

SEQ ID NO: 1548745 - RNA, 19 nt, Artificial Sequence
  Description of Artificial Sequence: Synthetic oligonucleotide
  Antisense strand to SEQ ID NO: 1548744
cucuuuagagcagaaagag

SEQ ID NO: 1548746 - RNA, 19 nt, Artificial Sequence
  Description of Artificial Sequence: Synthetic oligonucleotide
  Sense strand starting at position 2522 of SEQ ID NO: 1245256
ugcuacuuuggacauaaua

SEQ ID NO: 1548747 - RNA, 19 nt, Artificial Sequence
  Description of Artificial Sequence: Synthetic oligonucleotide
  Antisense strand to SEQ ID NO: 1548746
uauuauguccaaaguagca

SEQ ID NO: 1548748 - RNA, 19 nt, Artificial Sequence
  Description of Artificial Sequence: Synthetic oligonucleotide
  Sense strand starting at position 2540 of SEQ ID NO: 1245256
acuugcgugcauguuuaaa

SEQ ID NO: 1548749 - RNA, 19 nt, Artificial Sequence
  Description of Artificial Sequence: Synthetic oligonucleotide
  Antisense strand to SEQ ID NO: 1548748
uuuaaacaugcacgcaagu

SEQ ID NO: 1548750 - RNA, 19 nt, Artificial Sequence
  Description of Artificial Sequence: Synthetic oligonucleotide
  Sense strand starting at position 2548 of SEQ ID NO: 1245256
gcauguuuaaacugggaau

SEQ ID NO: 1548751 - RNA, 19 nt, Artificial Sequence
  Description of Artificial Sequence: Synthetic oligonucleotide
  Antisense strand to SEQ ID NO: 1548750
auucccaguuuaaacaugc

SEQ ID NO: 1548752 - RNA, 19 nt, Artificial Sequence
  Description of Artificial Sequence: Synthetic oligonucleotide
  Sense strand starting at position 2550 of SEQ ID NO: 1245256
auguuuaaacugggaauau

SEQ ID NO: 1548753 - RNA, 19 nt, Artificial Sequence
  Description of Artificial Sequence: Synthetic oligonucleotide
  Antisense strand to SEQ ID NO: 1548752
auauucccaguuuaaacau

SEQ ID NO: 1548754 - RNA, 19 nt, Artificial Sequence
  Description of Artificial Sequence: Synthetic oligonucleotide
  Sense strand starting at position 2612 of SEQ ID NO: 1245256
agaggccuccuguaauaac

SEQ ID NO: 1548755 - RNA, 19 nt, Artificial Sequence
  Description of Artificial Sequence: Synthetic oligonucleotide
  Antisense strand to SEQ ID NO: 1548754
guuauuacaggaggccucu

SEQ ID NO: 1548756 - RNA, 19 nt, Artificial Sequence
  Description of Artificial Sequence: Synthetic oligonucleotide
  Sense strand starting at position 2756 of SEQ ID NO: 1245256
ccauuuacuuccgugucuu

SEQ ID NO: 1548757 - RNA, 19 nt, Artificial Sequence
  Description of Artificial Sequence: Synthetic oligonucleotide
  Antisense strand to SEQ ID NO: 1548756
aagacacggaaguaaaugg

SEQ ID NO: 1548758 - RNA, 19 nt, Artificial Sequence
  Description of Artificial Sequence: Synthetic oligonucleotide
  Sense strand starting at position 2790 of SEQ ID NO: 1245256
uaaugcauugcugaguuua

SEQ ID NO: 1548759 - RNA, 19 nt, Artificial Sequence
  Description of Artificial Sequence: Synthetic oligonucleotide
  Antisense strand to SEQ ID NO: 1548758
uaaacucagcaaugcauua

SEQ ID NO: 1548760 - RNA, 19 nt, Artificial Sequence
  Description of Artificial Sequence: Synthetic oligonucleotide
  Sense strand starting at position 2818 of SEQ ID NO: 1245256
acuuacugguuauuaauga

SEQ ID NO: 1548761 - RNA, 19 nt, Artificial Sequence
  Description of Artificial Sequence: Synthetic oligonucleotide
  Antisense strand to SEQ ID NO: 1548760
ucauuaauaaccaguaagu

SEQ ID NO: 1548762 - RNA, 19 nt, Artificial Sequence
  Description of Artificial Sequence: Synthetic oligonucleotide
  Sense strand starting at position 3520 of SEQ ID NO: 1245256
ucacuaaaguaugugcaaa

SEQ ID NO: 1548763 - RNA, 19 nt, Artificial Sequence
  Description of Artificial Sequence: Synthetic oligonucleotide
  Antisense strand to SEQ ID NO: 1548762
uuugcacauacuuuaguga

SEQ ID NO: 1548764 - RNA, 19 nt, Artificial Sequence
  Description of Artificial Sequence: Synthetic oligonucleotide
  Sense strand starting at position 3602 of SEQ ID NO: 1245256
ggagcuguuuaaccuggaa

SEQ ID NO: 1548765 - RNA, 19 nt, Artificial Sequence
  Description of Artificial Sequence: Synthetic oligonucleotide
  Antisense strand to SEQ ID NO: 1548764
uuccagguuaaacagcucc

SEQ ID NO: 1548766 - RNA, 19 nt, Artificial Sequence
  Description of Artificial Sequence: Synthetic oligonucleotide
  Sense strand starting at position 3718 of SEQ ID NO: 1245256
acaugauaguuauccuccu

SEQ ID NO: 1548767 - RNA, 19 nt, Artificial Sequence
  Description of Artificial Sequence: Synthetic oligonucleotide
  Antisense strand to SEQ ID NO: 1548766
aggaggauaacuaucaugu

SEQ ID NO: 1548768 - RNA, 19 nt, Artificial Sequence
  Description of Artificial Sequence: Synthetic oligonucleotide
  Sense strand starting at position 3768 of SEQ ID NO: 1245256
uugauuuguuccuaagaau

SEQ ID NO: 1548769 - RNA, 19 nt, Artificial Sequence
  Description of Artificial Sequence: Synthetic oligonucleotide
  Antisense strand to SEQ ID NO: 1548768
auucuuaggaacaaaucaa

SEQ ID NO: 1548770 - RNA, 19 nt, Artificial Sequence
  Description of Artificial Sequence: Synthetic oligonucleotide
  Sense strand starting at position 3875 of SEQ ID NO: 1245256
guaacacuguugucacaag

SEQ ID NO: 1548771 - RNA, 19 nt, Artificial Sequence
  Description of Artificial Sequence: Synthetic oligonucleotide
  Antisense strand to SEQ ID NO: 1548770
cuugugacaacaguguuac

SEQ ID NO: 1548772 - RNA, 19 nt, Artificial Sequence
  Description of Artificial Sequence: Synthetic oligonucleotide
  Sense strand starting at position 3887 of SEQ ID NO: 1245256
ucacaaguacucuguuuaa

SEQ ID NO: 1548773 - RNA, 19 nt, Artificial Sequence
  Description of Artificial Sequence: Synthetic oligonucleotide
  Antisense strand to SEQ ID NO: 1548772
uuaaacagaguacuuguga

SEQ ID NO: 1548774 - RNA, 19 nt, Artificial Sequence
  Description of Artificial Sequence: Synthetic oligonucleotide
  Sense strand starting at position 3907 of SEQ ID NO: 1245256
gcauaacuccagcaaugag

SEQ ID NO: 1548775 - RNA, 19 nt, Artificial Sequence
  Description of Artificial Sequence: Synthetic oligonucleotide
  Antisense strand to SEQ ID NO: 1548774
cucauugcuggaguuaugc

SEQ ID NO: 1548776 - RNA, 19 nt, Artificial Sequence
  Description of Artificial Sequence: Synthetic oligonucleotide
  Sense strand starting at position 3928 of SEQ ID NO: 1245256
ugagguuugaugugaaacc

SEQ ID NO: 1548777 - RNA, 19 nt, Artificial Sequence
  Description of Artificial Sequence: Synthetic oligonucleotide
  Antisense strand to SEQ ID NO: 1548776
gguuucacaucaaaccuca

SEQ ID NO: 1548778 - RNA, 19 nt, Artificial Sequence
  Description of Artificial Sequence: Synthetic oligonucleotide
  Sense strand starting at position 3979 of SEQ ID NO: 1245256
aggaguaaauuaucugauc

SEQ ID NO: 1548779 - RNA, 19 nt, Artificial Sequence
  Description of Artificial Sequence: Synthetic oligonucleotide
  Antisense strand to SEQ ID NO: 1548778
gaucagauaauuuacuccu

SEQ ID NO: 1548780 - RNA, 19 nt, Artificial Sequence
  Description of Artificial Sequence: Synthetic oligonucleotide
  Sense strand starting at position 3 of SEQ ID NO: 1245257
auccauugccuuuauggaa

SEQ ID NO: 1548781 - RNA, 19 nt, Artificial Sequence
  Description of Artificial Sequence: Synthetic oligonucleotide
  Antisense strand to SEQ ID NO: 1548780
uuccauaaaggcaauggau

SEQ ID NO: 1548782 - RNA, 19 nt, Artificial Sequence
  Description of Artificial Sequence: Synthetic oligonucleotide
  Sense strand starting at position 74 of SEQ ID NO: 1245257
ggaauugaguuauucuaac

SEQ ID NO: 1548783 - RNA, 19 nt, Artificial Sequence
  Description of Artificial Sequence: Synthetic oligonucleotide
  Antisense strand to SEQ ID NO: 1548782
guuagaauaacucaauucc

SEQ ID NO: 1548784 - RNA, 19 nt, Artificial Sequence
  Description of Artificial Sequence: Synthetic oligonucleotide
  Sense strand starting at position 232 of SEQ ID NO: 1245257
aggucuuucggguacacuu

SEQ ID NO: 1548785 - RNA, 19 nt, Artificial Sequence
  Description of Artificial Sequence: Synthetic oligonucleotide
  Antisense strand to SEQ ID NO: 1548784
aaguguacccgaaagaccu

SEQ ID NO: 1548786 - RNA, 19 nt, Artificial Sequence
  Description of Artificial Sequence: Synthetic oligonucleotide
  Sense strand starting at position 494 of SEQ ID NO: 1245257
aucaaauauguugggaagu

SEQ ID NO: 1548787 - RNA, 19 nt, Artificial Sequence
  Description of Artificial Sequence: Synthetic oligonucleotide
  Antisense strand to SEQ ID NO: 1548786
acuucccaacauauuugau

SEQ ID NO: 1548788 - RNA, 19 nt, Artificial Sequence
  Description of Artificial Sequence: Synthetic oligonucleotide
  Sense strand starting at position 520 of SEQ ID NO: 1245257
uagacauguugucuacaga

SEQ ID NO: 1548789 - RNA, 19 nt, Artificial Sequence
  Description of Artificial Sequence: Synthetic oligonucleotide
  Antisense strand to SEQ ID NO: 1548788
ucuguagacaacaugucua

SEQ ID NO: 1548790 - RNA, 19 nt, Artificial Sequence
  Description of Artificial Sequence: Synthetic oligonucleotide
  Sense strand starting at position 523 of SEQ ID NO: 1245257
acauguugucuacagagau

SEQ ID NO: 1548791 - RNA, 19 nt, Artificial Sequence
  Description of Artificial Sequence: Synthetic oligonucleotide
  Antisense strand to SEQ ID NO: 1548790
aucucuguagacaacaugu

SEQ ID NO: 1548792 - RNA, 19 nt, Artificial Sequence
  Description of Artificial Sequence: Synthetic oligonucleotide
  Sense strand starting at position 599 of SEQ ID NO: 1245257
acuggaagcccugaauucu

SEQ ID NO: 1548793 - RNA, 19 nt, Artificial Sequence
  Description of Artificial Sequence: Synthetic oligonucleotide
  Antisense strand to SEQ ID NO: 1548792
agaauucagggcuuccagu

SEQ ID NO: 1548794 - RNA, 19 nt, Artificial Sequence
  Description of Artificial Sequence: Synthetic oligonucleotide
  Sense strand starting at position 608 of SEQ ID NO: 1245257
ccugaauucuaaguggaaa

SEQ ID NO: 1548795 - RNA, 19 nt, Artificial Sequence
  Description of Artificial Sequence: Synthetic oligonucleotide
  Antisense strand to SEQ ID NO: 1548794
uuuccacuuagaauucagg

SEQ ID NO: 1548796 - RNA, 19 nt, Artificial Sequence
  Description of Artificial Sequence: Synthetic oligonucleotide
  Sense strand starting at position 674 of SEQ ID NO: 1245257
cccggucauuuccuuaauu

SEQ ID NO: 1548797 - RNA, 19 nt, Artificial Sequence
  Description of Artificial Sequence: Synthetic oligonucleotide
  Antisense strand to SEQ ID NO: 1548796
aauuaaggaaaugaccggg

SEQ ID NO: 1548798 - RNA, 19 nt, Artificial Sequence
  Description of Artificial Sequence: Synthetic oligonucleotide
  Sense strand starting at position 741 of SEQ ID NO: 1245257
ucaaguuuaagagggacuu

SEQ ID NO: 1548799 - RNA, 19 nt, Artificial Sequence
  Description of Artificial Sequence: Synthetic oligonucleotide
  Antisense strand to SEQ ID NO: 1548798
aagucccucuuaaacuuga

SEQ ID NO: 1548800 - RNA, 19 nt, Artificial Sequence
  Description of Artificial Sequence: Synthetic oligonucleotide
  Sense strand starting at position 767 of SEQ ID NO: 1245257
cuuccuguucuugggaauu

SEQ ID NO: 1548801 - RNA, 19 nt, Artificial Sequence
  Description of Artificial Sequence: Synthetic oligonucleotide
  Antisense strand to SEQ ID NO: 1548800
aauucccaagaacaggaag

SEQ ID NO: 1548802 - RNA, 19 nt, Artificial Sequence
  Description of Artificial Sequence: Synthetic oligonucleotide
  Sense strand starting at position 799 of SEQ ID NO: 1245257
aagugcuaugcauaaguaa

SEQ ID NO: 1548803 - RNA, 19 nt, Artificial Sequence
  Description of Artificial Sequence: Synthetic oligonucleotide
  Antisense strand to SEQ ID NO: 1548802
uuacuuaugcauagcacuu

SEQ ID NO: 1548804 - RNA, 19 nt, Artificial Sequence
  Description of Artificial Sequence: Synthetic oligonucleotide
  Sense strand starting at position 802 of SEQ ID NO: 1245257
ugcuaugcauaaguaagau

SEQ ID NO: 1548805 - RNA, 19 nt, Artificial Sequence
  Description of Artificial Sequence: Synthetic oligonucleotide
  Antisense strand to SEQ ID NO: 1548804
aucuuacuuaugcauagca

SEQ ID NO: 1548806 - RNA, 19 nt, Artificial Sequence
  Description of Artificial Sequence: Synthetic oligonucleotide
  Sense strand starting at position 918 of SEQ ID NO: 1245257
caacuuaggcauggucaca

SEQ ID NO: 1548807 - RNA, 19 nt, Artificial Sequence
  Description of Artificial Sequence: Synthetic oligonucleotide
  Antisense strand to SEQ ID NO: 1548806
ugugaccaugccuaaguug

SEQ ID NO: 1548808 - RNA, 19 nt, Artificial Sequence
  Description of Artificial Sequence: Synthetic oligonucleotide
  Sense strand starting at position 1072 of SEQ ID NO: 1245257
uggguucucuguuuagauu

SEQ ID NO: 1548809 - RNA, 19 nt, Artificial Sequence
  Description of Artificial Sequence: Synthetic oligonucleotide
  Antisense strand to SEQ ID NO: 1548808
aaucuaaacagagaaccca

SEQ ID NO: 1548810 - RNA, 19 nt, Artificial Sequence
  Description of Artificial Sequence: Synthetic oligonucleotide
  Sense strand starting at position 2000 of SEQ ID NO: 1245257
gugagaacuucccugguga

SEQ ID NO: 1548811 - RNA, 19 nt, Artificial Sequence
  Description of Artificial Sequence: Synthetic oligonucleotide
  Antisense strand to SEQ ID NO: 1548810
ucaccagggaaguucucac

SEQ ID NO: 1548812 - RNA, 19 nt, Artificial Sequence
  Description of Artificial Sequence: Synthetic oligonucleotide
  Sense strand starting at position 2001 of SEQ ID NO: 1245257
ugagaacuucccuggugac

SEQ ID NO: 1548813 - RNA, 19 nt, Artificial Sequence
  Description of Artificial Sequence: Synthetic oligonucleotide
  Antisense strand to SEQ ID NO: 1548812
gucaccagggaaguucuca

SEQ ID NO: 1548814 - RNA, 19 nt, Artificial Sequence
  Description of Artificial Sequence: Synthetic oligonucleotide
  Sense strand starting at position 2372 of SEQ ID NO: 1245257
accagaggccuuggcaauu

SEQ ID NO: 1548815 - RNA, 19 nt, Artificial Sequence
  Description of Artificial Sequence: Synthetic oligonucleotide
  Antisense strand to SEQ ID NO: 1548814
aauugccaaggccucuggu

SEQ ID NO: 1548816 - RNA, 19 nt, Artificial Sequence
  Description of Artificial Sequence: Synthetic oligonucleotide
  Sense strand starting at position 2488 of SEQ ID NO: 1245257
ccuuaaucaccgcagagga

SEQ ID NO: 1548817 - RNA, 19 nt, Artificial Sequence
  Description of Artificial Sequence: Synthetic oligonucleotide
  Antisense strand to SEQ ID NO: 1548816
uccucugcggugauuaagg

SEQ ID NO: 1548818 - RNA, 19 nt, Artificial Sequence
  Description of Artificial Sequence: Synthetic oligonucleotide
  Sense strand starting at position 2577 of SEQ ID NO: 1245257
cagaaagaacaucguguuu

SEQ ID NO: 1548819 - RNA, 19 nt, Artificial Sequence
  Description of Artificial Sequence: Synthetic oligonucleotide
  Antisense strand to SEQ ID NO: 1548818
aaacacgauguucuuucug

SEQ ID NO: 1548820 - RNA, 19 nt, Artificial Sequence
  Description of Artificial Sequence: Synthetic oligonucleotide
  Sense strand starting at position 2616 of SEQ ID NO: 1245257
uguguccuuccagauaggu

SEQ ID NO: 1548821 - RNA, 19 nt, Artificial Sequence
  Description of Artificial Sequence: Synthetic oligonucleotide
  Antisense strand to SEQ ID NO: 1548820
accuaucuggaaggacaca

SEQ ID NO: 1548822 - RNA, 19 nt, Artificial Sequence
  Description of Artificial Sequence: Synthetic oligonucleotide
  Sense strand starting at position 2632 of SEQ ID NO: 1245257
ggucgauaucgcccauugu

SEQ ID NO: 1548823 - RNA, 19 nt, Artificial Sequence
  Description of Artificial Sequence: Synthetic oligonucleotide
  Antisense strand to SEQ ID NO: 1548822
acaaugggcgauaucgacc

SEQ ID NO: 1548824 - RNA, 19 nt, Artificial Sequence
  Description of Artificial Sequence: Synthetic oligonucleotide
  Sense strand starting at position 2645 of SEQ ID NO: 1245257
cauuguggauguuuagcaa

SEQ ID NO: 1548825 - RNA, 19 nt, Artificial Sequence
  Description of Artificial Sequence: Synthetic oligonucleotide
  Antisense strand to SEQ ID NO: 1548824
uugcuaaacauccacaaug

SEQ ID NO: 1548826 - RNA, 19 nt, Artificial Sequence
  Description of Artificial Sequence: Synthetic oligonucleotide
  Sense strand starting at position 2669 of SEQ ID NO: 1245257
aguggaucguuaucauaug

SEQ ID NO: 1548827 - RNA, 19 nt, Artificial Sequence
  Description of Artificial Sequence: Synthetic oligonucleotide
  Antisense strand to SEQ ID NO: 1548826
cauaugauaacgauccacu

SEQ ID NO: 1548828 - RNA, 19 nt, Artificial Sequence
  Description of Artificial Sequence: Synthetic oligonucleotide
  Sense strand starting at position 2755 of SEQ ID NO: 1245257
uggcgaggccaugaguaau

SEQ ID NO: 1548829 - RNA, 19 nt, Artificial Sequence
  Description of Artificial Sequence: Synthetic oligonucleotide
  Antisense strand to SEQ ID NO: 1548828
auuacucauggccucgcca

SEQ ID NO: 1548830 - RNA, 19 nt, Artificial Sequence
  Description of Artificial Sequence: Synthetic oligonucleotide
  Sense strand starting at position 2761 of SEQ ID NO: 1245257
ggccaugaguaauucuacu

SEQ ID NO: 1548831 - RNA, 19 nt, Artificial Sequence
  Description of Artificial Sequence: Synthetic oligonucleotide
  Antisense strand to SEQ ID NO: 1548830
aguagaauuacucauggcc

SEQ ID NO: 1548832 - RNA, 19 nt, Artificial Sequence
  Description of Artificial Sequence: Synthetic oligonucleotide
  Sense strand starting at position 2792 of SEQ ID NO: 1245257
aguaauuaggagugguuaa

SEQ ID NO: 1548833 - RNA, 19 nt, Artificial Sequence
  Description of Artificial Sequence: Synthetic oligonucleotide
  Antisense strand to SEQ ID NO: 1548832
uuaaccacuccuaauuacu

SEQ ID NO: 1548834 - RNA, 19 nt, Artificial Sequence
  Description of Artificial Sequence: Synthetic oligonucleotide
  Sense strand starting at position 2793 of SEQ ID NO: 1245257
guaauuaggagugguuaac

SEQ ID NO: 1548835 - RNA, 19 nt, Artificial Sequence
  Description of Artificial Sequence: Synthetic oligonucleotide
  Antisense strand to SEQ ID NO: 1548834
guuaaccacuccuaauuac

SEQ ID NO: 1548836 - RNA, 19 nt, Artificial Sequence
  Description of Artificial Sequence: Synthetic oligonucleotide
  Sense strand starting at position 2832 of SEQ ID NO: 1245257
ugcuaaggacuuugacaug

SEQ ID NO: 1548837 - RNA, 19 nt, Artificial Sequence
  Description of Artificial Sequence: Synthetic oligonucleotide
  Antisense strand to SEQ ID NO: 1548836
caugucaaaguccuuagca

SEQ ID NO: 1548838 - RNA, 19 nt, Artificial Sequence
  Description of Artificial Sequence: Synthetic oligonucleotide
  Sense strand starting at position 3014 of SEQ ID NO: 1245257
agcaaucaguuucuuagaa

SEQ ID NO: 1548839 - RNA, 19 nt, Artificial Sequence
  Description of Artificial Sequence: Synthetic oligonucleotide
  Antisense strand to SEQ ID NO: 1548838
uucuaagaaacugauugcu

SEQ ID NO: 1548840 - RNA, 19 nt, Artificial Sequence
  Description of Artificial Sequence: Synthetic oligonucleotide
  Sense strand starting at position 3015 of SEQ ID NO: 1245257
gcaaucaguuucuuagaaa

SEQ ID NO: 1548841 - RNA, 19 nt, Artificial Sequence
  Description of Artificial Sequence: Synthetic oligonucleotide
  Antisense strand to SEQ ID NO: 1548840
uuucuaagaaacugauugc

SEQ ID NO: 1548842 - RNA, 19 nt, Artificial Sequence
  Description of Artificial Sequence: Synthetic oligonucleotide
  Sense strand starting at position 3410 of SEQ ID NO: 1245257
ccuagaagugcuuaguuug

SEQ ID NO: 1548843 - RNA, 19 nt, Artificial Sequence
  Description of Artificial Sequence: Synthetic oligonucleotide
  Antisense strand to SEQ ID NO: 1548842
caaacuaagcacuucuagg

SEQ ID NO: 1548844 - RNA, 19 nt, Artificial Sequence
  Description of Artificial Sequence: Synthetic oligonucleotide
  Sense strand starting at position 3420 of SEQ ID NO: 1245257
cuuaguuugguuuacagua

SEQ ID NO: 1548845 - RNA, 19 nt, Artificial Sequence
  Description of Artificial Sequence: Synthetic oligonucleotide
  Antisense strand to SEQ ID NO: 1548844
uacuguaaaccaaacuaag

SEQ ID NO: 1548846 - RNA, 19 nt, Artificial Sequence
  Description of Artificial Sequence: Synthetic oligonucleotide
  Sense strand starting at position 3575 of SEQ ID NO: 1245257
agugcaaacuagguuugaa

SEQ ID NO: 1548847 - RNA, 19 nt, Artificial Sequence
  Description of Artificial Sequence: Synthetic oligonucleotide
  Antisense strand to SEQ ID NO: 1548846
uucaaaccuaguuugcacu

SEQ ID NO: 1548848 - RNA, 19 nt, Artificial Sequence
  Description of Artificial Sequence: Synthetic oligonucleotide
  Sense strand starting at position 3687 of SEQ ID NO: 1245257
ucaguaggcauuugagguu

SEQ ID NO: 1548849 - RNA, 19 nt, Artificial Sequence
  Description of Artificial Sequence: Synthetic oligonucleotide
  Antisense strand to SEQ ID NO: 1548848
aaccucaaaugccuacuga

SEQ ID NO: 1548850 - RNA, 19 nt, Artificial Sequence
  Description of Artificial Sequence: Synthetic oligonucleotide
  Sense strand starting at position 3693 of SEQ ID NO: 1245257
ggcauuugagguuguuuau

SEQ ID NO: 1548851 - RNA, 19 nt, Artificial Sequence
  Description of Artificial Sequence: Synthetic oligonucleotide
  Antisense strand to SEQ ID NO: 1548850
auaaacaaccucaaaugcc

SEQ ID NO: 1548852 - RNA, 19 nt, Artificial Sequence
  Description of Artificial Sequence: Synthetic oligonucleotide
  Sense strand starting at position 3809 of SEQ ID NO: 1245257
ugcucuugaguuuaaacaa

SEQ ID NO: 1548853 - RNA, 19 nt, Artificial Sequence
  Description of Artificial Sequence: Synthetic oligonucleotide
  Antisense strand to SEQ ID NO: 1548852
uuguuuaaacucaagagca

SEQ ID NO: 1548854 - RNA, 19 nt, Artificial Sequence
  Description of Artificial Sequence: Synthetic oligonucleotide
  Sense strand starting at position 3865 of SEQ ID NO: 1245257
gguauauacaaacgaguaa

SEQ ID NO: 1548855 - RNA, 19 nt, Artificial Sequence
  Description of Artificial Sequence: Synthetic oligonucleotide
  Antisense strand to SEQ ID NO: 1548854
uuacucguuuguauauacc

SEQ ID NO: 1548856 - RNA, 19 nt, Artificial Sequence
  Description of Artificial Sequence: Synthetic oligonucleotide
  Sense strand starting at position 3929 of SEQ ID NO: 1245257
uggagaugcugccuugaaa

SEQ ID NO: 1548857 - RNA, 19 nt, Artificial Sequence
  Description of Artificial Sequence: Synthetic oligonucleotide
  Antisense strand to SEQ ID NO: 1548856
uuucaaggcagcaucucca

SEQ ID NO: 1548858 - RNA, 19 nt, Artificial Sequence
  Description of Artificial Sequence: Synthetic oligonucleotide
  Sense strand starting at position 3932 of SEQ ID NO: 1245257
agaugcugccuugaaaucu

SEQ ID NO: 1548859 - RNA, 19 nt, Artificial Sequence
  Description of Artificial Sequence: Synthetic oligonucleotide
  Antisense strand to SEQ ID NO: 1548858
agauuucaaggcagcaucu

SEQ ID NO: 1548860 - RNA, 19 nt, Artificial Sequence
  Description of Artificial Sequence: Synthetic oligonucleotide
  Sense strand starting at position 237 of SEQ ID NO: 1245258
ccuggauuaugugugaaag

SEQ ID NO: 1548861 - RNA, 19 nt, Artificial Sequence
  Description of Artificial Sequence: Synthetic oligonucleotide
  Antisense strand to SEQ ID NO: 1548860
cuuucacacauaauccagg

SEQ ID NO: 1548862 - RNA, 19 nt, Artificial Sequence
  Description of Artificial Sequence: Synthetic oligonucleotide
  Sense strand starting at position 238 of SEQ ID NO: 1245258
cuggauuaugugugaaagc

SEQ ID NO: 1548863 - RNA, 19 nt, Artificial Sequence
  Description of Artificial Sequence: Synthetic oligonucleotide
  Antisense strand to SEQ ID NO: 1548862
gcuuucacacauaauccag

SEQ ID NO: 1548864 - RNA, 19 nt, Artificial Sequence
  Description of Artificial Sequence: Synthetic oligonucleotide
  Sense strand starting at position 378 of SEQ ID NO: 1245258
aauaauggaugaugaaaga

SEQ ID NO: 1548865 - RNA, 19 nt, Artificial Sequence
  Description of Artificial Sequence: Synthetic oligonucleotide
  Antisense strand to SEQ ID NO: 1548864
ucuuucaucauccauuauu

SEQ ID NO: 1548866 - RNA, 19 nt, Artificial Sequence
  Description of Artificial Sequence: Synthetic oligonucleotide
  Sense strand starting at position 401 of SEQ ID NO: 1245258
auacuaucaccuggaaguu

SEQ ID NO: 1548867 - RNA, 19 nt, Artificial Sequence
  Description of Artificial Sequence: Synthetic oligonucleotide
  Antisense strand to SEQ ID NO: 1548866
aacuuccaggugauaguau

SEQ ID NO: 1548868 - RNA, 19 nt, Artificial Sequence
  Description of Artificial Sequence: Synthetic oligonucleotide
  Sense strand starting at position 502 of SEQ ID NO: 1245258
gcagcaugcccuuacauuu

SEQ ID NO: 1548869 - RNA, 19 nt, Artificial Sequence
  Description of Artificial Sequence: Synthetic oligonucleotide
  Antisense strand to SEQ ID NO: 1548868
aaauguaagggcaugcugc

SEQ ID NO: 1548870 - RNA, 19 nt, Artificial Sequence
  Description of Artificial Sequence: Synthetic oligonucleotide
  Sense strand starting at position 576 of SEQ ID NO: 1245258
guacaagugugggcuauuu

SEQ ID NO: 1548871 - RNA, 19 nt, Artificial Sequence
  Description of Artificial Sequence: Synthetic oligonucleotide
  Antisense strand to SEQ ID NO: 1548870
aaauagcccacacuuguac

SEQ ID NO: 1548872 - RNA, 19 nt, Artificial Sequence
  Description of Artificial Sequence: Synthetic oligonucleotide
  Sense strand starting at position 612 of SEQ ID NO: 1245258
aggauuaucugguuuaaug

SEQ ID NO: 1548873 - RNA, 19 nt, Artificial Sequence
  Description of Artificial Sequence: Synthetic oligonucleotide
  Antisense strand to SEQ ID NO: 1548872
cauuaaaccagauaauccu

SEQ ID NO: 1548874 - RNA, 19 nt, Artificial Sequence
  Description of Artificial Sequence: Synthetic oligonucleotide
  Sense strand starting at position 614 of SEQ ID NO: 1245258
gauuaucugguuuaaugcu

SEQ ID NO: 1548875 - RNA, 19 nt, Artificial Sequence
  Description of Artificial Sequence: Synthetic oligonucleotide
  Antisense strand to SEQ ID NO: 1548874
agcauuaaaccagauaauc

SEQ ID NO: 1548876 - RNA, 19 nt, Artificial Sequence
  Description of Artificial Sequence: Synthetic oligonucleotide
  Sense strand starting at position 630 of SEQ ID NO: 1245258
gcuaaaucgccagugccua

SEQ ID NO: 1548877 - RNA, 19 nt, Artificial Sequence
  Description of Artificial Sequence: Synthetic oligonucleotide
  Antisense strand to SEQ ID NO: 1548876
uaggcacuggcgauuuagc

SEQ ID NO: 1548878 - RNA, 19 nt, Artificial Sequence
  Description of Artificial Sequence: Synthetic oligonucleotide
  Sense strand starting at position 702 of SEQ ID NO: 1245258
acugaauaguucuuugauu

SEQ ID NO: 1548879 - RNA, 19 nt, Artificial Sequence
  Description of Artificial Sequence: Synthetic oligonucleotide
  Antisense strand to SEQ ID NO: 1548878
aaucaaagaacuauucagu

SEQ ID NO: 1548880 - RNA, 19 nt, Artificial Sequence
  Description of Artificial Sequence: Synthetic oligonucleotide
  Sense strand starting at position 728 of SEQ ID NO: 1245258
guuguuaggucauuauuug

SEQ ID NO: 1548881 - RNA, 19 nt, Artificial Sequence
  Description of Artificial Sequence: Synthetic oligonucleotide
  Antisense strand to SEQ ID NO: 1548880
caaauaaugaccuaacaac

SEQ ID NO: 1548882 - RNA, 19 nt, Artificial Sequence
  Description of Artificial Sequence: Synthetic oligonucleotide
  Sense strand starting at position 817 of SEQ ID NO: 1245258
acaauauucugguugggau

SEQ ID NO: 1548883 - RNA, 19 nt, Artificial Sequence
  Description of Artificial Sequence: Synthetic oligonucleotide
  Antisense strand to SEQ ID NO: 1548882
aucccaaccagaauauugu

SEQ ID NO: 1548884 - RNA, 19 nt, Artificial Sequence
  Description of Artificial Sequence: Synthetic oligonucleotide
  Sense strand starting at position 818 of SEQ ID NO: 1245258
caauauucugguugggauc

SEQ ID NO: 1548885 - RNA, 19 nt, Artificial Sequence
  Description of Artificial Sequence: Synthetic oligonucleotide
  Antisense strand to SEQ ID NO: 1548884
gaucccaaccagaauauug

SEQ ID NO: 1548886 - RNA, 19 nt, Artificial Sequence
  Description of Artificial Sequence: Synthetic oligonucleotide
  Sense strand starting at position 847 of SEQ ID NO: 1245258
aaaugaacguuagcagaaa

SEQ ID NO: 1548887 - RNA, 19 nt, Artificial Sequence
  Description of Artificial Sequence: Synthetic oligonucleotide
  Antisense strand to SEQ ID NO: 1548886
uuucugcuaacguucauuu

SEQ ID NO: 1548888 - RNA, 19 nt, Artificial Sequence
  Description of Artificial Sequence: Synthetic oligonucleotide
  Sense strand starting at position 941 of SEQ ID NO: 1245258
auguacugaguuuauguua

SEQ ID NO: 1548889 - RNA, 19 nt, Artificial Sequence
  Description of Artificial Sequence: Synthetic oligonucleotide
  Antisense strand to SEQ ID NO: 1548888
uaacauaaacucaguacau

SEQ ID NO: 1548890 - RNA, 19 nt, Artificial Sequence
  Description of Artificial Sequence: Synthetic oligonucleotide
  Sense strand starting at position 968 of SEQ ID NO: 1245258
gggaucuagcucugcaacu

SEQ ID NO: 1548891 - RNA, 19 nt, Artificial Sequence
  Description of Artificial Sequence: Synthetic oligonucleotide
  Antisense strand to SEQ ID NO: 1548890
aguugcagagcuagauccc

SEQ ID NO: 1548892 - RNA, 19 nt, Artificial Sequence
  Description of Artificial Sequence: Synthetic oligonucleotide
  Sense strand starting at position 1638 of SEQ ID NO: 1245258
aagccauuccucuagaggu

SEQ ID NO: 1548893 - RNA, 19 nt, Artificial Sequence
  Description of Artificial Sequence: Synthetic oligonucleotide
  Antisense strand to SEQ ID NO: 1548892
accucuagaggaauggcuu

SEQ ID NO: 1548894 - RNA, 19 nt, Artificial Sequence
  Description of Artificial Sequence: Synthetic oligonucleotide
  Sense strand starting at position 2479 of SEQ ID NO: 1245258
ucuugaaggcuuuggaguu

SEQ ID NO: 1548895 - RNA, 19 nt, Artificial Sequence
  Description of Artificial Sequence: Synthetic oligonucleotide
  Antisense strand to SEQ ID NO: 1548894
aacuccaaagccuucaaga

SEQ ID NO: 1548896 - RNA, 19 nt, Artificial Sequence
  Description of Artificial Sequence: Synthetic oligonucleotide
  Sense strand starting at position 2491 of SEQ ID NO: 1245258
uggaguuaggcccacauca

SEQ ID NO: 1548897 - RNA, 19 nt, Artificial Sequence
  Description of Artificial Sequence: Synthetic oligonucleotide
  Antisense strand to SEQ ID NO: 1548896
ugaugugggccuaacucca

SEQ ID NO: 1548898 - RNA, 19 nt, Artificial Sequence
  Description of Artificial Sequence: Synthetic oligonucleotide
  Sense strand starting at position 2493 of SEQ ID NO: 1245258
gaguuaggcccacaucaca

SEQ ID NO: 1548899 - RNA, 19 nt, Artificial Sequence
  Description of Artificial Sequence: Synthetic oligonucleotide
  Antisense strand to SEQ ID NO: 1548898
ugugaugugggccuaacuc

SEQ ID NO: 1548900 - RNA, 19 nt, Artificial Sequence
  Description of Artificial Sequence: Synthetic oligonucleotide
  Sense strand starting at position 2564 of SEQ ID NO: 1245258
ccuagaccugagugauuaa

SEQ ID NO: 1548901 - RNA, 19 nt, Artificial Sequence
  Description of Artificial Sequence: Synthetic oligonucleotide
  Antisense strand to SEQ ID NO: 1548900
uuaaucacucaggucuagg

SEQ ID NO: 1548902 - RNA, 19 nt, Artificial Sequence
  Description of Artificial Sequence: Synthetic oligonucleotide
  Sense strand starting at position 2567 of SEQ ID NO: 1245258
agaccugagugauuaaugu

SEQ ID NO: 1548903 - RNA, 19 nt, Artificial Sequence
  Description of Artificial Sequence: Synthetic oligonucleotide
  Antisense strand to SEQ ID NO: 1548902
acauuaaucacucaggucu

SEQ ID NO: 1548904 - RNA, 19 nt, Artificial Sequence
  Description of Artificial Sequence: Synthetic oligonucleotide
  Sense strand starting at position 2598 of SEQ ID NO: 1245258
aggaguguaacugauagua

SEQ ID NO: 1548905 - RNA, 19 nt, Artificial Sequence
  Description of Artificial Sequence: Synthetic oligonucleotide
  Antisense strand to SEQ ID NO: 1548904
uacuaucaguuacacuccu

SEQ ID NO: 1548906 - RNA, 19 nt, Artificial Sequence
  Description of Artificial Sequence: Synthetic oligonucleotide
  Sense strand starting at position 2744 of SEQ ID NO: 1245258
ugaauaggauuugauacau

SEQ ID NO: 1548907 - RNA, 19 nt, Artificial Sequence
  Description of Artificial Sequence: Synthetic oligonucleotide
  Antisense strand to SEQ ID NO: 1548906
auguaucaaauccuauuca

SEQ ID NO: 1548908 - RNA, 19 nt, Artificial Sequence
  Description of Artificial Sequence: Synthetic oligonucleotide
  Sense strand starting at position 2754 of SEQ ID NO: 1245258
uugauacaugaguguugua

SEQ ID NO: 1548909 - RNA, 19 nt, Artificial Sequence
  Description of Artificial Sequence: Synthetic oligonucleotide
  Antisense strand to SEQ ID NO: 1548908
uacaacacucauguaucaa

SEQ ID NO: 1548910 - RNA, 19 nt, Artificial Sequence
  Description of Artificial Sequence: Synthetic oligonucleotide
  Sense strand starting at position 2763 of SEQ ID NO: 1245258
gaguguuguagucagacaa

SEQ ID NO: 1548911 - RNA, 19 nt, Artificial Sequence
  Description of Artificial Sequence: Synthetic oligonucleotide
  Antisense strand to SEQ ID NO: 1548910
uugucugacuacaacacuc

SEQ ID NO: 1548912 - RNA, 19 nt, Artificial Sequence
  Description of Artificial Sequence: Synthetic oligonucleotide
  Sense strand starting at position 2814 of SEQ ID NO: 1245258
ugacuuugggcagguuaca

SEQ ID NO: 1548913 - RNA, 19 nt, Artificial Sequence
  Description of Artificial Sequence: Synthetic oligonucleotide
  Antisense strand to SEQ ID NO: 1548912
uguaaccugcccaaaguca

SEQ ID NO: 1548914 - RNA, 19 nt, Artificial Sequence
  Description of Artificial Sequence: Synthetic oligonucleotide
  Sense strand starting at position 2966 of SEQ ID NO: 1245258
guaaaugucuauucuccuu

SEQ ID NO: 1548915 - RNA, 19 nt, Artificial Sequence
  Description of Artificial Sequence: Synthetic oligonucleotide
  Antisense strand to SEQ ID NO: 1548914
aaggagaauagacauuuac

SEQ ID NO: 1548916 - RNA, 19 nt, Artificial Sequence
  Description of Artificial Sequence: Synthetic oligonucleotide
  Sense strand starting at position 3287 of SEQ ID NO: 1245258
auccaagugcguuacauuu

SEQ ID NO: 1548917 - RNA, 19 nt, Artificial Sequence
  Description of Artificial Sequence: Synthetic oligonucleotide
  Antisense strand to SEQ ID NO: 1548916
aaauguaacgcacuuggau

SEQ ID NO: 1548918 - RNA, 19 nt, Artificial Sequence
  Description of Artificial Sequence: Synthetic oligonucleotide
  Sense strand starting at position 3557 of SEQ ID NO: 1245258
cagucaugccaguagugga

SEQ ID NO: 1548919 - RNA, 19 nt, Artificial Sequence
  Description of Artificial Sequence: Synthetic oligonucleotide
  Antisense strand to SEQ ID NO: 1548918
uccacuacuggcaugacug

SEQ ID NO: 1548920 - RNA, 19 nt, Artificial Sequence
  Description of Artificial Sequence: Synthetic oligonucleotide
  Sense strand starting at position 3571 of SEQ ID NO: 1245258
guggagaguggcugugaau

SEQ ID NO: 1548921 - RNA, 19 nt, Artificial Sequence
  Description of Artificial Sequence: Synthetic oligonucleotide
  Antisense strand to SEQ ID NO: 1548920
auucacagccacucuccac

SEQ ID NO: 1548922 - RNA, 19 nt, Artificial Sequence
  Description of Artificial Sequence: Synthetic oligonucleotide
  Sense strand starting at position 3712 of SEQ ID NO: 1245258
uguugaugcauccaugaag

SEQ ID NO: 1548923 - RNA, 19 nt, Artificial Sequence
  Description of Artificial Sequence: Synthetic oligonucleotide
  Antisense strand to SEQ ID NO: 1548922
cuucauggaugcaucaaca

SEQ ID NO: 1548924 - RNA, 19 nt, Artificial Sequence
  Description of Artificial Sequence: Synthetic oligonucleotide
  Sense strand starting at position 3756 of SEQ ID NO: 1245258
gucucagugguuuggaaac

SEQ ID NO: 1548925 - RNA, 19 nt, Artificial Sequence
  Description of Artificial Sequence: Synthetic oligonucleotide
  Antisense strand to SEQ ID NO: 1548924
guuuccaaaccacugagac

SEQ ID NO: 1548926 - RNA, 19 nt, Artificial Sequence
  Description of Artificial Sequence: Synthetic oligonucleotide
  Sense strand starting at position 3800 of SEQ ID NO: 1245258
uucuuagaugucuggacca

SEQ ID NO: 1548927 - RNA, 19 nt, Artificial Sequence
  Description of Artificial Sequence: Synthetic oligonucleotide
  Antisense strand to SEQ ID NO: 1548926
ugguccagacaucuaagaa

SEQ ID NO: 1548928 - RNA, 19 nt, Artificial Sequence
  Description of Artificial Sequence: Synthetic oligonucleotide
  Sense strand starting at position 3802 of SEQ ID NO: 1245258
cuuagaugucuggaccagu

SEQ ID NO: 1548929 - RNA, 19 nt, Artificial Sequence
  Description of Artificial Sequence: Synthetic oligonucleotide
  Antisense strand to SEQ ID NO: 1548928
acugguccagacaucuaag

SEQ ID NO: 1548930 - RNA, 19 nt, Artificial Sequence
  Description of Artificial Sequence: Synthetic oligonucleotide
  Sense strand starting at position 3831 of SEQ ID NO: 1245258
ucugcuaucuagguuauaa

SEQ ID NO: 1548931 - RNA, 19 nt, Artificial Sequence
  Description of Artificial Sequence: Synthetic oligonucleotide
  Antisense strand to SEQ ID NO: 1548930
uuauaaccuagauagcaga

SEQ ID NO: 1548932 - RNA, 19 nt, Artificial Sequence
  Description of Artificial Sequence: Synthetic oligonucleotide
  Sense strand starting at position 3833 of SEQ ID NO: 1245258
ugcuaucuagguuauaaau

SEQ ID NO: 1548933 - RNA, 19 nt, Artificial Sequence
  Description of Artificial Sequence: Synthetic oligonucleotide
  Antisense strand to SEQ ID NO: 1548932
auuuauaaccuagauagca

SEQ ID NO: 1548934 - RNA, 19 nt, Artificial Sequence
  Description of Artificial Sequence: Synthetic oligonucleotide
  Sense strand starting at position 3882 of SEQ ID NO: 1245258
ugugaaagcuguuugauaa

SEQ ID NO: 1548935 - RNA, 19 nt, Artificial Sequence
  Description of Artificial Sequence: Synthetic oligonucleotide
  Antisense strand to SEQ ID NO: 1548934
uuaucaaacagcuuucaca

SEQ ID NO: 1548936 - RNA, 19 nt, Artificial Sequence
  Description of Artificial Sequence: Synthetic oligonucleotide
  Sense strand starting at position 3889 of SEQ ID NO: 1245258
gcuguuugauaagucuaga

SEQ ID NO: 1548937 - RNA, 19 nt, Artificial Sequence
  Description of Artificial Sequence: Synthetic oligonucleotide
  Antisense strand to SEQ ID NO: 1548936
ucuagacuuaucaaacagc

SEQ ID NO: 1548938 - RNA, 19 nt, Artificial Sequence
  Description of Artificial Sequence: Synthetic oligonucleotide
  Sense strand starting at position 3894 of SEQ ID NO: 1245258
uugauaagucuagauaguu

SEQ ID NO: 1548939 - RNA, 19 nt, Artificial Sequence
  Description of Artificial Sequence: Synthetic oligonucleotide
  Antisense strand to SEQ ID NO: 1548938
aacuaucuagacuuaucaa

SEQ ID NO: 1548940 - RNA, 19 nt, Artificial Sequence
  Description of Artificial Sequence: Synthetic oligonucleotide
  Sense strand starting at position 678 of SEQ ID NO: 1245259
gggcuuaguucucaauaua

SEQ ID NO: 1548941 - RNA, 19 nt, Artificial Sequence
  Description of Artificial Sequence: Synthetic oligonucleotide
  Antisense strand to SEQ ID NO: 1548940
uauauugagaacuaagccc

SEQ ID NO: 1548942 - RNA, 19 nt, Artificial Sequence
  Description of Artificial Sequence: Synthetic oligonucleotide
  Sense strand starting at position 1363 of SEQ ID NO: 1245259
ccaucuugcuccugagcau

SEQ ID NO: 1548943 - RNA, 19 nt, Artificial Sequence
  Description of Artificial Sequence: Synthetic oligonucleotide
  Antisense strand to SEQ ID NO: 1548942
augcucaggagcaagaugg

SEQ ID NO: 1548944 - RNA, 19 nt, Artificial Sequence
  Description of Artificial Sequence: Synthetic oligonucleotide
  Sense strand starting at position 1477 of SEQ ID NO: 1245259
ucuugcuccugagaucgaa

SEQ ID NO: 1548945 - RNA, 19 nt, Artificial Sequence
  Description of Artificial Sequence: Synthetic oligonucleotide
  Antisense strand to SEQ ID NO: 1548944
uucgaucucaggagcaaga

SEQ ID NO: 1548946 - RNA, 19 nt, Artificial Sequence
  Description of Artificial Sequence: Synthetic oligonucleotide
  Sense strand starting at position 3374 of SEQ ID NO: 1245259
ugggacaugauguguaauu

SEQ ID NO: 1548947 - RNA, 19 nt, Artificial Sequence
  Description of Artificial Sequence: Synthetic oligonucleotide
  Antisense strand to SEQ ID NO: 1548946
aauuacacaucauguccca

SEQ ID NO: 1548948 - RNA, 19 nt, Artificial Sequence
  Description of Artificial Sequence: Synthetic oligonucleotide
  Sense strand starting at position 3375 of SEQ ID NO: 1245259
gggacaugauguguaauuc

SEQ ID NO: 1548949 - RNA, 19 nt, Artificial Sequence
  Description of Artificial Sequence: Synthetic oligonucleotide
  Antisense strand to SEQ ID NO: 1548948
gaauuacacaucauguccc

SEQ ID NO: 1548950 - RNA, 19 nt, Artificial Sequence
  Description of Artificial Sequence: Synthetic oligonucleotide
  Sense strand starting at position 3376 of SEQ ID NO: 1245259
ggacaugauguguaauucu

SEQ ID NO: 1548951 - RNA, 19 nt, Artificial Sequence
  Description of Artificial Sequence: Synthetic oligonucleotide
  Antisense strand to SEQ ID NO: 1548950
agaauuacacaucaugucc

SEQ ID NO: 1548952 - RNA, 19 nt, Artificial Sequence
  Description of Artificial Sequence: Synthetic oligonucleotide
  Sense strand starting at position 3387 of SEQ ID NO: 1245259
guaauucuuuguguacauc

SEQ ID NO: 1548953 - RNA, 19 nt, Artificial Sequence
  Description of Artificial Sequence: Synthetic oligonucleotide
  Antisense strand to SEQ ID NO: 1548952
gauguacacaaagaauuac

SEQ ID NO: 1548954 - RNA, 19 nt, Artificial Sequence
  Description of Artificial Sequence: Synthetic oligonucleotide
  Sense strand starting at position 3395 of SEQ ID NO: 1245259
uuguguacaucgcugaguu

SEQ ID NO: 1548955 - RNA, 19 nt, Artificial Sequence
  Description of Artificial Sequence: Synthetic oligonucleotide
  Antisense strand to SEQ ID NO: 1548954
aacucagcgauguacacaa

SEQ ID NO: 1548956 - RNA, 19 nt, Artificial Sequence
  Description of Artificial Sequence: Synthetic oligonucleotide
  Sense strand starting at position 3405 of SEQ ID NO: 1245259
cgcugaguucugcugcuaa

SEQ ID NO: 1548957 - RNA, 19 nt, Artificial Sequence
  Description of Artificial Sequence: Synthetic oligonucleotide
  Antisense strand to SEQ ID NO: 1548956
uuagcagcagaacucagcg

SEQ ID NO: 1548958 - RNA, 19 nt, Artificial Sequence
  Description of Artificial Sequence: Synthetic oligonucleotide
  Sense strand starting at position 3409 of SEQ ID NO: 1245259
gaguucugcugcuaauguu

SEQ ID NO: 1548959 - RNA, 19 nt, Artificial Sequence
  Description of Artificial Sequence: Synthetic oligonucleotide
  Antisense strand to SEQ ID NO: 1548958
aacauuagcagcagaacuc

SEQ ID NO: 1548960 - RNA, 19 nt, Artificial Sequence
  Description of Artificial Sequence: Synthetic oligonucleotide
  Sense strand starting at position 3417 of SEQ ID NO: 1245259
cugcuaauguuguuaagaa

SEQ ID NO: 1548961 - RNA, 19 nt, Artificial Sequence
  Description of Artificial Sequence: Synthetic oligonucleotide
  Antisense strand to SEQ ID NO: 1548960
uucuuaacaacauuagcag

SEQ ID NO: 1548962 - RNA, 19 nt, Artificial Sequence
  Description of Artificial Sequence: Synthetic oligonucleotide
  Sense strand starting at position 3418 of SEQ ID NO: 1245259
ugcuaauguuguuaagaau

SEQ ID NO: 1548963 - RNA, 19 nt, Artificial Sequence
  Description of Artificial Sequence: Synthetic oligonucleotide
  Antisense strand to SEQ ID NO: 1548962
auucuuaacaacauuagca

SEQ ID NO: 1548964 - RNA, 19 nt, Artificial Sequence
  Description of Artificial Sequence: Synthetic oligonucleotide
  Sense strand starting at position 3425 of SEQ ID NO: 1245259
guuguuaagaauuggugua

SEQ ID NO: 1548965 - RNA, 19 nt, Artificial Sequence
  Description of Artificial Sequence: Synthetic oligonucleotide
  Antisense strand to SEQ ID NO: 1548964
uacaccaauucuuaacaac

SEQ ID NO: 1548966 - RNA, 19 nt, Artificial Sequence
  Description of Artificial Sequence: Synthetic oligonucleotide
  Sense strand starting at position 3426 of SEQ ID NO: 1245259
uuguuaagaauugguguau

SEQ ID NO: 1548967 - RNA, 19 nt, Artificial Sequence
  Description of Artificial Sequence: Synthetic oligonucleotide
  Antisense strand to SEQ ID NO: 1548966
auacaccaauucuuaacaa

SEQ ID NO: 1548968 - RNA, 19 nt, Artificial Sequence
  Description of Artificial Sequence: Synthetic oligonucleotide
  Sense strand starting at position 3427 of SEQ ID NO: 1245259
uguuaagaauugguguauc

SEQ ID NO: 1548969 - RNA, 19 nt, Artificial Sequence
  Description of Artificial Sequence: Synthetic oligonucleotide
  Antisense strand to SEQ ID NO: 1548968
gauacaccaauucuuaaca

SEQ ID NO: 1548970 - RNA, 19 nt, Artificial Sequence
  Description of Artificial Sequence: Synthetic oligonucleotide
  Sense strand starting at position 3430 of SEQ ID NO: 1245259
uaagaauugguguauccau

SEQ ID NO: 1548971 - RNA, 19 nt, Artificial Sequence
  Description of Artificial Sequence: Synthetic oligonucleotide
  Antisense strand to SEQ ID NO: 1548970
auggauacaccaauucuua

SEQ ID NO: 1548972 - RNA, 19 nt, Artificial Sequence
  Description of Artificial Sequence: Synthetic oligonucleotide
  Sense strand starting at position 3454 of SEQ ID NO: 1245259
agagaauuaccgggcuaua

SEQ ID NO: 1548973 - RNA, 19 nt, Artificial Sequence
  Description of Artificial Sequence: Synthetic oligonucleotide
  Antisense strand to SEQ ID NO: 1548972
uauagcccgguaauucucu

SEQ ID NO: 1548974 - RNA, 19 nt, Artificial Sequence
  Description of Artificial Sequence: Synthetic oligonucleotide
  Sense strand starting at position 3457 of SEQ ID NO: 1245259
gaauuaccgggcuauaguu

SEQ ID NO: 1548975 - RNA, 19 nt, Artificial Sequence
  Description of Artificial Sequence: Synthetic oligonucleotide
  Antisense strand to SEQ ID NO: 1548974
aacuauagcccgguaauuc

SEQ ID NO: 1548976 - RNA, 19 nt, Artificial Sequence
  Description of Artificial Sequence: Synthetic oligonucleotide
  Sense strand starting at position 3493 of SEQ ID NO: 1245259
uugauaucagaguaauguu

SEQ ID NO: 1548977 - RNA, 19 nt, Artificial Sequence
  Description of Artificial Sequence: Synthetic oligonucleotide
  Antisense strand to SEQ ID NO: 1548976
aacauuacucugauaucaa

SEQ ID NO: 1548978 - RNA, 19 nt, Artificial Sequence
  Description of Artificial Sequence: Synthetic oligonucleotide
  Sense strand starting at position 3553 of SEQ ID NO: 1245259
aaagauuguguguauuggu

SEQ ID NO: 1548979 - RNA, 19 nt, Artificial Sequence
  Description of Artificial Sequence: Synthetic oligonucleotide
  Antisense strand to SEQ ID NO: 1548978
accaauacacacaaucuuu

SEQ ID NO: 1548980 - RNA, 19 nt, Artificial Sequence
  Description of Artificial Sequence: Synthetic oligonucleotide
  Sense strand starting at position 3558 of SEQ ID NO: 1245259
uuguguguauuggugucaa

SEQ ID NO: 1548981 - RNA, 19 nt, Artificial Sequence
  Description of Artificial Sequence: Synthetic oligonucleotide
  Antisense strand to SEQ ID NO: 1548980
uugacaccaauacacacaa

SEQ ID NO: 1548982 - RNA, 19 nt, Artificial Sequence
  Description of Artificial Sequence: Synthetic oligonucleotide
  Sense strand starting at position 3562 of SEQ ID NO: 1245259
guguauuggugucaauucu

SEQ ID NO: 1548983 - RNA, 19 nt, Artificial Sequence
  Description of Artificial Sequence: Synthetic oligonucleotide
  Antisense strand to SEQ ID NO: 1548982
agaauugacaccaauacac

SEQ ID NO: 1548984 - RNA, 19 nt, Artificial Sequence
  Description of Artificial Sequence: Synthetic oligonucleotide
  Sense strand starting at position 3569 of SEQ ID NO: 1245259
ggugucaauucuuuaagca

SEQ ID NO: 1548985 - RNA, 19 nt, Artificial Sequence
  Description of Artificial Sequence: Synthetic oligonucleotide
  Antisense strand to SEQ ID NO: 1548984
ugcuuaaagaauugacacc

SEQ ID NO: 1548986 - RNA, 19 nt, Artificial Sequence
  Description of Artificial Sequence: Synthetic oligonucleotide
  Sense strand starting at position 3570 of SEQ ID NO: 1245259
gugucaauucuuuaagcag

SEQ ID NO: 1548987 - RNA, 19 nt, Artificial Sequence
  Description of Artificial Sequence: Synthetic oligonucleotide
  Antisense strand to SEQ ID NO: 1548986
cugcuuaaagaauugacac

SEQ ID NO: 1548988 - RNA, 19 nt, Artificial Sequence
  Description of Artificial Sequence: Synthetic oligonucleotide
  Sense strand starting at position 3759 of SEQ ID NO: 1245259
aguugucaaauguauguga

SEQ ID NO: 1548989 - RNA, 19 nt, Artificial Sequence
  Description of Artificial Sequence: Synthetic oligonucleotide
  Antisense strand to SEQ ID NO: 1548988
ucacauacauuugacaacu

SEQ ID NO: 1548990 - RNA, 19 nt, Artificial Sequence
  Description of Artificial Sequence: Synthetic oligonucleotide
  Sense strand starting at position 3761 of SEQ ID NO: 1245259
uugucaaauguaugugaau

SEQ ID NO: 1548991 - RNA, 19 nt, Artificial Sequence
  Description of Artificial Sequence: Synthetic oligonucleotide
  Antisense strand to SEQ ID NO: 1548990
auucacauacauuugacaa

SEQ ID NO: 1548992 - RNA, 19 nt, Artificial Sequence
  Description of Artificial Sequence: Synthetic oligonucleotide
  Sense strand starting at position 3762 of SEQ ID NO: 1245259
ugucaaauguaugugaaug

SEQ ID NO: 1548993 - RNA, 19 nt, Artificial Sequence
  Description of Artificial Sequence: Synthetic oligonucleotide
  Antisense strand to SEQ ID NO: 1548992
cauucacauacauuugaca

SEQ ID NO: 1548994 - RNA, 19 nt, Artificial Sequence
  Description of Artificial Sequence: Synthetic oligonucleotide
  Sense strand starting at position 3764 of SEQ ID NO: 1245259
ucaaauguaugugaaugga

SEQ ID NO: 1548995 - RNA, 19 nt, Artificial Sequence
  Description of Artificial Sequence: Synthetic oligonucleotide
  Antisense strand to SEQ ID NO: 1548994
uccauucacauacauuuga

SEQ ID NO: 1548996 - RNA, 19 nt, Artificial Sequence
  Description of Artificial Sequence: Synthetic oligonucleotide
  Sense strand starting at position 3767 of SEQ ID NO: 1245259
aauguaugugaauggaguu

SEQ ID NO: 1548997 - RNA, 19 nt, Artificial Sequence
  Description of Artificial Sequence: Synthetic oligonucleotide
  Antisense strand to SEQ ID NO: 1548996
aacuccauucacauacauu

SEQ ID NO: 1548998 - RNA, 19 nt, Artificial Sequence
  Description of Artificial Sequence: Synthetic oligonucleotide
  Sense strand starting at position 3770 of SEQ ID NO: 1245259
guaugugaauggaguuguu

SEQ ID NO: 1548999 - RNA, 19 nt, Artificial Sequence
  Description of Artificial Sequence: Synthetic oligonucleotide
  Antisense strand to SEQ ID NO: 1548998
aacaacuccauucacauac

SEQ ID NO: 1549000 - RNA, 19 nt, Artificial Sequence
  Description of Artificial Sequence: Synthetic oligonucleotide
  Sense strand starting at position 3779 of SEQ ID NO: 1245259
uggaguuguucaugacguu

SEQ ID NO: 1549001 - RNA, 19 nt, Artificial Sequence
  Description of Artificial Sequence: Synthetic oligonucleotide
  Antisense strand to SEQ ID NO: 1549000
aacgucaugaacaacucca

SEQ ID NO: 1549002 - RNA, 19 nt, Artificial Sequence
  Description of Artificial Sequence: Synthetic oligonucleotide
  Sense strand starting at position 3780 of SEQ ID NO: 1245259
ggaguuguucaugacguuc

SEQ ID NO: 1549003 - RNA, 19 nt, Artificial Sequence
  Description of Artificial Sequence: Synthetic oligonucleotide
  Antisense strand to SEQ ID NO: 1549002
gaacgucaugaacaacucc

SEQ ID NO: 1549004 - RNA, 19 nt, Artificial Sequence
  Description of Artificial Sequence: Synthetic oligonucleotide
  Sense strand starting at position 3788 of SEQ ID NO: 1245259
ucaugacguuccuuuauua

SEQ ID NO: 1549005 - RNA, 19 nt, Artificial Sequence
  Description of Artificial Sequence: Synthetic oligonucleotide
  Antisense strand to SEQ ID NO: 1549004
uaauaaaggaacgucauga

SEQ ID NO: 1549006 - RNA, 19 nt, Artificial Sequence
  Description of Artificial Sequence: Synthetic oligonucleotide
  Sense strand starting at position 17 of SEQ ID NO: 1245260
uacgaagucgaacauaaau

SEQ ID NO: 1549007 - RNA, 19 nt, Artificial Sequence
  Description of Artificial Sequence: Synthetic oligonucleotide
  Antisense strand to SEQ ID NO: 1549006
auuuauguucgacuucgua

SEQ ID NO: 1549008 - RNA, 19 nt, Artificial Sequence
  Description of Artificial Sequence: Synthetic oligonucleotide
  Sense strand starting at position 19 of SEQ ID NO: 1245260
cgaagucgaacauaaauau

SEQ ID NO: 1549009 - RNA, 19 nt, Artificial Sequence
  Description of Artificial Sequence: Synthetic oligonucleotide
  Antisense strand to SEQ ID NO: 1549008
auauuuauguucgacuucg

SEQ ID NO: 1549010 - RNA, 19 nt, Artificial Sequence
  Description of Artificial Sequence: Synthetic oligonucleotide
  Sense strand starting at position 135 of SEQ ID NO: 1245260
acuuacuauuaggcagaua

SEQ ID NO: 1549011 - RNA, 19 nt, Artificial Sequence
  Description of Artificial Sequence: Synthetic oligonucleotide
  Antisense strand to SEQ ID NO: 1549010
uaucugccuaauaguaagu

SEQ ID NO: 1549012 - RNA, 19 nt, Artificial Sequence
  Description of Artificial Sequence: Synthetic oligonucleotide
  Sense strand starting at position 138 of SEQ ID NO: 1245260
uacuauuaggcagauaagu

SEQ ID NO: 1549013 - RNA, 19 nt, Artificial Sequence
  Description of Artificial Sequence: Synthetic oligonucleotide
  Antisense strand to SEQ ID NO: 1549012
acuuaucugccuaauagua

SEQ ID NO: 1549014 - RNA, 19 nt, Artificial Sequence
  Description of Artificial Sequence: Synthetic oligonucleotide
  Sense strand starting at position 149 of SEQ ID NO: 1245260
agauaaguggcuuaaggua

SEQ ID NO: 1549015 - RNA, 19 nt, Artificial Sequence
  Description of Artificial Sequence: Synthetic oligonucleotide
  Antisense strand to SEQ ID NO: 1549014
uaccuuaagccacuuaucu

SEQ ID NO: 1549016 - RNA, 19 nt, Artificial Sequence
  Description of Artificial Sequence: Synthetic oligonucleotide
  Sense strand starting at position 154 of SEQ ID NO: 1245260
aguggcuuaagguaaacau

SEQ ID NO: 1549017 - RNA, 19 nt, Artificial Sequence
  Description of Artificial Sequence: Synthetic oligonucleotide
  Antisense strand to SEQ ID NO: 1549016
auguuuaccuuaagccacu

SEQ ID NO: 1549018 - RNA, 19 nt, Artificial Sequence
  Description of Artificial Sequence: Synthetic oligonucleotide
  Sense strand starting at position 206 of SEQ ID NO: 1245260
gaguacugcucccuuuaag

SEQ ID NO: 1549019 - RNA, 19 nt, Artificial Sequence
  Description of Artificial Sequence: Synthetic oligonucleotide
  Antisense strand to SEQ ID NO: 1549018
cuuaaagggagcaguacuc

SEQ ID NO: 1549020 - RNA, 19 nt, Artificial Sequence
  Description of Artificial Sequence: Synthetic oligonucleotide
  Sense strand starting at position 376 of SEQ ID NO: 1245260
uuaaguuuacucugaguaa

SEQ ID NO: 1549021 - RNA, 19 nt, Artificial Sequence
  Description of Artificial Sequence: Synthetic oligonucleotide
  Antisense strand to SEQ ID NO: 1549020
uuacucagaguaaacuuaa

SEQ ID NO: 1549022 - RNA, 19 nt, Artificial Sequence
  Description of Artificial Sequence: Synthetic oligonucleotide
  Sense strand starting at position 380 of SEQ ID NO: 1245260
guuuacucugaguaaggga

SEQ ID NO: 1549023 - RNA, 19 nt, Artificial Sequence
  Description of Artificial Sequence: Synthetic oligonucleotide
  Antisense strand to SEQ ID NO: 1549022
ucccuuacucagaguaaac

SEQ ID NO: 1549024 - RNA, 19 nt, Artificial Sequence
  Description of Artificial Sequence: Synthetic oligonucleotide
  Sense strand starting at position 539 of SEQ ID NO: 1245260
auccuacuaugguuaucau

SEQ ID NO: 1549025 - RNA, 19 nt, Artificial Sequence
  Description of Artificial Sequence: Synthetic oligonucleotide
  Antisense strand to SEQ ID NO: 1549024
augauaaccauaguaggau

SEQ ID NO: 1549026 - RNA, 19 nt, Artificial Sequence
  Description of Artificial Sequence: Synthetic oligonucleotide
  Sense strand starting at position 581 of SEQ ID NO: 1245260
ucccuuauguaucccauga

SEQ ID NO: 1549027 - RNA, 19 nt, Artificial Sequence
  Description of Artificial Sequence: Synthetic oligonucleotide
  Antisense strand to SEQ ID NO: 1549026
ucaugggauacauaaggga

SEQ ID NO: 1549028 - RNA, 19 nt, Artificial Sequence
  Description of Artificial Sequence: Synthetic oligonucleotide
  Sense strand starting at position 585 of SEQ ID NO: 1245260
uuauguaucccaugaucuu

SEQ ID NO: 1549029 - RNA, 19 nt, Artificial Sequence
  Description of Artificial Sequence: Synthetic oligonucleotide
  Antisense strand to SEQ ID NO: 1549028
aagaucaugggauacauaa

SEQ ID NO: 1549030 - RNA, 19 nt, Artificial Sequence
  Description of Artificial Sequence: Synthetic oligonucleotide
  Sense strand starting at position 596 of SEQ ID NO: 1245260
augaucuucgcuuauauau

SEQ ID NO: 1549031 - RNA, 19 nt, Artificial Sequence
  Description of Artificial Sequence: Synthetic oligonucleotide
  Antisense strand to SEQ ID NO: 1549030
auauauaagcgaagaucau

SEQ ID NO: 1549032 - RNA, 19 nt, Artificial Sequence
  Description of Artificial Sequence: Synthetic oligonucleotide
  Sense strand starting at position 766 of SEQ ID NO: 1245260
uuucuaucgugacccaaau

SEQ ID NO: 1549033 - RNA, 19 nt, Artificial Sequence
  Description of Artificial Sequence: Synthetic oligonucleotide
  Antisense strand to SEQ ID NO: 1549032
auuugggucacgauagaaa

SEQ ID NO: 1549034 - RNA, 19 nt, Artificial Sequence
  Description of Artificial Sequence: Synthetic oligonucleotide
  Sense strand starting at position 850 of SEQ ID NO: 1245260
gccaucaggaaaugucaga

SEQ ID NO: 1549035 - RNA, 19 nt, Artificial Sequence
  Description of Artificial Sequence: Synthetic oligonucleotide
  Antisense strand to SEQ ID NO: 1549034
ucugacauuuccugauggc

SEQ ID NO: 1549036 - RNA, 19 nt, Artificial Sequence
  Description of Artificial Sequence: Synthetic oligonucleotide
  Sense strand starting at position 935 of SEQ ID NO: 1245260
cacuguuaacacugaagga

SEQ ID NO: 1549037 - RNA, 19 nt, Artificial Sequence
  Description of Artificial Sequence: Synthetic oligonucleotide
  Antisense strand to SEQ ID NO: 1549036
uccuucaguguuaacagug

SEQ ID NO: 1549038 - RNA, 19 nt, Artificial Sequence
  Description of Artificial Sequence: Synthetic oligonucleotide
  Sense strand starting at position 948 of SEQ ID NO: 1245260
gaaggagggcugggugauu

SEQ ID NO: 1549039 - RNA, 19 nt, Artificial Sequence
  Description of Artificial Sequence: Synthetic oligonucleotide
  Antisense strand to SEQ ID NO: 1549038
aaucacccagcccuccuuc

SEQ ID NO: 1549040 - RNA, 19 nt, Artificial Sequence
  Description of Artificial Sequence: Synthetic oligonucleotide
  Sense strand starting at position 966 of SEQ ID NO: 1245260
uucugaacauccgcauuaa

SEQ ID NO: 1549041 - RNA, 19 nt, Artificial Sequence
  Description of Artificial Sequence: Synthetic oligonucleotide
  Antisense strand to SEQ ID NO: 1549040
uuaaugcggauguucagaa

SEQ ID NO: 1549042 - RNA, 19 nt, Artificial Sequence
  Description of Artificial Sequence: Synthetic oligonucleotide
  Sense strand starting at position 967 of SEQ ID NO: 1245260
ucugaacauccgcauuaaa

SEQ ID NO: 1549043 - RNA, 19 nt, Artificial Sequence
  Description of Artificial Sequence: Synthetic oligonucleotide
  Antisense strand to SEQ ID NO: 1549042
uuuaaugcggauguucaga

SEQ ID NO: 1549044 - RNA, 19 nt, Artificial Sequence
  Description of Artificial Sequence: Synthetic oligonucleotide
  Sense strand starting at position 1100 of SEQ ID NO: 1245260
acagguaugucauccucaa

SEQ ID NO: 1549045 - RNA, 19 nt, Artificial Sequence
  Description of Artificial Sequence: Synthetic oligonucleotide
  Antisense strand to SEQ ID NO: 1549044
uugaggaugacauaccugu

SEQ ID NO: 1549046 - RNA, 19 nt, Artificial Sequence
  Description of Artificial Sequence: Synthetic oligonucleotide
  Sense strand starting at position 1104 of SEQ ID NO: 1245260
guaugucauccucaaacaa

SEQ ID NO: 1549047 - RNA, 19 nt, Artificial Sequence
  Description of Artificial Sequence: Synthetic oligonucleotide
  Antisense strand to SEQ ID NO: 1549046
uuguuugaggaugacauac

SEQ ID NO: 1549048 - RNA, 19 nt, Artificial Sequence
  Description of Artificial Sequence: Synthetic oligonucleotide
  Sense strand starting at position 2550 of SEQ ID NO: 1245260
cgggaugguugacugacaa

SEQ ID NO: 1549049 - RNA, 19 nt, Artificial Sequence
  Description of Artificial Sequence: Synthetic oligonucleotide
  Antisense strand to SEQ ID NO: 1549048
uugucagucaaccaucccg

SEQ ID NO: 1549050 - RNA, 19 nt, Artificial Sequence
  Description of Artificial Sequence: Synthetic oligonucleotide
  Sense strand starting at position 2777 of SEQ ID NO: 1245260
gguuauuggcauuaaauga

SEQ ID NO: 1549051 - RNA, 19 nt, Artificial Sequence
  Description of Artificial Sequence: Synthetic oligonucleotide
  Antisense strand to SEQ ID NO: 1549050
ucauuuaaugccaauaacc

SEQ ID NO: 1549052 - RNA, 19 nt, Artificial Sequence
  Description of Artificial Sequence: Synthetic oligonucleotide
  Sense strand starting at position 2820 of SEQ ID NO: 1245260
ucuugaugucuaggaggug

SEQ ID NO: 1549053 - RNA, 19 nt, Artificial Sequence
  Description of Artificial Sequence: Synthetic oligonucleotide
  Antisense strand to SEQ ID NO: 1549052
caccuccuagacaucaaga

SEQ ID NO: 1549054 - RNA, 19 nt, Artificial Sequence
  Description of Artificial Sequence: Synthetic oligonucleotide
  Sense strand starting at position 2842 of SEQ ID NO: 1245260
ggugaagggugccuaugau

SEQ ID NO: 1549055 - RNA, 19 nt, Artificial Sequence
  Description of Artificial Sequence: Synthetic oligonucleotide
  Antisense strand to SEQ ID NO: 1549054
aucauaggcacccuucacc

SEQ ID NO: 1549056 - RNA, 19 nt, Artificial Sequence
  Description of Artificial Sequence: Synthetic oligonucleotide
  Sense strand starting at position 2899 of SEQ ID NO: 1245260
uguuaaagucuguauccca

SEQ ID NO: 1549057 - RNA, 19 nt, Artificial Sequence
  Description of Artificial Sequence: Synthetic oligonucleotide
  Antisense strand to SEQ ID NO: 1549056
ugggauacagacuuuaaca

SEQ ID NO: 1549058 - RNA, 19 nt, Artificial Sequence
  Description of Artificial Sequence: Synthetic oligonucleotide
  Sense strand starting at position 2906 of SEQ ID NO: 1245260
gucuguaucccagacuuua

SEQ ID NO: 1549059 - RNA, 19 nt, Artificial Sequence
  Description of Artificial Sequence: Synthetic oligonucleotide
  Antisense strand to SEQ ID NO: 1549058
uaaagucugggauacagac

SEQ ID NO: 1549060 - RNA, 19 nt, Artificial Sequence
  Description of Artificial Sequence: Synthetic oligonucleotide
  Sense strand starting at position 2917 of SEQ ID NO: 1245260
agacuuuauuagucuuguu

SEQ ID NO: 1549061 - RNA, 19 nt, Artificial Sequence
  Description of Artificial Sequence: Synthetic oligonucleotide
  Antisense strand to SEQ ID NO: 1549060
aacaagacuaauaaagucu

SEQ ID NO: 1549062 - RNA, 19 nt, Artificial Sequence
  Description of Artificial Sequence: Synthetic oligonucleotide
  Sense strand starting at position 2945 of SEQ ID NO: 1245260
gacuuaagcgauuagcuca

SEQ ID NO: 1549063 - RNA, 19 nt, Artificial Sequence
  Description of Artificial Sequence: Synthetic oligonucleotide
  Antisense strand to SEQ ID NO: 1549062
ugagcuaaucgcuuaaguc

SEQ ID NO: 1549064 - RNA, 19 nt, Artificial Sequence
  Description of Artificial Sequence: Synthetic oligonucleotide
  Sense strand starting at position 3133 of SEQ ID NO: 1245260
agggaauucuaaguaguua

SEQ ID NO: 1549065 - RNA, 19 nt, Artificial Sequence
  Description of Artificial Sequence: Synthetic oligonucleotide
  Antisense strand to SEQ ID NO: 1549064
uaacuacuuagaauucccu

SEQ ID NO: 1549066 - RNA, 19 nt, Artificial Sequence
  Description of Artificial Sequence: Synthetic oligonucleotide
  Sense strand starting at position 3177 of SEQ ID NO: 1245260
agucuugaccaaggacaau

SEQ ID NO: 1549067 - RNA, 19 nt, Artificial Sequence
  Description of Artificial Sequence: Synthetic oligonucleotide
  Antisense strand to SEQ ID NO: 1549066
auuguccuuggucaagacu

SEQ ID NO: 1549068 - RNA, 19 nt, Artificial Sequence
  Description of Artificial Sequence: Synthetic oligonucleotide
  Sense strand starting at position 3189 of SEQ ID NO: 1245260
ggacaauguguuggcauuu

SEQ ID NO: 1549069 - RNA, 19 nt, Artificial Sequence
  Description of Artificial Sequence: Synthetic oligonucleotide
  Antisense strand to SEQ ID NO: 1549068
aaaugccaacacauugucc

SEQ ID NO: 1549070 - RNA, 19 nt, Artificial Sequence
  Description of Artificial Sequence: Synthetic oligonucleotide
  Sense strand starting at position 3254 of SEQ ID NO: 1245260
uuccuaaaucuguguaaua

SEQ ID NO: 1549071 - RNA, 19 nt, Artificial Sequence
  Description of Artificial Sequence: Synthetic oligonucleotide
  Antisense strand to SEQ ID NO: 1549070
uauuacacagauuuaggaa

SEQ ID NO: 1549072 - RNA, 19 nt, Artificial Sequence
  Description of Artificial Sequence: Synthetic oligonucleotide
  Sense strand starting at position 3346 of SEQ ID NO: 1245260
guaugaaauuucuaggagu

SEQ ID NO: 1549073 - RNA, 19 nt, Artificial Sequence
  Description of Artificial Sequence: Synthetic oligonucleotide
  Antisense strand to SEQ ID NO: 1549072
acuccuagaaauuucauac

SEQ ID NO: 1549074 - RNA, 19 nt, Artificial Sequence
  Description of Artificial Sequence: Synthetic oligonucleotide
  Sense strand starting at position 3349 of SEQ ID NO: 1245260
ugaaauuucuaggaguaau

SEQ ID NO: 1549075 - RNA, 19 nt, Artificial Sequence
  Description of Artificial Sequence: Synthetic oligonucleotide
  Antisense strand to SEQ ID NO: 1549074
auuacuccuagaaauuuca

SEQ ID NO: 1549076 - RNA, 19 nt, Artificial Sequence
  Description of Artificial Sequence: Synthetic oligonucleotide
  Sense strand starting at position 3393 of SEQ ID NO: 1245260
ccgaguaugugucuaauuu

SEQ ID NO: 1549077 - RNA, 19 nt, Artificial Sequence
  Description of Artificial Sequence: Synthetic oligonucleotide
  Antisense strand to SEQ ID NO: 1549076
aaauuagacacauacucgg

SEQ ID NO: 1549078 - RNA, 19 nt, Artificial Sequence
  Description of Artificial Sequence: Synthetic oligonucleotide
  Sense strand starting at position 3460 of SEQ ID NO: 1245260
ggugaaugcccuuauguga

SEQ ID NO: 1549079 - RNA, 19 nt, Artificial Sequence
  Description of Artificial Sequence: Synthetic oligonucleotide
  Antisense strand to SEQ ID NO: 1549078
ucacauaagggcauucacc

SEQ ID NO: 1549080 - RNA, 19 nt, Artificial Sequence
  Description of Artificial Sequence: Synthetic oligonucleotide
  Sense strand starting at position 3463 of SEQ ID NO: 1245260
gaaugcccuuaugugaauu

SEQ ID NO: 1549081 - RNA, 19 nt, Artificial Sequence
  Description of Artificial Sequence: Synthetic oligonucleotide
  Antisense strand to SEQ ID NO: 1549080
aauucacauaagggcauuc

SEQ ID NO: 1549082 - RNA, 19 nt, Artificial Sequence
  Description of Artificial Sequence: Synthetic oligonucleotide
  Sense strand starting at position 3602 of SEQ ID NO: 1245260
uagcaauucuggguaaaug

SEQ ID NO: 1549083 - RNA, 19 nt, Artificial Sequence
  Description of Artificial Sequence: Synthetic oligonucleotide
  Antisense strand to SEQ ID NO: 1549082
cauuuacccagaauugcua

SEQ ID NO: 1549084 - RNA, 19 nt, Artificial Sequence
  Description of Artificial Sequence: Synthetic oligonucleotide
  Sense strand starting at position 3684 of SEQ ID NO: 1245260
gccagucuugccuuacgua

SEQ ID NO: 1549085 - RNA, 19 nt, Artificial Sequence
  Description of Artificial Sequence: Synthetic oligonucleotide
  Antisense strand to SEQ ID NO: 1549084
uacguaaggcaagacuggc

SEQ ID NO: 1549086 - RNA, 19 nt, Artificial Sequence
  Description of Artificial Sequence: Synthetic oligonucleotide
  Sense strand starting at position 44 of SEQ ID NO: 1245261
gcagguacgugauuacuca

SEQ ID NO: 1549087 - RNA, 19 nt, Artificial Sequence
  Description of Artificial Sequence: Synthetic oligonucleotide
  Antisense strand to SEQ ID NO: 1549086
ugaguaaucacguaccugc

SEQ ID NO: 1549088 - RNA, 19 nt, Artificial Sequence
  Description of Artificial Sequence: Synthetic oligonucleotide
  Sense strand starting at position 48 of SEQ ID NO: 1245261
guacgugauuacucaguga

SEQ ID NO: 1549089 - RNA, 19 nt, Artificial Sequence
  Description of Artificial Sequence: Synthetic oligonucleotide
  Antisense strand to SEQ ID NO: 1549088
ucacugaguaaucacguac

SEQ ID NO: 1549090 - RNA, 19 nt, Artificial Sequence
  Description of Artificial Sequence: Synthetic oligonucleotide
  Sense strand starting at position 51 of SEQ ID NO: 1245261
cgugauuacucagugacca

SEQ ID NO: 1549091 - RNA, 19 nt, Artificial Sequence
  Description of Artificial Sequence: Synthetic oligonucleotide
  Antisense strand to SEQ ID NO: 1549090
uggucacugaguaaucacg

SEQ ID NO: 1549092 - RNA, 19 nt, Artificial Sequence
  Description of Artificial Sequence: Synthetic oligonucleotide
  Sense strand starting at position 52 of SEQ ID NO: 1245261
gugauuacucagugaccag

SEQ ID NO: 1549093 - RNA, 19 nt, Artificial Sequence
  Description of Artificial Sequence: Synthetic oligonucleotide
  Antisense strand to SEQ ID NO: 1549092
cuggucacugaguaaucac

SEQ ID NO: 1549094 - RNA, 19 nt, Artificial Sequence
  Description of Artificial Sequence: Synthetic oligonucleotide
  Sense strand starting at position 76 of SEQ ID NO: 1245261
gaagcagaguucuugacac

SEQ ID NO: 1549095 - RNA, 19 nt, Artificial Sequence
  Description of Artificial Sequence: Synthetic oligonucleotide
  Antisense strand to SEQ ID NO: 1549094
gugucaagaacucugcuuc

SEQ ID NO: 1549096 - RNA, 19 nt, Artificial Sequence
  Description of Artificial Sequence: Synthetic oligonucleotide
  Sense strand starting at position 78 of SEQ ID NO: 1245261
agcagaguucuugacacca

SEQ ID NO: 1549097 - RNA, 19 nt, Artificial Sequence
  Description of Artificial Sequence: Synthetic oligonucleotide
  Antisense strand to SEQ ID NO: 1549096
uggugucaagaacucugcu

SEQ ID NO: 1549098 - RNA, 19 nt, Artificial Sequence
  Description of Artificial Sequence: Synthetic oligonucleotide
  Sense strand starting at position 230 of SEQ ID NO: 1245261
uuagaaugcagcugugaga

SEQ ID NO: 1549099 - RNA, 19 nt, Artificial Sequence
  Description of Artificial Sequence: Synthetic oligonucleotide
  Antisense strand to SEQ ID NO: 1549098
ucucacagcugcauucuaa

SEQ ID NO: 1549100 - RNA, 19 nt, Artificial Sequence
  Description of Artificial Sequence: Synthetic oligonucleotide
  Sense strand starting at position 653 of SEQ ID NO: 1245261
gcugucaugucaucaugca

SEQ ID NO: 1549101 - RNA, 19 nt, Artificial Sequence
  Description of Artificial Sequence: Synthetic oligonucleotide
  Antisense strand to SEQ ID NO: 1549100
ugcaugaugacaugacagc

SEQ ID NO: 1549102 - RNA, 19 nt, Artificial Sequence
  Description of Artificial Sequence: Synthetic oligonucleotide
  Sense strand starting at position 790 of SEQ ID NO: 1245261
cugagaggucccugcuaag

SEQ ID NO: 1549103 - RNA, 19 nt, Artificial Sequence
  Description of Artificial Sequence: Synthetic oligonucleotide
  Antisense strand to SEQ ID NO: 1549102
cuuagcagggaccucucag

SEQ ID NO: 1549104 - RNA, 19 nt, Artificial Sequence
  Description of Artificial Sequence: Synthetic oligonucleotide
  Sense strand starting at position 855 of SEQ ID NO: 1245261
cugagauucugugcuccaa

SEQ ID NO: 1549105 - RNA, 19 nt, Artificial Sequence
  Description of Artificial Sequence: Synthetic oligonucleotide
  Antisense strand to SEQ ID NO: 1549104
uuggagcacagaaucucag

SEQ ID NO: 1549106 - RNA, 19 nt, Artificial Sequence
  Description of Artificial Sequence: Synthetic oligonucleotide
  Sense strand starting at position 1070 of SEQ ID NO: 1245261
ccagaagaguauccgcaaa

SEQ ID NO: 1549107 - RNA, 19 nt, Artificial Sequence
  Description of Artificial Sequence: Synthetic oligonucleotide
  Antisense strand to SEQ ID NO: 1549106
uuugcggauacucuucugg

SEQ ID NO: 1549108 - RNA, 19 nt, Artificial Sequence
  Description of Artificial Sequence: Synthetic oligonucleotide
  Sense strand starting at position 1138 of SEQ ID NO: 1245261
cguucugcguccugcgaau

SEQ ID NO: 1549109 - RNA, 19 nt, Artificial Sequence
  Description of Artificial Sequence: Synthetic oligonucleotide
  Antisense strand to SEQ ID NO: 1549108
auucgcaggacgcagaacg

SEQ ID NO: 1549110 - RNA, 19 nt, Artificial Sequence
  Description of Artificial Sequence: Synthetic oligonucleotide
  Sense strand starting at position 1149 of SEQ ID NO: 1245261
cugcgaaugucccgauacu

SEQ ID NO: 1549111 - RNA, 19 nt, Artificial Sequence
  Description of Artificial Sequence: Synthetic oligonucleotide
  Antisense strand to SEQ ID NO: 1549110
aguaucgggacauucgcag

SEQ ID NO: 1549112 - RNA, 19 nt, Artificial Sequence
  Description of Artificial Sequence: Synthetic oligonucleotide
  Sense strand starting at position 2343 of SEQ ID NO: 1245261
ggacgagucucguccagcu

SEQ ID NO: 1549113 - RNA, 19 nt, Artificial Sequence
  Description of Artificial Sequence: Synthetic oligonucleotide
  Antisense strand to SEQ ID NO: 1549112
agcuggacgagacucgucc

SEQ ID NO: 1549114 - RNA, 19 nt, Artificial Sequence
  Description of Artificial Sequence: Synthetic oligonucleotide
  Sense strand starting at position 2536 of SEQ ID NO: 1245261
uggccauugucauuaucgu

SEQ ID NO: 1549115 - RNA, 19 nt, Artificial Sequence
  Description of Artificial Sequence: Synthetic oligonucleotide
  Antisense strand to SEQ ID NO: 1549114
acgauaaugacaauggcca

SEQ ID NO: 1549116 - RNA, 19 nt, Artificial Sequence
  Description of Artificial Sequence: Synthetic oligonucleotide
  Sense strand starting at position 2567 of SEQ ID NO: 1245261
ggucgcugucgcugcagaa

SEQ ID NO: 1549117 - RNA, 19 nt, Artificial Sequence
  Description of Artificial Sequence: Synthetic oligonucleotide
  Antisense strand to SEQ ID NO: 1549116
uucugcagcgacagcgacc

SEQ ID NO: 1549118 - RNA, 19 nt, Artificial Sequence
  Description of Artificial Sequence: Synthetic oligonucleotide
  Sense strand starting at position 2568 of SEQ ID NO: 1245261
gucgcugucgcugcagaaa

SEQ ID NO: 1549119 - RNA, 19 nt, Artificial Sequence
  Description of Artificial Sequence: Synthetic oligonucleotide
  Antisense strand to SEQ ID NO: 1549118
uuucugcagcgacagcgac

SEQ ID NO: 1549120 - RNA, 19 nt, Artificial Sequence
  Description of Artificial Sequence: Synthetic oligonucleotide
  Sense strand starting at position 2979 of SEQ ID NO: 1245261
gugagugaugcgcgaguga

SEQ ID NO: 1549121 - RNA, 19 nt, Artificial Sequence
  Description of Artificial Sequence: Synthetic oligonucleotide
  Antisense strand to SEQ ID NO: 1549120
ucacucgcgcaucacucac

SEQ ID NO: 1549122 - RNA, 19 nt, Artificial Sequence
  Description of Artificial Sequence: Synthetic oligonucleotide
  Sense strand starting at position 2980 of SEQ ID NO: 1245261
ugagugaugcgcgagugaa

SEQ ID NO: 1549123 - RNA, 19 nt, Artificial Sequence
  Description of Artificial Sequence: Synthetic oligonucleotide
  Antisense strand to SEQ ID NO: 1549122
uucacucgcgcaucacuca

SEQ ID NO: 1549124 - RNA, 19 nt, Artificial Sequence
  Description of Artificial Sequence: Synthetic oligonucleotide
  Sense strand starting at position 2981 of SEQ ID NO: 1245261
gagugaugcgcgagugaag

SEQ ID NO: 1549125 - RNA, 19 nt, Artificial Sequence
  Description of Artificial Sequence: Synthetic oligonucleotide
  Antisense strand to SEQ ID NO: 1549124
cuucacucgcgcaucacuc

SEQ ID NO: 1549126 - RNA, 19 nt, Artificial Sequence
  Description of Artificial Sequence: Synthetic oligonucleotide
  Sense strand starting at position 3417 of SEQ ID NO: 1245261
gaacguagaggugaguaaa

SEQ ID NO: 1549127 - RNA, 19 nt, Artificial Sequence
  Description of Artificial Sequence: Synthetic oligonucleotide
  Antisense strand to SEQ ID NO: 1549126
uuuacucaccucuacguuc

SEQ ID NO: 1549128 - RNA, 19 nt, Artificial Sequence
  Description of Artificial Sequence: Synthetic oligonucleotide
  Sense strand starting at position 3593 of SEQ ID NO: 1245261
agacgcuauccucgguuau

SEQ ID NO: 1549129 - RNA, 19 nt, Artificial Sequence
  Description of Artificial Sequence: Synthetic oligonucleotide
  Antisense strand to SEQ ID NO: 1549128
auaaccgaggauagcgucu

SEQ ID NO: 1549130 - RNA, 19 nt, Artificial Sequence
  Description of Artificial Sequence: Synthetic oligonucleotide
  Sense strand starting at position 3594 of SEQ ID NO: 1245261
gacgcuauccucgguuauc

SEQ ID NO: 1549131 - RNA, 19 nt, Artificial Sequence
  Description of Artificial Sequence: Synthetic oligonucleotide
  Antisense strand to SEQ ID NO: 1549130
gauaaccgaggauagcguc

SEQ ID NO: 1549132 - RNA, 19 nt, Artificial Sequence
  Description of Artificial Sequence: Synthetic oligonucleotide
  Sense strand starting at position 3595 of SEQ ID NO: 1245261
acgcuauccucgguuaucu

SEQ ID NO: 1549133 - RNA, 19 nt, Artificial Sequence
  Description of Artificial Sequence: Synthetic oligonucleotide
  Antisense strand to SEQ ID NO: 1549132
agauaaccgaggauagcgu

SEQ ID NO: 1549134 - RNA, 19 nt, Artificial Sequence
  Description of Artificial Sequence: Synthetic oligonucleotide
  Sense strand starting at position 3596 of SEQ ID NO: 1245261
cgcuauccucgguuaucuu

SEQ ID NO: 1549135 - RNA, 19 nt, Artificial Sequence
  Description of Artificial Sequence: Synthetic oligonucleotide
  Antisense strand to SEQ ID NO: 1549134
aagauaaccgaggauagcg

SEQ ID NO: 1549136 - RNA, 19 nt, Artificial Sequence
  Description of Artificial Sequence: Synthetic oligonucleotide
  Sense strand starting at position 3597 of SEQ ID NO: 1245261
gcuauccucgguuaucuua

SEQ ID NO: 1549137 - RNA, 19 nt, Artificial Sequence
  Description of Artificial Sequence: Synthetic oligonucleotide
  Antisense strand to SEQ ID NO: 1549136
uaagauaaccgaggauagc

SEQ ID NO: 1549138 - RNA, 19 nt, Artificial Sequence
  Description of Artificial Sequence: Synthetic oligonucleotide
  Sense strand starting at position 3600 of SEQ ID NO: 1245261
auccucgguuaucuuaaau

SEQ ID NO: 1549139 - RNA, 19 nt, Artificial Sequence
  Description of Artificial Sequence: Synthetic oligonucleotide
  Antisense strand to SEQ ID NO: 1549138
auuuaagauaaccgaggau

SEQ ID NO: 1549140 - RNA, 19 nt, Artificial Sequence
  Description of Artificial Sequence: Synthetic oligonucleotide
  Sense strand starting at position 3712 of SEQ ID NO: 1245261
gacgaaaucuggcaugcuc

SEQ ID NO: 1549141 - RNA, 19 nt, Artificial Sequence
  Description of Artificial Sequence: Synthetic oligonucleotide
  Antisense strand to SEQ ID NO: 1549140
gagcaugccagauuucguc

SEQ ID NO: 1549142 - RNA, 19 nt, Artificial Sequence
  Description of Artificial Sequence: Synthetic oligonucleotide
  Sense strand starting at position 3775 of SEQ ID NO: 1245261
gugaguugaugacugcaga

SEQ ID NO: 1549143 - RNA, 19 nt, Artificial Sequence
  Description of Artificial Sequence: Synthetic oligonucleotide
  Antisense strand to SEQ ID NO: 1549142
ucugcagucaucaacucac

SEQ ID NO: 1549144 - RNA, 19 nt, Artificial Sequence
  Description of Artificial Sequence: Synthetic oligonucleotide
  Sense strand starting at position 3790 of SEQ ID NO: 1245261
cagagugaguuuguaccuu

SEQ ID NO: 1549145 - RNA, 19 nt, Artificial Sequence
  Description of Artificial Sequence: Synthetic oligonucleotide
  Antisense strand to SEQ ID NO: 1549144
aagguacaaacucacucug

SEQ ID NO: 1549146 - RNA, 19 nt, Artificial Sequence
  Description of Artificial Sequence: Synthetic oligonucleotide
  Sense strand starting at position 3878 of SEQ ID NO: 1245261
aggugcugcgcuugucaca

SEQ ID NO: 1549147 - RNA, 19 nt, Artificial Sequence
  Description of Artificial Sequence: Synthetic oligonucleotide
  Antisense strand to SEQ ID NO: 1549146
ugugacaagcgcagcaccu

SEQ ID NO: 1549148 - RNA, 19 nt, Artificial Sequence
  Description of Artificial Sequence: Synthetic oligonucleotide
  Sense strand starting at position 3976 of SEQ ID NO: 1245261
ccaggcaaccuguaaauau

SEQ ID NO: 1549149 - RNA, 19 nt, Artificial Sequence
  Description of Artificial Sequence: Synthetic oligonucleotide
  Antisense strand to SEQ ID NO: 1549148
auauuuacagguugccugg

SEQ ID NO: 1549150 - RNA, 19 nt, Artificial Sequence
  Description of Artificial Sequence: Synthetic oligonucleotide
  Sense strand starting at position 182 of SEQ ID NO: 1245262
ggccauuaguuucuaacca

SEQ ID NO: 1549151 - RNA, 19 nt, Artificial Sequence
  Description of Artificial Sequence: Synthetic oligonucleotide
  Antisense strand to SEQ ID NO: 1549150
ugguuagaaacuaauggcc

SEQ ID NO: 1549152 - RNA, 19 nt, Artificial Sequence
  Description of Artificial Sequence: Synthetic oligonucleotide
  Sense strand starting at position 398 of SEQ ID NO: 1245262
ccacuuacaucuguuagau

SEQ ID NO: 1549153 - RNA, 19 nt, Artificial Sequence
  Description of Artificial Sequence: Synthetic oligonucleotide
  Antisense strand to SEQ ID NO: 1549152
aucuaacagauguaagugg

SEQ ID NO: 1549154 - RNA, 19 nt, Artificial Sequence
  Description of Artificial Sequence: Synthetic oligonucleotide
  Sense strand starting at position 544 of SEQ ID NO: 1245262
ugcucaugaaauugagaga

SEQ ID NO: 1549155 - RNA, 19 nt, Artificial Sequence
  Description of Artificial Sequence: Synthetic oligonucleotide
  Antisense strand to SEQ ID NO: 1549154
ucucucaauuucaugagca

SEQ ID NO: 1549156 - RNA, 19 nt, Artificial Sequence
  Description of Artificial Sequence: Synthetic oligonucleotide
  Sense strand starting at position 547 of SEQ ID NO: 1245262
ucaugaaauugagagaaua

SEQ ID NO: 1549157 - RNA, 19 nt, Artificial Sequence
  Description of Artificial Sequence: Synthetic oligonucleotide
  Antisense strand to SEQ ID NO: 1549156
uauucucucaauuucauga

SEQ ID NO: 1549158 - RNA, 19 nt, Artificial Sequence
  Description of Artificial Sequence: Synthetic oligonucleotide
  Sense strand starting at position 590 of SEQ ID NO: 1245262
uaggcuaggccuuagaaga

SEQ ID NO: 1549159 - RNA, 19 nt, Artificial Sequence
  Description of Artificial Sequence: Synthetic oligonucleotide
  Antisense strand to SEQ ID NO: 1549158
ucuucuaaggccuagccua

SEQ ID NO: 1549160 - RNA, 19 nt, Artificial Sequence
  Description of Artificial Sequence: Synthetic oligonucleotide
  Sense strand starting at position 708 of SEQ ID NO: 1245262
uuacuccuacccugaguau

SEQ ID NO: 1549161 - RNA, 19 nt, Artificial Sequence
  Description of Artificial Sequence: Synthetic oligonucleotide
  Antisense strand to SEQ ID NO: 1549160
auacucaggguaggaguaa

SEQ ID NO: 1549162 - RNA, 19 nt, Artificial Sequence
  Description of Artificial Sequence: Synthetic oligonucleotide
  Sense strand starting at position 773 of SEQ ID NO: 1245262
guaaucucucaaggaacuu

SEQ ID NO: 1549163 - RNA, 19 nt, Artificial Sequence
  Description of Artificial Sequence: Synthetic oligonucleotide
  Antisense strand to SEQ ID NO: 1549162
aaguuccuugagagauuac

SEQ ID NO: 1549164 - RNA, 19 nt, Artificial Sequence
  Description of Artificial Sequence: Synthetic oligonucleotide
  Sense strand starting at position 784 of SEQ ID NO: 1245262
aggaacuuccagcauuauu

SEQ ID NO: 1549165 - RNA, 19 nt, Artificial Sequence
  Description of Artificial Sequence: Synthetic oligonucleotide
  Antisense strand to SEQ ID NO: 1549164
aauaaugcuggaaguuccu

SEQ ID NO: 1549166 - RNA, 19 nt, Artificial Sequence
  Description of Artificial Sequence: Synthetic oligonucleotide
  Sense strand starting at position 821 of SEQ ID NO: 1245262
guggaaguucuuggacuuu

SEQ ID NO: 1549167 - RNA, 19 nt, Artificial Sequence
  Description of Artificial Sequence: Synthetic oligonucleotide
  Antisense strand to SEQ ID NO: 1549166
aaaguccaagaacuuccac

SEQ ID NO: 1549168 - RNA, 19 nt, Artificial Sequence
  Description of Artificial Sequence: Synthetic oligonucleotide
  Sense strand starting at position 846 of SEQ ID NO: 1245262
ucuacaaggcugggaaaua

SEQ ID NO: 1549169 - RNA, 19 nt, Artificial Sequence
  Description of Artificial Sequence: Synthetic oligonucleotide
  Antisense strand to SEQ ID NO: 1549168
uauuucccagccuuguaga

SEQ ID NO: 1549170 - RNA, 19 nt, Artificial Sequence
  Description of Artificial Sequence: Synthetic oligonucleotide
  Sense strand starting at position 857 of SEQ ID NO: 1245262
gggaaauauugggacaauu

SEQ ID NO: 1549171 - RNA, 19 nt, Artificial Sequence
  Description of Artificial Sequence: Synthetic oligonucleotide
  Antisense strand to SEQ ID NO: 1549170
aauugucccaauauuuccc

SEQ ID NO: 1549172 - RNA, 19 nt, Artificial Sequence
  Description of Artificial Sequence: Synthetic oligonucleotide
  Sense strand starting at position 1254 of SEQ ID NO: 1245262
uauauugauuuaguccgua

SEQ ID NO: 1549173 - RNA, 19 nt, Artificial Sequence
  Description of Artificial Sequence: Synthetic oligonucleotide
  Antisense strand to SEQ ID NO: 1549172
uacggacuaaaucaauaua

SEQ ID NO: 1549174 - RNA, 19 nt, Artificial Sequence
  Description of Artificial Sequence: Synthetic oligonucleotide
  Sense strand starting at position 1560 of SEQ ID NO: 1245262
gcaguugaacagcagagau

SEQ ID NO: 1549175 - RNA, 19 nt, Artificial Sequence
  Description of Artificial Sequence: Synthetic oligonucleotide
  Antisense strand to SEQ ID NO: 1549174
aucucugcuguucaacugc

SEQ ID NO: 1549176 - RNA, 19 nt, Artificial Sequence
  Description of Artificial Sequence: Synthetic oligonucleotide
  Sense strand starting at position 1615 of SEQ ID NO: 1245262
ggcccaaaucuagaagucu

SEQ ID NO: 1549177 - RNA, 19 nt, Artificial Sequence
  Description of Artificial Sequence: Synthetic oligonucleotide
  Antisense strand to SEQ ID NO: 1549176
agacuucuagauuugggcc

SEQ ID NO: 1549178 - RNA, 19 nt, Artificial Sequence
  Description of Artificial Sequence: Synthetic oligonucleotide
  Sense strand starting at position 1624 of SEQ ID NO: 1245262
cuagaagucugucucccua

SEQ ID NO: 1549179 - RNA, 19 nt, Artificial Sequence
  Description of Artificial Sequence: Synthetic oligonucleotide
  Antisense strand to SEQ ID NO: 1549178
uagggagacagacuucuag

SEQ ID NO: 1549180 - RNA, 19 nt, Artificial Sequence
  Description of Artificial Sequence: Synthetic oligonucleotide
  Sense strand starting at position 1626 of SEQ ID NO: 1245262
agaagucugucucccuaaa

SEQ ID NO: 1549181 - RNA, 19 nt, Artificial Sequence
  Description of Artificial Sequence: Synthetic oligonucleotide
  Antisense strand to SEQ ID NO: 1549180
uuuagggagacagacuucu

SEQ ID NO: 1549182 - RNA, 19 nt, Artificial Sequence
  Description of Artificial Sequence: Synthetic oligonucleotide
  Sense strand starting at position 1673 of SEQ ID NO: 1245262
gugggaaucuccucucuug

SEQ ID NO: 1549183 - RNA, 19 nt, Artificial Sequence
  Description of Artificial Sequence: Synthetic oligonucleotide
  Antisense strand to SEQ ID NO: 1549182
caagagaggagauucccac

SEQ ID NO: 1549184 - RNA, 19 nt, Artificial Sequence
  Description of Artificial Sequence: Synthetic oligonucleotide
  Sense strand starting at position 1756 of SEQ ID NO: 1245262
ggaauaguccgguaauagu

SEQ ID NO: 1549185 - RNA, 19 nt, Artificial Sequence
  Description of Artificial Sequence: Synthetic oligonucleotide
  Antisense strand to SEQ ID NO: 1549184
acuauuaccggacuauucc

SEQ ID NO: 1549186 - RNA, 19 nt, Artificial Sequence
  Description of Artificial Sequence: Synthetic oligonucleotide
  Sense strand starting at position 2292 of SEQ ID NO: 1245262
cgcauacauguuggagaaa

SEQ ID NO: 1549187 - RNA, 19 nt, Artificial Sequence
  Description of Artificial Sequence: Synthetic oligonucleotide
  Antisense strand to SEQ ID NO: 1549186
uuucuccaacauguaugcg

SEQ ID NO: 1549188 - RNA, 19 nt, Artificial Sequence
  Description of Artificial Sequence: Synthetic oligonucleotide
  Sense strand starting at position 2319 of SEQ ID NO: 1245262
aguuaaauaucagucccuu

SEQ ID NO: 1549189 - RNA, 19 nt, Artificial Sequence
  Description of Artificial Sequence: Synthetic oligonucleotide
  Antisense strand to SEQ ID NO: 1549188
aagggacugauauuuaacu

SEQ ID NO: 1549190 - RNA, 19 nt, Artificial Sequence
  Description of Artificial Sequence: Synthetic oligonucleotide
  Sense strand starting at position 3034 of SEQ ID NO: 1245262
aaaucugcagcagaguauu

SEQ ID NO: 1549191 - RNA, 19 nt, Artificial Sequence
  Description of Artificial Sequence: Synthetic oligonucleotide
  Antisense strand to SEQ ID NO: 1549190
aauacucugcugcagauuu

SEQ ID NO: 1549192 - RNA, 19 nt, Artificial Sequence
  Description of Artificial Sequence: Synthetic oligonucleotide
  Sense strand starting at position 3048 of SEQ ID NO: 1245262
guauucugagcuuaauaug

SEQ ID NO: 1549193 - RNA, 19 nt, Artificial Sequence
  Description of Artificial Sequence: Synthetic oligonucleotide
  Antisense strand to SEQ ID NO: 1549192
cauauuaagcucagaauac

SEQ ID NO: 1549194 - RNA, 19 nt, Artificial Sequence
  Description of Artificial Sequence: Synthetic oligonucleotide
  Sense strand starting at position 3065 of SEQ ID NO: 1245262
uguguuuaugggcauaauu

SEQ ID NO: 1549195 - RNA, 19 nt, Artificial Sequence
  Description of Artificial Sequence: Synthetic oligonucleotide
  Antisense strand to SEQ ID NO: 1549194
aauuaugcccauaaacaca

SEQ ID NO: 1549196 - RNA, 19 nt, Artificial Sequence
  Description of Artificial Sequence: Synthetic oligonucleotide
  Sense strand starting at position 3067 of SEQ ID NO: 1245262
uguuuaugggcauaauuac

SEQ ID NO: 1549197 - RNA, 19 nt, Artificial Sequence
  Description of Artificial Sequence: Synthetic oligonucleotide
  Antisense strand to SEQ ID NO: 1549196
guaauuaugcccauaaaca

SEQ ID NO: 1549198 - RNA, 19 nt, Artificial Sequence
  Description of Artificial Sequence: Synthetic oligonucleotide
  Sense strand starting at position 3104 of SEQ ID NO: 1245262
ggcaguaauagccagguaa

SEQ ID NO: 1549199 - RNA, 19 nt, Artificial Sequence
  Description of Artificial Sequence: Synthetic oligonucleotide
  Antisense strand to SEQ ID NO: 1549198
uuaccuggcuauuacugcc

SEQ ID NO: 1549200 - RNA, 19 nt, Artificial Sequence
  Description of Artificial Sequence: Synthetic oligonucleotide
  Sense strand starting at position 3108 of SEQ ID NO: 1245262
guaauagccagguaaguuu

SEQ ID NO: 1549201 - RNA, 19 nt, Artificial Sequence
  Description of Artificial Sequence: Synthetic oligonucleotide
  Antisense strand to SEQ ID NO: 1549200
aaacuuaccuggcuauuac

SEQ ID NO: 1549202 - RNA, 19 nt, Artificial Sequence
  Description of Artificial Sequence: Synthetic oligonucleotide
  Sense strand starting at position 3137 of SEQ ID NO: 1245262
gcuuuccauguguuguuua

SEQ ID NO: 1549203 - RNA, 19 nt, Artificial Sequence
  Description of Artificial Sequence: Synthetic oligonucleotide
  Antisense strand to SEQ ID NO: 1549202
uaaacaacacauggaaagc

SEQ ID NO: 1549204 - RNA, 19 nt, Artificial Sequence
  Description of Artificial Sequence: Synthetic oligonucleotide
  Sense strand starting at position 3142 of SEQ ID NO: 1245262
ccauguguuguuuaauaua

SEQ ID NO: 1549205 - RNA, 19 nt, Artificial Sequence
  Description of Artificial Sequence: Synthetic oligonucleotide
  Antisense strand to SEQ ID NO: 1549204
uauauuaaacaacacaugg

SEQ ID NO: 1549206 - RNA, 19 nt, Artificial Sequence
  Description of Artificial Sequence: Synthetic oligonucleotide
  Sense strand starting at position 3180 of SEQ ID NO: 1245262
ggaucuuaaaguuggugaa

SEQ ID NO: 1549207 - RNA, 19 nt, Artificial Sequence
  Description of Artificial Sequence: Synthetic oligonucleotide
  Antisense strand to SEQ ID NO: 1549206
uucaccaacuuuaagaucc

SEQ ID NO: 1549208 - RNA, 19 nt, Artificial Sequence
  Description of Artificial Sequence: Synthetic oligonucleotide
  Sense strand starting at position 3181 of SEQ ID NO: 1245262
gaucuuaaaguuggugaaa

SEQ ID NO: 1549209 - RNA, 19 nt, Artificial Sequence
  Description of Artificial Sequence: Synthetic oligonucleotide
  Antisense strand to SEQ ID NO: 1549208
uuucaccaacuuuaagauc

SEQ ID NO: 1549210 - RNA, 19 nt, Artificial Sequence
  Description of Artificial Sequence: Synthetic oligonucleotide
  Sense strand starting at position 3182 of SEQ ID NO: 1245262
aucuuaaaguuggugaaau

SEQ ID NO: 1549211 - RNA, 19 nt, Artificial Sequence
  Description of Artificial Sequence: Synthetic oligonucleotide
  Antisense strand to SEQ ID NO: 1549210
auuucaccaacuuuaagau

SEQ ID NO: 1549212 - RNA, 19 nt, Artificial Sequence
  Description of Artificial Sequence: Synthetic oligonucleotide
  Sense strand starting at position 3526 of SEQ ID NO: 1245262
ugacaaguuugguuugacu

SEQ ID NO: 1549213 - RNA, 19 nt, Artificial Sequence
  Description of Artificial Sequence: Synthetic oligonucleotide
  Antisense strand to SEQ ID NO: 1549212
agucaaaccaaacuuguca

SEQ ID NO: 1549214 - RNA, 19 nt, Artificial Sequence
  Description of Artificial Sequence: Synthetic oligonucleotide
  Sense strand starting at position 3625 of SEQ ID NO: 1245262
caaagugguuucuugagaa

SEQ ID NO: 1549215 - RNA, 19 nt, Artificial Sequence
  Description of Artificial Sequence: Synthetic oligonucleotide
  Antisense strand to SEQ ID NO: 1549214
uucucaagaaaccacuuug

SEQ ID NO: 1549216 - RNA, 19 nt, Artificial Sequence
  Description of Artificial Sequence: Synthetic oligonucleotide
  Sense strand starting at position 3650 of SEQ ID NO: 1245262
ugguguacucguuaaauua

SEQ ID NO: 1549217 - RNA, 19 nt, Artificial Sequence
  Description of Artificial Sequence: Synthetic oligonucleotide
  Antisense strand to SEQ ID NO: 1549216
uaauuuaacgaguacacca

SEQ ID NO: 1549218 - RNA, 19 nt, Artificial Sequence
  Description of Artificial Sequence: Synthetic oligonucleotide
  Sense strand starting at position 3728 of SEQ ID NO: 1245262
agaggucuccuauauccuu

SEQ ID NO: 1549219 - RNA, 19 nt, Artificial Sequence
  Description of Artificial Sequence: Synthetic oligonucleotide
  Antisense strand to SEQ ID NO: 1549218
aaggauauaggagaccucu

SEQ ID NO: 1549220 - RNA, 19 nt, Artificial Sequence
  Description of Artificial Sequence: Synthetic oligonucleotide
  Sense strand starting at position 3804 of SEQ ID NO: 1245262
ggaaacugacauuggugua

SEQ ID NO: 1549221 - RNA, 19 nt, Artificial Sequence
  Description of Artificial Sequence: Synthetic oligonucleotide
  Antisense strand to SEQ ID NO: 1549220
uacaccaaugucaguuucc

SEQ ID NO: 1549222 - RNA, 19 nt, Artificial Sequence
  Description of Artificial Sequence: Synthetic oligonucleotide
  Sense strand starting at position 3809 of SEQ ID NO: 1245262
cugacauugguguaaugca

SEQ ID NO: 1549223 - RNA, 19 nt, Artificial Sequence
  Description of Artificial Sequence: Synthetic oligonucleotide
  Antisense strand to SEQ ID NO: 1549222
ugcauuacaccaaugucag

SEQ ID NO: 1549224 - RNA, 19 nt, Artificial Sequence
  Description of Artificial Sequence: Synthetic oligonucleotide
  Sense strand starting at position 3816 of SEQ ID NO: 1245262
ugguguaaugcacagaguu

SEQ ID NO: 1549225 - RNA, 19 nt, Artificial Sequence
  Description of Artificial Sequence: Synthetic oligonucleotide
  Antisense strand to SEQ ID NO: 1549224
aacucugugcauuacacca

SEQ ID NO: 1549226 - RNA, 19 nt, Artificial Sequence
  Description of Artificial Sequence: Synthetic oligonucleotide
  Sense strand starting at position 3901 of SEQ ID NO: 1245262
ucauguauagauugguaua

SEQ ID NO: 1549227 - RNA, 19 nt, Artificial Sequence
  Description of Artificial Sequence: Synthetic oligonucleotide
  Antisense strand to SEQ ID NO: 1549226
uauaccaaucuauacauga

SEQ ID NO: 1549228 - RNA, 19 nt, Artificial Sequence
  Description of Artificial Sequence: Synthetic oligonucleotide
  Sense strand starting at position 3912 of SEQ ID NO: 1245262
uugguauaaugacuaucau

SEQ ID NO: 1549229 - RNA, 19 nt, Artificial Sequence
  Description of Artificial Sequence: Synthetic oligonucleotide
  Antisense strand to SEQ ID NO: 1549228
augauagucauuauaccaa

SEQ ID NO: 1549230 - RNA, 19 nt, Artificial Sequence
  Description of Artificial Sequence: Synthetic oligonucleotide
  Sense strand starting at position 805 of SEQ ID NO: 1245263
aggugaccaucauuaacau

SEQ ID NO: 1549231 - RNA, 19 nt, Artificial Sequence
  Description of Artificial Sequence: Synthetic oligonucleotide
  Antisense strand to SEQ ID NO: 1549230
auguuaaugauggucaccu

SEQ ID NO: 1549232 - RNA, 19 nt, Artificial Sequence
  Description of Artificial Sequence: Synthetic oligonucleotide
  Sense strand starting at position 1044 of SEQ ID NO: 1245263
cucaaugugucauuccaaa

SEQ ID NO: 1549233 - RNA, 19 nt, Artificial Sequence
  Description of Artificial Sequence: Synthetic oligonucleotide
  Antisense strand to SEQ ID NO: 1549232
uuuggaaugacacauugag

SEQ ID NO: 1549234 - RNA, 19 nt, Artificial Sequence
  Description of Artificial Sequence: Synthetic oligonucleotide
  Sense strand starting at position 1447 of SEQ ID NO: 1245263
uaguucuccgguuaacaac

SEQ ID NO: 1549235 - RNA, 19 nt, Artificial Sequence
  Description of Artificial Sequence: Synthetic oligonucleotide
  Antisense strand to SEQ ID NO: 1549234
guuguuaaccggagaacua

SEQ ID NO: 1549236 - RNA, 19 nt, Artificial Sequence
  Description of Artificial Sequence: Synthetic oligonucleotide
  Sense strand starting at position 1454 of SEQ ID NO: 1245263
ccgguuaacaacgauaaua

SEQ ID NO: 1549237 - RNA, 19 nt, Artificial Sequence
  Description of Artificial Sequence: Synthetic oligonucleotide
  Antisense strand to SEQ ID NO: 1549236
uauuaucguuguuaaccgg

SEQ ID NO: 1549238 - RNA, 19 nt, Artificial Sequence
  Description of Artificial Sequence: Synthetic oligonucleotide
  Sense strand starting at position 1467 of SEQ ID NO: 1245263
auaauaugcuagcuuaaga

SEQ ID NO: 1549239 - RNA, 19 nt, Artificial Sequence
  Description of Artificial Sequence: Synthetic oligonucleotide
  Antisense strand to SEQ ID NO: 1549238
ucuuaagcuagcauauuau

SEQ ID NO: 1549240 - RNA, 19 nt, Artificial Sequence
  Description of Artificial Sequence: Synthetic oligonucleotide
  Sense strand starting at position 1613 of SEQ ID NO: 1245263
uguagacuugacuacguuu

SEQ ID NO: 1549241 - RNA, 19 nt, Artificial Sequence
  Description of Artificial Sequence: Synthetic oligonucleotide
  Antisense strand to SEQ ID NO: 1549240
aaacguagucaagucuaca

SEQ ID NO: 1549242 - RNA, 19 nt, Artificial Sequence
  Description of Artificial Sequence: Synthetic oligonucleotide
  Sense strand starting at position 1644 of SEQ ID NO: 1245263
gacaaagguucuguuugga

SEQ ID NO: 1549243 - RNA, 19 nt, Artificial Sequence
  Description of Artificial Sequence: Synthetic oligonucleotide
  Antisense strand to SEQ ID NO: 1549242
uccaaacagaaccuuuguc

SEQ ID NO: 1549244 - RNA, 19 nt, Artificial Sequence
  Description of Artificial Sequence: Synthetic oligonucleotide
  Sense strand starting at position 2671 of SEQ ID NO: 1245263
ccucgucuccgagaaagaa

SEQ ID NO: 1549245 - RNA, 19 nt, Artificial Sequence
  Description of Artificial Sequence: Synthetic oligonucleotide
  Antisense strand to SEQ ID NO: 1549244
uucuuucucggagacgagg

SEQ ID NO: 1549246 - RNA, 19 nt, Artificial Sequence
  Description of Artificial Sequence: Synthetic oligonucleotide
  Sense strand starting at position 2801 of SEQ ID NO: 1245263
ucgaguguaaguuguauuu

SEQ ID NO: 1549247 - RNA, 19 nt, Artificial Sequence
  Description of Artificial Sequence: Synthetic oligonucleotide
  Antisense strand to SEQ ID NO: 1549246
aaauacaacuuacacucga

SEQ ID NO: 1549248 - RNA, 19 nt, Artificial Sequence
  Description of Artificial Sequence: Synthetic oligonucleotide
  Sense strand starting at position 2807 of SEQ ID NO: 1245263
guaaguuguauuuggaggu

SEQ ID NO: 1549249 - RNA, 19 nt, Artificial Sequence
  Description of Artificial Sequence: Synthetic oligonucleotide
  Antisense strand to SEQ ID NO: 1549248
accuccaaauacaacuuac

SEQ ID NO: 1549250 - RNA, 19 nt, Artificial Sequence
  Description of Artificial Sequence: Synthetic oligonucleotide
  Sense strand starting at position 2811 of SEQ ID NO: 1245263
guuguauuuggagguuuau

SEQ ID NO: 1549251 - RNA, 19 nt, Artificial Sequence
  Description of Artificial Sequence: Synthetic oligonucleotide
  Antisense strand to SEQ ID NO: 1549250
auaaaccuccaaauacaac

SEQ ID NO: 1549252 - RNA, 19 nt, Artificial Sequence
  Description of Artificial Sequence: Synthetic oligonucleotide
  Sense strand starting at position 3152 of SEQ ID NO: 1245263
uucuuuaccgcugaaacau

SEQ ID NO: 1549253 - RNA, 19 nt, Artificial Sequence
  Description of Artificial Sequence: Synthetic oligonucleotide
  Antisense strand to SEQ ID NO: 1549252
auguuucagcgguaaagaa

SEQ ID NO: 1549254 - RNA, 19 nt, Artificial Sequence
  Description of Artificial Sequence: Synthetic oligonucleotide
  Sense strand starting at position 3162 of SEQ ID NO: 1245263
cugaaacauguggguauca

SEQ ID NO: 1549255 - RNA, 19 nt, Artificial Sequence
  Description of Artificial Sequence: Synthetic oligonucleotide
  Antisense strand to SEQ ID NO: 1549254
ugauacccacauguuucag

SEQ ID NO: 1549256 - RNA, 19 nt, Artificial Sequence
  Description of Artificial Sequence: Synthetic oligonucleotide
  Sense strand starting at position 3239 of SEQ ID NO: 1245263
uacuaaaggguuuguaaug

SEQ ID NO: 1549257 - RNA, 19 nt, Artificial Sequence
  Description of Artificial Sequence: Synthetic oligonucleotide
  Antisense strand to SEQ ID NO: 1549256
cauuacaaacccuuuagua

SEQ ID NO: 1549258 - RNA, 19 nt, Artificial Sequence
  Description of Artificial Sequence: Synthetic oligonucleotide
  Sense strand starting at position 3240 of SEQ ID NO: 1245263
acuaaaggguuuguaauga

SEQ ID NO: 1549259 - RNA, 19 nt, Artificial Sequence
  Description of Artificial Sequence: Synthetic oligonucleotide
  Antisense strand to SEQ ID NO: 1549258
ucauuacaaacccuuuagu

SEQ ID NO: 1549260 - RNA, 19 nt, Artificial Sequence
  Description of Artificial Sequence: Synthetic oligonucleotide
  Sense strand starting at position 3245 of SEQ ID NO: 1245263
aggguuuguaaugacggaa

SEQ ID NO: 1549261 - RNA, 19 nt, Artificial Sequence
  Description of Artificial Sequence: Synthetic oligonucleotide
  Antisense strand to SEQ ID NO: 1549260
uuccgucauuacaaacccu

SEQ ID NO: 1549262 - RNA, 19 nt, Artificial Sequence
  Description of Artificial Sequence: Synthetic oligonucleotide
  Sense strand starting at position 3324 of SEQ ID NO: 1245263
gugcaagaugcugaaguga

SEQ ID NO: 1549263 - RNA, 19 nt, Artificial Sequence
  Description of Artificial Sequence: Synthetic oligonucleotide
  Antisense strand to SEQ ID NO: 1549262
ucacuucagcaucuugcac

SEQ ID NO: 1549264 - RNA, 19 nt, Artificial Sequence
  Description of Artificial Sequence: Synthetic oligonucleotide
  Sense strand starting at position 3376 of SEQ ID NO: 1245263
aggcuuugugcugucuagu

SEQ ID NO: 1549265 - RNA, 19 nt, Artificial Sequence
  Description of Artificial Sequence: Synthetic oligonucleotide
  Antisense strand to SEQ ID NO: 1549264
acuagacagcacaaagccu

SEQ ID NO: 1549266 - RNA, 19 nt, Artificial Sequence
  Description of Artificial Sequence: Synthetic oligonucleotide
  Sense strand starting at position 3377 of SEQ ID NO: 1245263
ggcuuugugcugucuagua

SEQ ID NO: 1549267 - RNA, 19 nt, Artificial Sequence
  Description of Artificial Sequence: Synthetic oligonucleotide
  Antisense strand to SEQ ID NO: 1549266
uacuagacagcacaaagcc

SEQ ID NO: 1549268 - RNA, 19 nt, Artificial Sequence
  Description of Artificial Sequence: Synthetic oligonucleotide
  Sense strand starting at position 3447 of SEQ ID NO: 1245263
auucuuaucggugacgaaa

SEQ ID NO: 1549269 - RNA, 19 nt, Artificial Sequence
  Description of Artificial Sequence: Synthetic oligonucleotide
  Antisense strand to SEQ ID NO: 1549268
uuucgucaccgauaagaau

SEQ ID NO: 1549270 - RNA, 19 nt, Artificial Sequence
  Description of Artificial Sequence: Synthetic oligonucleotide
  Sense strand starting at position 3484 of SEQ ID NO: 1245263
auaaguuggcuugagguua

SEQ ID NO: 1549271 - RNA, 19 nt, Artificial Sequence
  Description of Artificial Sequence: Synthetic oligonucleotide
  Antisense strand to SEQ ID NO: 1549270
uaaccucaagccaacuuau

SEQ ID NO: 1549272 - RNA, 19 nt, Artificial Sequence
  Description of Artificial Sequence: Synthetic oligonucleotide
  Sense strand starting at position 3523 of SEQ ID NO: 1245263
cugguaagauucccuuauc

SEQ ID NO: 1549273 - RNA, 19 nt, Artificial Sequence
  Description of Artificial Sequence: Synthetic oligonucleotide
  Antisense strand to SEQ ID NO: 1549272
gauaagggaaucuuaccag

SEQ ID NO: 1549274 - RNA, 19 nt, Artificial Sequence
  Description of Artificial Sequence: Synthetic oligonucleotide
  Sense strand starting at position 3524 of SEQ ID NO: 1245263
ugguaagauucccuuauca

SEQ ID NO: 1549275 - RNA, 19 nt, Artificial Sequence
  Description of Artificial Sequence: Synthetic oligonucleotide
  Antisense strand to SEQ ID NO: 1549274
ugauaagggaaucuuacca

SEQ ID NO: 1549276 - RNA, 19 nt, Artificial Sequence
  Description of Artificial Sequence: Synthetic oligonucleotide
  Sense strand starting at position 3548 of SEQ ID NO: 1245263
cagaucaaaguaugaaagu

SEQ ID NO: 1549277 - RNA, 19 nt, Artificial Sequence
  Description of Artificial Sequence: Synthetic oligonucleotide
  Antisense strand to SEQ ID NO: 1549276
acuuucauacuuugaucug

SEQ ID NO: 1549278 - RNA, 19 nt, Artificial Sequence
  Description of Artificial Sequence: Synthetic oligonucleotide
  Sense strand starting at position 3604 of SEQ ID NO: 1245263
uguucuucugauuauacua

SEQ ID NO: 1549279 - RNA, 19 nt, Artificial Sequence
  Description of Artificial Sequence: Synthetic oligonucleotide
  Antisense strand to SEQ ID NO: 1549278
uaguauaaucagaagaaca

SEQ ID NO: 1549280 - RNA, 19 nt, Artificial Sequence
  Description of Artificial Sequence: Synthetic oligonucleotide
  Sense strand starting at position 3699 of SEQ ID NO: 1245263
ggagacuauuucuagaauu

SEQ ID NO: 1549281 - RNA, 19 nt, Artificial Sequence
  Description of Artificial Sequence: Synthetic oligonucleotide
  Antisense strand to SEQ ID NO: 1549280
aauucuagaaauagucucc

SEQ ID NO: 1549282 - RNA, 19 nt, Artificial Sequence
  Description of Artificial Sequence: Synthetic oligonucleotide
  Sense strand starting at position 3786 of SEQ ID NO: 1245263
uuuacuguuagcuggagaa

SEQ ID NO: 1549283 - RNA, 19 nt, Artificial Sequence
  Description of Artificial Sequence: Synthetic oligonucleotide
  Antisense strand to SEQ ID NO: 1549282
uucuccagcuaacaguaaa

SEQ ID NO: 1549284 - RNA, 19 nt, Artificial Sequence
  Description of Artificial Sequence: Synthetic oligonucleotide
  Sense strand starting at position 3820 of SEQ ID NO: 1245263
agcaguauuugacugcuuu

SEQ ID NO: 1549285 - RNA, 19 nt, Artificial Sequence
  Description of Artificial Sequence: Synthetic oligonucleotide
  Antisense strand to SEQ ID NO: 1549284
aaagcagucaaauacugcu

SEQ ID NO: 1549286 - RNA, 19 nt, Artificial Sequence
  Description of Artificial Sequence: Synthetic oligonucleotide
  Sense strand starting at position 3821 of SEQ ID NO: 1245263
gcaguauuugacugcuuug

SEQ ID NO: 1549287 - RNA, 19 nt, Artificial Sequence
  Description of Artificial Sequence: Synthetic oligonucleotide
  Antisense strand to SEQ ID NO: 1549286
caaagcagucaaauacugc

SEQ ID NO: 1549288 - RNA, 19 nt, Artificial Sequence
  Description of Artificial Sequence: Synthetic oligonucleotide
  Sense strand starting at position 3824 of SEQ ID NO: 1245263
guauuugacugcuuuguga

SEQ ID NO: 1549289 - RNA, 19 nt, Artificial Sequence
  Description of Artificial Sequence: Synthetic oligonucleotide
  Antisense strand to SEQ ID NO: 1549288
ucacaaagcagucaaauac

SEQ ID NO: 1549290 - RNA, 19 nt, Artificial Sequence
  Description of Artificial Sequence: Synthetic oligonucleotide
  Sense strand starting at position 3869 of SEQ ID NO: 1245263
uacauagauggauguccau

SEQ ID NO: 1549291 - RNA, 19 nt, Artificial Sequence
  Description of Artificial Sequence: Synthetic oligonucleotide
  Antisense strand to SEQ ID NO: 1549290
auggacauccaucuaugua

SEQ ID NO: 1549292 - RNA, 19 nt, Artificial Sequence
  Description of Artificial Sequence: Synthetic oligonucleotide
  Sense strand starting at position 3875 of SEQ ID NO: 1245263
gauggauguccaugguaga

SEQ ID NO: 1549293 - RNA, 19 nt, Artificial Sequence
  Description of Artificial Sequence: Synthetic oligonucleotide
  Antisense strand to SEQ ID NO: 1549292
ucuaccauggacauccauc

SEQ ID NO: 1549294 - RNA, 19 nt, Artificial Sequence
  Description of Artificial Sequence: Synthetic oligonucleotide
  Sense strand starting at position 3876 of SEQ ID NO: 1245263
auggauguccaugguagaa

SEQ ID NO: 1549295 - RNA, 19 nt, Artificial Sequence
  Description of Artificial Sequence: Synthetic oligonucleotide
  Antisense strand to SEQ ID NO: 1549294
uucuaccauggacauccau

SEQ ID NO: 1549296 - RNA, 19 nt, Artificial Sequence
  Description of Artificial Sequence: Synthetic oligonucleotide
  Sense strand starting at position 3896 of SEQ ID NO: 1245263
aagagaaauccuugcugag

SEQ ID NO: 1549297 - RNA, 19 nt, Artificial Sequence
  Description of Artificial Sequence: Synthetic oligonucleotide
  Antisense strand to SEQ ID NO: 1549296
cucagcaaggauuucucuu

SEQ ID NO: 1549298 - RNA, 19 nt, Artificial Sequence
  Description of Artificial Sequence: Synthetic oligonucleotide
  Sense strand starting at position 3898 of SEQ ID NO: 1245263
gagaaauccuugcugagac

SEQ ID NO: 1549299 - RNA, 19 nt, Artificial Sequence
  Description of Artificial Sequence: Synthetic oligonucleotide
  Antisense strand to SEQ ID NO: 1549298
gucucagcaaggauuucuc

SEQ ID NO: 1549300 - RNA, 19 nt, Artificial Sequence
  Description of Artificial Sequence: Synthetic oligonucleotide
  Sense strand starting at position 3933 of SEQ ID NO: 1245263
gcaccugaucaacagcauu

SEQ ID NO: 1549301 - RNA, 19 nt, Artificial Sequence
  Description of Artificial Sequence: Synthetic oligonucleotide
  Antisense strand to SEQ ID NO: 1549300
aaugcuguugaucaggugc

SEQ ID NO: 1549302 - RNA, 19 nt, Artificial Sequence
  Description of Artificial Sequence: Synthetic oligonucleotide
  Sense strand starting at position 3968 of SEQ ID NO: 1245263
gaucaaagcccuuagacgu

SEQ ID NO: 1549303 - RNA, 19 nt, Artificial Sequence
  Description of Artificial Sequence: Synthetic oligonucleotide
  Antisense strand to SEQ ID NO: 1549302
acgucuaagggcuuugauc

SEQ ID NO: 1549304 - RNA, 19 nt, Artificial Sequence
  Description of Artificial Sequence: Synthetic oligonucleotide
  Sense strand starting at position 3976 of SEQ ID NO: 1245263
cccuuagacgucgaggaau

SEQ ID NO: 1549305 - RNA, 19 nt, Artificial Sequence
  Description of Artificial Sequence: Synthetic oligonucleotide
  Antisense strand to SEQ ID NO: 1549304
auuccucgacgucuaaggg

SEQ ID NO: 1549306 - RNA, 19 nt, Artificial Sequence
  Description of Artificial Sequence: Synthetic oligonucleotide
  Sense strand starting at position 3978 of SEQ ID NO: 1245263
cuuagacgucgaggaauca

SEQ ID NO: 1549307 - RNA, 19 nt, Artificial Sequence
  Description of Artificial Sequence: Synthetic oligonucleotide
  Antisense strand to SEQ ID NO: 1549306
ugauuccucgacgucuaag

SEQ ID NO: 1549308 - RNA, 19 nt, Artificial Sequence
  Description of Artificial Sequence: Synthetic oligonucleotide
  Sense strand starting at position 3979 of SEQ ID NO: 1245263
uuagacgucgaggaaucau

SEQ ID NO: 1549309 - RNA, 19 nt, Artificial Sequence
  Description of Artificial Sequence: Synthetic oligonucleotide
  Antisense strand to SEQ ID NO: 1549308
augauuccucgacgucuaa

SEQ ID NO: 1549310 - RNA, 19 nt, Artificial Sequence
  Description of Artificial Sequence: Synthetic oligonucleotide
  Sense strand starting at position 10 of SEQ ID NO: 1245264
ugugauacagugcaguaau

SEQ ID NO: 1549311 - RNA, 19 nt, Artificial Sequence
  Description of Artificial Sequence: Synthetic oligonucleotide
  Antisense strand to SEQ ID NO: 1549310
auuacugcacuguaucaca

SEQ ID NO: 1549312 - RNA, 19 nt, Artificial Sequence
  Description of Artificial Sequence: Synthetic oligonucleotide
  Sense strand starting at position 23 of SEQ ID NO: 1245264
aguaaugucucccucucaa

SEQ ID NO: 1549313 - RNA, 19 nt, Artificial Sequence
  Description of Artificial Sequence: Synthetic oligonucleotide
  Antisense strand to SEQ ID NO: 1549312
uugagagggagacauuacu

SEQ ID NO: 1549314 - RNA, 19 nt, Artificial Sequence
  Description of Artificial Sequence: Synthetic oligonucleotide
  Sense strand starting at position 305 of SEQ ID NO: 1245264
gcacgagaaucaucucaac

SEQ ID NO: 1549315 - RNA, 19 nt, Artificial Sequence
  Description of Artificial Sequence: Synthetic oligonucleotide
  Antisense strand to SEQ ID NO: 1549314
guugagaugauucucgugc

SEQ ID NO: 1549316 - RNA, 19 nt, Artificial Sequence
  Description of Artificial Sequence: Synthetic oligonucleotide
  Sense strand starting at position 566 of SEQ ID NO: 1245264
agguuaauggcucauagau

SEQ ID NO: 1549317 - RNA, 19 nt, Artificial Sequence
  Description of Artificial Sequence: Synthetic oligonucleotide
  Antisense strand to SEQ ID NO: 1549316
aucuaugagccauuaaccu

SEQ ID NO: 1549318 - RNA, 19 nt, Artificial Sequence
  Description of Artificial Sequence: Synthetic oligonucleotide
  Sense strand starting at position 575 of SEQ ID NO: 1245264
gcucauagauuccucaguu

SEQ ID NO: 1549319 - RNA, 19 nt, Artificial Sequence
  Description of Artificial Sequence: Synthetic oligonucleotide
  Antisense strand to SEQ ID NO: 1549318
aacugaggaaucuaugagc

SEQ ID NO: 1549320 - RNA, 19 nt, Artificial Sequence
  Description of Artificial Sequence: Synthetic oligonucleotide
  Sense strand starting at position 576 of SEQ ID NO: 1245264
cucauagauuccucaguuu

SEQ ID NO: 1549321 - RNA, 19 nt, Artificial Sequence
  Description of Artificial Sequence: Synthetic oligonucleotide
  Antisense strand to SEQ ID NO: 1549320
aaacugaggaaucuaugag

SEQ ID NO: 1549322 - RNA, 19 nt, Artificial Sequence
  Description of Artificial Sequence: Synthetic oligonucleotide
  Sense strand starting at position 579 of SEQ ID NO: 1245264
auagauuccucaguuuauu

SEQ ID NO: 1549323 - RNA, 19 nt, Artificial Sequence
  Description of Artificial Sequence: Synthetic oligonucleotide
  Antisense strand to SEQ ID NO: 1549322
aauaaacugaggaaucuau

SEQ ID NO: 1549324 - RNA, 19 nt, Artificial Sequence
  Description of Artificial Sequence: Synthetic oligonucleotide
  Sense strand starting at position 817 of SEQ ID NO: 1245264
uugggaauguuugucuguu

SEQ ID NO: 1549325 - RNA, 19 nt, Artificial Sequence
  Description of Artificial Sequence: Synthetic oligonucleotide
  Antisense strand to SEQ ID NO: 1549324
aacagacaaacauucccaa

SEQ ID NO: 1549326 - RNA, 19 nt, Artificial Sequence
  Description of Artificial Sequence: Synthetic oligonucleotide
  Sense strand starting at position 818 of SEQ ID NO: 1245264
ugggaauguuugucuguuu

SEQ ID NO: 1549327 - RNA, 19 nt, Artificial Sequence
  Description of Artificial Sequence: Synthetic oligonucleotide
  Antisense strand to SEQ ID NO: 1549326
aaacagacaaacauuccca

SEQ ID NO: 1549328 - RNA, 19 nt, Artificial Sequence
  Description of Artificial Sequence: Synthetic oligonucleotide
  Sense strand starting at position 910 of SEQ ID NO: 1245264
ggcuuuggcacacauagau

SEQ ID NO: 1549329 - RNA, 19 nt, Artificial Sequence
  Description of Artificial Sequence: Synthetic oligonucleotide
  Antisense strand to SEQ ID NO: 1549328
aucuaugugugccaaagcc

SEQ ID NO: 1549330 - RNA, 19 nt, Artificial Sequence
  Description of Artificial Sequence: Synthetic oligonucleotide
  Sense strand starting at position 929 of SEQ ID NO: 1245264
acugcauugcuacaaauga

SEQ ID NO: 1549331 - RNA, 19 nt, Artificial Sequence
  Description of Artificial Sequence: Synthetic oligonucleotide
  Antisense strand to SEQ ID NO: 1549330
ucauuuguagcaaugcagu

SEQ ID NO: 1549332 - RNA, 19 nt, Artificial Sequence
  Description of Artificial Sequence: Synthetic oligonucleotide
  Sense strand starting at position 966 of SEQ ID NO: 1245264
aagugaugcuacuuuaagg

SEQ ID NO: 1549333 - RNA, 19 nt, Artificial Sequence
  Description of Artificial Sequence: Synthetic oligonucleotide
  Antisense strand to SEQ ID NO: 1549332
ccuuaaaguagcaucacuu

SEQ ID NO: 1549334 - RNA, 19 nt, Artificial Sequence
  Description of Artificial Sequence: Synthetic oligonucleotide
  Sense strand starting at position 1411 of SEQ ID NO: 1245264
uucccagcuguauguaaga

SEQ ID NO: 1549335 - RNA, 19 nt, Artificial Sequence
  Description of Artificial Sequence: Synthetic oligonucleotide
  Antisense strand to SEQ ID NO: 1549334
ucuuacauacagcugggaa

SEQ ID NO: 1549336 - RNA, 19 nt, Artificial Sequence
  Description of Artificial Sequence: Synthetic oligonucleotide
  Sense strand starting at position 1418 of SEQ ID NO: 1245264
cuguauguaagaugguauc

SEQ ID NO: 1549337 - RNA, 19 nt, Artificial Sequence
  Description of Artificial Sequence: Synthetic oligonucleotide
  Antisense strand to SEQ ID NO: 1549336
gauaccaucuuacauacag

SEQ ID NO: 1549338 - RNA, 19 nt, Artificial Sequence
  Description of Artificial Sequence: Synthetic oligonucleotide
  Sense strand starting at position 1475 of SEQ ID NO: 1245264
uaguuucuaccgcaagaug

SEQ ID NO: 1549339 - RNA, 19 nt, Artificial Sequence
  Description of Artificial Sequence: Synthetic oligonucleotide
  Antisense strand to SEQ ID NO: 1549338
caucuugcgguagaaacua

SEQ ID NO: 1549340 - RNA, 19 nt, Artificial Sequence
  Description of Artificial Sequence: Synthetic oligonucleotide
  Sense strand starting at position 1486 of SEQ ID NO: 1245264
gcaagaugcaauuguugag

SEQ ID NO: 1549341 - RNA, 19 nt, Artificial Sequence
  Description of Artificial Sequence: Synthetic oligonucleotide
  Antisense strand to SEQ ID NO: 1549340
cucaacaauugcaucuugc

SEQ ID NO: 1549342 - RNA, 19 nt, Artificial Sequence
  Description of Artificial Sequence: Synthetic oligonucleotide
  Sense strand starting at position 1493 of SEQ ID NO: 1245264
gcaauuguugagagcguga

SEQ ID NO: 1549343 - RNA, 19 nt, Artificial Sequence
  Description of Artificial Sequence: Synthetic oligonucleotide
  Antisense strand to SEQ ID NO: 1549342
ucacgcucucaacaauugc

SEQ ID NO: 1549344 - RNA, 19 nt, Artificial Sequence
  Description of Artificial Sequence: Synthetic oligonucleotide
  Sense strand starting at position 1495 of SEQ ID NO: 1245264
aauuguugagagcgugauu

SEQ ID NO: 1549345 - RNA, 19 nt, Artificial Sequence
  Description of Artificial Sequence: Synthetic oligonucleotide
  Antisense strand to SEQ ID NO: 1549344
aaucacgcucucaacaauu

SEQ ID NO: 1549346 - RNA, 19 nt, Artificial Sequence
  Description of Artificial Sequence: Synthetic oligonucleotide
  Sense strand starting at position 1498 of SEQ ID NO: 1245264
uguugagagcgugauuucu

SEQ ID NO: 1549347 - RNA, 19 nt, Artificial Sequence
  Description of Artificial Sequence: Synthetic oligonucleotide
  Antisense strand to SEQ ID NO: 1549346
agaaaucacgcucucaaca

SEQ ID NO: 1549348 - RNA, 19 nt, Artificial Sequence
  Description of Artificial Sequence: Synthetic oligonucleotide
  Sense strand starting at position 1614 of SEQ ID NO: 1245264
ggacuagccucaguggaau

SEQ ID NO: 1549349 - RNA, 19 nt, Artificial Sequence
  Description of Artificial Sequence: Synthetic oligonucleotide
  Antisense strand to SEQ ID NO: 1549348
auuccacugaggcuagucc

SEQ ID NO: 1549350 - RNA, 19 nt, Artificial Sequence
  Description of Artificial Sequence: Synthetic oligonucleotide
  Sense strand starting at position 1646 of SEQ ID NO: 1245264
uuaaucuaccaauggguga

SEQ ID NO: 1549351 - RNA, 19 nt, Artificial Sequence
  Description of Artificial Sequence: Synthetic oligonucleotide
  Antisense strand to SEQ ID NO: 1549350
ucacccauugguagauuaa

SEQ ID NO: 1549352 - RNA, 19 nt, Artificial Sequence
  Description of Artificial Sequence: Synthetic oligonucleotide
  Sense strand starting at position 1650 of SEQ ID NO: 1245264
ucuaccaaugggugauuaa

SEQ ID NO: 1549353 - RNA, 19 nt, Artificial Sequence
  Description of Artificial Sequence: Synthetic oligonucleotide
  Antisense strand to SEQ ID NO: 1549352
uuaaucacccauugguaga

SEQ ID NO: 1549354 - RNA, 19 nt, Artificial Sequence
  Description of Artificial Sequence: Synthetic oligonucleotide
  Sense strand starting at position 1708 of SEQ ID NO: 1245264
gcggaauucuuucuuucua

SEQ ID NO: 1549355 - RNA, 19 nt, Artificial Sequence
  Description of Artificial Sequence: Synthetic oligonucleotide
  Antisense strand to SEQ ID NO: 1549354
uagaaagaaagaauuccgc

SEQ ID NO: 1549356 - RNA, 19 nt, Artificial Sequence
  Description of Artificial Sequence: Synthetic oligonucleotide
  Sense strand starting at position 1727 of SEQ ID NO: 1245264
cggcuaauugcccucaguu

SEQ ID NO: 1549357 - RNA, 19 nt, Artificial Sequence
  Description of Artificial Sequence: Synthetic oligonucleotide
  Antisense strand to SEQ ID NO: 1549356
aacugagggcaauuagccg

SEQ ID NO: 1549358 - RNA, 19 nt, Artificial Sequence
  Description of Artificial Sequence: Synthetic oligonucleotide
  Sense strand starting at position 1778 of SEQ ID NO: 1245264
cucugaugagugugguacu

SEQ ID NO: 1549359 - RNA, 19 nt, Artificial Sequence
  Description of Artificial Sequence: Synthetic oligonucleotide
  Antisense strand to SEQ ID NO: 1549358
aguaccacacucaucagag

SEQ ID NO: 1549360 - RNA, 19 nt, Artificial Sequence
  Description of Artificial Sequence: Synthetic oligonucleotide
  Sense strand starting at position 1785 of SEQ ID NO: 1245264
gagugugguacuugagaca

SEQ ID NO: 1549361 - RNA, 19 nt, Artificial Sequence
  Description of Artificial Sequence: Synthetic oligonucleotide
  Antisense strand to SEQ ID NO: 1549360
ugucucaaguaccacacuc

SEQ ID NO: 1549362 - RNA, 19 nt, Artificial Sequence
  Description of Artificial Sequence: Synthetic oligonucleotide
  Sense strand starting at position 1822 of SEQ ID NO: 1245264
ggaccaauguuacaaauga

SEQ ID NO: 1549363 - RNA, 19 nt, Artificial Sequence
  Description of Artificial Sequence: Synthetic oligonucleotide
  Antisense strand to SEQ ID NO: 1549362
ucauuuguaacauuggucc

SEQ ID NO: 1549364 - RNA, 19 nt, Artificial Sequence
  Description of Artificial Sequence: Synthetic oligonucleotide
  Sense strand starting at position 1869 of SEQ ID NO: 1245264
gcaaauuauguacauguuu

SEQ ID NO: 1549365 - RNA, 19 nt, Artificial Sequence
  Description of Artificial Sequence: Synthetic oligonucleotide
  Antisense strand to SEQ ID NO: 1549364
aaacauguacauaauuugc

SEQ ID NO: 1549366 - RNA, 19 nt, Artificial Sequence
  Description of Artificial Sequence: Synthetic oligonucleotide
  Sense strand starting at position 1957 of SEQ ID NO: 1245264
cggugcuuacccugaagau

SEQ ID NO: 1549367 - RNA, 19 nt, Artificial Sequence
  Description of Artificial Sequence: Synthetic oligonucleotide
  Antisense strand to SEQ ID NO: 1549366
aucuucaggguaagcaccg

SEQ ID NO: 1549368 - RNA, 19 nt, Artificial Sequence
  Description of Artificial Sequence: Synthetic oligonucleotide
  Sense strand starting at position 1958 of SEQ ID NO: 1245264
ggugcuuacccugaagaug

SEQ ID NO: 1549369 - RNA, 19 nt, Artificial Sequence
  Description of Artificial Sequence: Synthetic oligonucleotide
  Antisense strand to SEQ ID NO: 1549368
caucuucaggguaagcacc

SEQ ID NO: 1549370 - RNA, 19 nt, Artificial Sequence
  Description of Artificial Sequence: Synthetic oligonucleotide
  Sense strand starting at position 3695 of SEQ ID NO: 1245264
ggaaacuagcaguauucca

SEQ ID NO: 1549371 - RNA, 19 nt, Artificial Sequence
  Description of Artificial Sequence: Synthetic oligonucleotide
  Antisense strand to SEQ ID NO: 1549370
uggaauacugcuaguuucc

SEQ ID NO: 1549372 - RNA, 19 nt, Artificial Sequence
  Description of Artificial Sequence: Synthetic oligonucleotide
  Sense strand starting at position 3702 of SEQ ID NO: 1245264
agcaguauuccacauuaga

SEQ ID NO: 1549373 - RNA, 19 nt, Artificial Sequence
  Description of Artificial Sequence: Synthetic oligonucleotide
  Antisense strand to SEQ ID NO: 1549372
ucuaauguggaauacugcu

SEQ ID NO: 1549374 - RNA, 19 nt, Artificial Sequence
  Description of Artificial Sequence: Synthetic oligonucleotide
  Sense strand starting at position 3725 of SEQ ID NO: 1245264
cuuuccucgguucggaaau

SEQ ID NO: 1549375 - RNA, 19 nt, Artificial Sequence
  Description of Artificial Sequence: Synthetic oligonucleotide
  Antisense strand to SEQ ID NO: 1549374
auuuccgaaccgaggaaag

SEQ ID NO: 1549376 - RNA, 19 nt, Artificial Sequence
  Description of Artificial Sequence: Synthetic oligonucleotide
  Sense strand starting at position 3731 of SEQ ID NO: 1245264
ucgguucggaaauguaaag

SEQ ID NO: 1549377 - RNA, 19 nt, Artificial Sequence
  Description of Artificial Sequence: Synthetic oligonucleotide
  Antisense strand to SEQ ID NO: 1549376
cuuuacauuuccgaaccga

SEQ ID NO: 1549378 - RNA, 19 nt, Artificial Sequence
  Description of Artificial Sequence: Synthetic oligonucleotide
  Sense strand starting at position 3750 of SEQ ID NO: 1245264
augauucugaaccgugaga

SEQ ID NO: 1549379 - RNA, 19 nt, Artificial Sequence
  Description of Artificial Sequence: Synthetic oligonucleotide
  Antisense strand to SEQ ID NO: 1549378
ucucacgguucagaaucau

SEQ ID NO: 1549380 - RNA, 19 nt, Artificial Sequence
  Description of Artificial Sequence: Synthetic oligonucleotide
  Sense strand starting at position 3752 of SEQ ID NO: 1245264
gauucugaaccgugagaau

SEQ ID NO: 1549381 - RNA, 19 nt, Artificial Sequence
  Description of Artificial Sequence: Synthetic oligonucleotide
  Antisense strand to SEQ ID NO: 1549380
auucucacgguucagaauc

SEQ ID NO: 1549382 - RNA, 19 nt, Artificial Sequence
  Description of Artificial Sequence: Synthetic oligonucleotide
  Sense strand starting at position 3843 of SEQ ID NO: 1245264
auugcauuccuguauguga

SEQ ID NO: 1549383 - RNA, 19 nt, Artificial Sequence
  Description of Artificial Sequence: Synthetic oligonucleotide
  Antisense strand to SEQ ID NO: 1549382
ucacauacaggaaugcaau

SEQ ID NO: 1549384 - RNA, 19 nt, Artificial Sequence
  Description of Artificial Sequence: Synthetic oligonucleotide
  Sense strand starting at position 3845 of SEQ ID NO: 1245264
ugcauuccuguaugugaaa

SEQ ID NO: 1549385 - RNA, 19 nt, Artificial Sequence
  Description of Artificial Sequence: Synthetic oligonucleotide
  Antisense strand to SEQ ID NO: 1549384
uuucacauacaggaaugca

SEQ ID NO: 1549386 - RNA, 19 nt, Artificial Sequence
  Description of Artificial Sequence: Synthetic oligonucleotide
  Sense strand starting at position 3935 of SEQ ID NO: 1245264
gccuuaguuacgucauugu

SEQ ID NO: 1549387 - RNA, 19 nt, Artificial Sequence
  Description of Artificial Sequence: Synthetic oligonucleotide
  Antisense strand to SEQ ID NO: 1549386
acaaugacguaacuaaggc

SEQ ID NO: 1549388 - RNA, 19 nt, Artificial Sequence
  Description of Artificial Sequence: Synthetic oligonucleotide
  Sense strand starting at position 3943 of SEQ ID NO: 1245264
uacgucauugucuaaugua

SEQ ID NO: 1549389 - RNA, 19 nt, Artificial Sequence
  Description of Artificial Sequence: Synthetic oligonucleotide
  Antisense strand to SEQ ID NO: 1549388
uacauuagacaaugacgua

SEQ ID NO: 1549390 - RNA, 19 nt, Artificial Sequence
  Description of Artificial Sequence: Synthetic oligonucleotide
  Sense strand starting at position 8 of SEQ ID NO: 1245265
acuggcugugaagauauua

SEQ ID NO: 1549391 - RNA, 19 nt, Artificial Sequence
  Description of Artificial Sequence: Synthetic oligonucleotide
  Antisense strand to SEQ ID NO: 1549390
uaauaucuucacagccagu

SEQ ID NO: 1549392 - RNA, 19 nt, Artificial Sequence
  Description of Artificial Sequence: Synthetic oligonucleotide
  Sense strand starting at position 567 of SEQ ID NO: 1245265
cuccuuaugucuccacgaa

SEQ ID NO: 1549393 - RNA, 19 nt, Artificial Sequence
  Description of Artificial Sequence: Synthetic oligonucleotide
  Antisense strand to SEQ ID NO: 1549392
uucguggagacauaaggag

SEQ ID NO: 1549394 - RNA, 19 nt, Artificial Sequence
  Description of Artificial Sequence: Synthetic oligonucleotide
  Sense strand starting at position 568 of SEQ ID NO: 1245265
uccuuaugucuccacgaac

SEQ ID NO: 1549395 - RNA, 19 nt, Artificial Sequence
  Description of Artificial Sequence: Synthetic oligonucleotide
  Antisense strand to SEQ ID NO: 1549394
guucguggagacauaagga

SEQ ID NO: 1549396 - RNA, 19 nt, Artificial Sequence
  Description of Artificial Sequence: Synthetic oligonucleotide
  Sense strand starting at position 1030 of SEQ ID NO: 1245265
uccugucuuaaagggauga

SEQ ID NO: 1549397 - RNA, 19 nt, Artificial Sequence
  Description of Artificial Sequence: Synthetic oligonucleotide
  Antisense strand to SEQ ID NO: 1549396
ucaucccuuuaagacagga

SEQ ID NO: 1549398 - RNA, 19 nt, Artificial Sequence
  Description of Artificial Sequence: Synthetic oligonucleotide
  Sense strand starting at position 1047 of SEQ ID NO: 1245265
gaggacagcuccucugaau

SEQ ID NO: 1549399 - RNA, 19 nt, Artificial Sequence
  Description of Artificial Sequence: Synthetic oligonucleotide
  Antisense strand to SEQ ID NO: 1549398
auucagaggagcuguccuc

SEQ ID NO: 1549400 - RNA, 19 nt, Artificial Sequence
  Description of Artificial Sequence: Synthetic oligonucleotide
  Sense strand starting at position 1339 of SEQ ID NO: 1245265
guacguuuccuggaaagga

SEQ ID NO: 1549401 - RNA, 19 nt, Artificial Sequence
  Description of Artificial Sequence: Synthetic oligonucleotide
  Antisense strand to SEQ ID NO: 1549400
uccuuuccaggaaacguac

SEQ ID NO: 1549402 - RNA, 19 nt, Artificial Sequence
  Description of Artificial Sequence: Synthetic oligonucleotide
  Sense strand starting at position 1380 of SEQ ID NO: 1245265
cugucaacccgguaaagcu

SEQ ID NO: 1549403 - RNA, 19 nt, Artificial Sequence
  Description of Artificial Sequence: Synthetic oligonucleotide
  Antisense strand to SEQ ID NO: 1549402
agcuuuaccggguugacag

SEQ ID NO: 1549404 - RNA, 19 nt, Artificial Sequence
  Description of Artificial Sequence: Synthetic oligonucleotide
  Sense strand starting at position 1520 of SEQ ID NO: 1245265
gguugauguccugacucua

SEQ ID NO: 1549405 - RNA, 19 nt, Artificial Sequence
  Description of Artificial Sequence: Synthetic oligonucleotide
  Antisense strand to SEQ ID NO: 1549404
uagagucaggacaucaacc

SEQ ID NO: 1549406 - RNA, 19 nt, Artificial Sequence
  Description of Artificial Sequence: Synthetic oligonucleotide
  Sense strand starting at position 2182 of SEQ ID NO: 1245265
ggccacgaucaauauauca

SEQ ID NO: 1549407 - RNA, 19 nt, Artificial Sequence
  Description of Artificial Sequence: Synthetic oligonucleotide
  Antisense strand to SEQ ID NO: 1549406
ugauauauugaucguggcc

SEQ ID NO: 1549408 - RNA, 19 nt, Artificial Sequence
  Description of Artificial Sequence: Synthetic oligonucleotide
  Sense strand starting at position 2189 of SEQ ID NO: 1245265
aucaauauaucagcccgaa

SEQ ID NO: 1549409 - RNA, 19 nt, Artificial Sequence
  Description of Artificial Sequence: Synthetic oligonucleotide
  Antisense strand to SEQ ID NO: 1549408
uucgggcugauauauugau

SEQ ID NO: 1549410 - RNA, 19 nt, Artificial Sequence
  Description of Artificial Sequence: Synthetic oligonucleotide
  Sense strand starting at position 2193 of SEQ ID NO: 1245265
auauaucagcccgaagcua

SEQ ID NO: 1549411 - RNA, 19 nt, Artificial Sequence
  Description of Artificial Sequence: Synthetic oligonucleotide
  Antisense strand to SEQ ID NO: 1549410
uagcuucgggcugauauau

SEQ ID NO: 1549412 - RNA, 19 nt, Artificial Sequence
  Description of Artificial Sequence: Synthetic oligonucleotide
  Sense strand starting at position 2222 of SEQ ID NO: 1245265
ucuggaagucuuuggguau

SEQ ID NO: 1549413 - RNA, 19 nt, Artificial Sequence
  Description of Artificial Sequence: Synthetic oligonucleotide
  Antisense strand to SEQ ID NO: 1549412
auacccaaagacuuccaga

SEQ ID NO: 1549414 - RNA, 19 nt, Artificial Sequence
  Description of Artificial Sequence: Synthetic oligonucleotide
  Sense strand starting at position 2226 of SEQ ID NO: 1245265
gaagucuuuggguauugga

SEQ ID NO: 1549415 - RNA, 19 nt, Artificial Sequence
  Description of Artificial Sequence: Synthetic oligonucleotide
  Antisense strand to SEQ ID NO: 1549414
uccaauacccaaagacuuc

SEQ ID NO: 1549416 - RNA, 19 nt, Artificial Sequence
  Description of Artificial Sequence: Synthetic oligonucleotide
  Sense strand starting at position 2350 of SEQ ID NO: 1245265
cccgguuuaagcuacagaa

SEQ ID NO: 1549417 - RNA, 19 nt, Artificial Sequence
  Description of Artificial Sequence: Synthetic oligonucleotide
  Antisense strand to SEQ ID NO: 1549416
uucuguagcuuaaaccggg

SEQ ID NO: 1549418 - RNA, 19 nt, Artificial Sequence
  Description of Artificial Sequence: Synthetic oligonucleotide
  Sense strand starting at position 2753 of SEQ ID NO: 1245265
auuguaguagauugguaca

SEQ ID NO: 1549419 - RNA, 19 nt, Artificial Sequence
  Description of Artificial Sequence: Synthetic oligonucleotide
  Antisense strand to SEQ ID NO: 1549418
uguaccaaucuacuacaau

SEQ ID NO: 1549420 - RNA, 19 nt, Artificial Sequence
  Description of Artificial Sequence: Synthetic oligonucleotide
  Sense strand starting at position 2755 of SEQ ID NO: 1245265
uguaguagauugguacaaa

SEQ ID NO: 1549421 - RNA, 19 nt, Artificial Sequence
  Description of Artificial Sequence: Synthetic oligonucleotide
  Antisense strand to SEQ ID NO: 1549420
uuuguaccaaucuacuaca

SEQ ID NO: 1549422 - RNA, 19 nt, Artificial Sequence
  Description of Artificial Sequence: Synthetic oligonucleotide
  Sense strand starting at position 2802 of SEQ ID NO: 1245265
aauaguaaugcagggcuua

SEQ ID NO: 1549423 - RNA, 19 nt, Artificial Sequence
  Description of Artificial Sequence: Synthetic oligonucleotide
  Antisense strand to SEQ ID NO: 1549422
uaagcccugcauuacuauu

SEQ ID NO: 1549424 - RNA, 19 nt, Artificial Sequence
  Description of Artificial Sequence: Synthetic oligonucleotide
  Sense strand starting at position 2803 of SEQ ID NO: 1245265
auaguaaugcagggcuuau

SEQ ID NO: 1549425 - RNA, 19 nt, Artificial Sequence
  Description of Artificial Sequence: Synthetic oligonucleotide
  Antisense strand to SEQ ID NO: 1549424
auaagcccugcauuacuau

SEQ ID NO: 1549426 - RNA, 19 nt, Artificial Sequence
  Description of Artificial Sequence: Synthetic oligonucleotide
  Sense strand starting at position 2877 of SEQ ID NO: 1245265
uugaauggcuugcccaaga

SEQ ID NO: 1549427 - RNA, 19 nt, Artificial Sequence
  Description of Artificial Sequence: Synthetic oligonucleotide
  Antisense strand to SEQ ID NO: 1549426
ucuugggcaagccauucaa

SEQ ID NO: 1549428 - RNA, 19 nt, Artificial Sequence
  Description of Artificial Sequence: Synthetic oligonucleotide
  Sense strand starting at position 2899 of SEQ ID NO: 1245265
caguuuauuuaagggauga

SEQ ID NO: 1549429 - RNA, 19 nt, Artificial Sequence
  Description of Artificial Sequence: Synthetic oligonucleotide
  Antisense strand to SEQ ID NO: 1549428
ucaucccuuaaauaaacug

SEQ ID NO: 1549430 - RNA, 19 nt, Artificial Sequence
  Description of Artificial Sequence: Synthetic oligonucleotide
  Sense strand starting at position 2915 of SEQ ID NO: 1245265
ugaagagcucaagguuaga

SEQ ID NO: 1549431 - RNA, 19 nt, Artificial Sequence
  Description of Artificial Sequence: Synthetic oligonucleotide
  Antisense strand to SEQ ID NO: 1549430
ucuaaccuugagcucuuca

SEQ ID NO: 1549432 - RNA, 19 nt, Artificial Sequence
  Description of Artificial Sequence: Synthetic oligonucleotide
  Sense strand starting at position 2998 of SEQ ID NO: 1245265
aggaauaggugcucaaagu

SEQ ID NO: 1549433 - RNA, 19 nt, Artificial Sequence
  Description of Artificial Sequence: Synthetic oligonucleotide
  Antisense strand to SEQ ID NO: 1549432
acuuugagcaccuauuccu

SEQ ID NO: 1549434 - RNA, 19 nt, Artificial Sequence
  Description of Artificial Sequence: Synthetic oligonucleotide
  Sense strand starting at position 2999 of SEQ ID NO: 1245265
ggaauaggugcucaaagug

SEQ ID NO: 1549435 - RNA, 19 nt, Artificial Sequence
  Description of Artificial Sequence: Synthetic oligonucleotide
  Antisense strand to SEQ ID NO: 1549434
cacuuugagcaccuauucc

SEQ ID NO: 1549436 - RNA, 19 nt, Artificial Sequence
  Description of Artificial Sequence: Synthetic oligonucleotide
  Sense strand starting at position 3121 of SEQ ID NO: 1245265
gggcaauugcuagaauuau

SEQ ID NO: 1549437 - RNA, 19 nt, Artificial Sequence
  Description of Artificial Sequence: Synthetic oligonucleotide
  Antisense strand to SEQ ID NO: 1549436
auaauucuagcaauugccc

SEQ ID NO: 1549438 - RNA, 19 nt, Artificial Sequence
  Description of Artificial Sequence: Synthetic oligonucleotide
  Sense strand starting at position 3129 of SEQ ID NO: 1245265
gcuagaauuaugugaagca

SEQ ID NO: 1549439 - RNA, 19 nt, Artificial Sequence
  Description of Artificial Sequence: Synthetic oligonucleotide
  Antisense strand to SEQ ID NO: 1549438
ugcuucacauaauucuagc

SEQ ID NO: 1549440 - RNA, 19 nt, Artificial Sequence
  Description of Artificial Sequence: Synthetic oligonucleotide
  Sense strand starting at position 3151 of SEQ ID NO: 1245265
ggaacaaguucugcuccau

SEQ ID NO: 1549441 - RNA, 19 nt, Artificial Sequence
  Description of Artificial Sequence: Synthetic oligonucleotide
  Antisense strand to SEQ ID NO: 1549440
auggagcagaacuuguucc

SEQ ID NO: 1549442 - RNA, 19 nt, Artificial Sequence
  Description of Artificial Sequence: Synthetic oligonucleotide
  Sense strand starting at position 3300 of SEQ ID NO: 1245265
cuuugaaagcagugagauu

SEQ ID NO: 1549443 - RNA, 19 nt, Artificial Sequence
  Description of Artificial Sequence: Synthetic oligonucleotide
  Antisense strand to SEQ ID NO: 1549442
aaucucacugcuuucaaag

SEQ ID NO: 1549444 - RNA, 19 nt, Artificial Sequence
  Description of Artificial Sequence: Synthetic oligonucleotide
  Sense strand starting at position 3583 of SEQ ID NO: 1245265
aguacauugugcuugauuu

SEQ ID NO: 1549445 - RNA, 19 nt, Artificial Sequence
  Description of Artificial Sequence: Synthetic oligonucleotide
  Antisense strand to SEQ ID NO: 1549444
aaaucaagcacaauguacu

SEQ ID NO: 1549446 - RNA, 19 nt, Artificial Sequence
  Description of Artificial Sequence: Synthetic oligonucleotide
  Sense strand starting at position 3755 of SEQ ID NO: 1245265
aaacaaagugugugcuaua

SEQ ID NO: 1549447 - RNA, 19 nt, Artificial Sequence
  Description of Artificial Sequence: Synthetic oligonucleotide
  Antisense strand to SEQ ID NO: 1549446
uauagcacacacuuuguuu

SEQ ID NO: 1549448 - RNA, 19 nt, Artificial Sequence
  Description of Artificial Sequence: Synthetic oligonucleotide
  Sense strand starting at position 3760 of SEQ ID NO: 1245265
aagugugugcuauauccaa

SEQ ID NO: 1549449 - RNA, 19 nt, Artificial Sequence
  Description of Artificial Sequence: Synthetic oligonucleotide
  Antisense strand to SEQ ID NO: 1549448
uuggauauagcacacacuu

SEQ ID NO: 1549450 - RNA, 19 nt, Artificial Sequence
  Description of Artificial Sequence: Synthetic oligonucleotide
  Sense strand starting at position 3764 of SEQ ID NO: 1245265
gugugcuauauccaaggga

SEQ ID NO: 1549451 - RNA, 19 nt, Artificial Sequence
  Description of Artificial Sequence: Synthetic oligonucleotide
  Antisense strand to SEQ ID NO: 1549450
ucccuuggauauagcacac

SEQ ID NO: 1549452 - RNA, 19 nt, Artificial Sequence
  Description of Artificial Sequence: Synthetic oligonucleotide
  Sense strand starting at position 3767 of SEQ ID NO: 1245265
ugcuauauccaagggacau

SEQ ID NO: 1549453 - RNA, 19 nt, Artificial Sequence
  Description of Artificial Sequence: Synthetic oligonucleotide
  Antisense strand to SEQ ID NO: 1549452
augucccuuggauauagca

SEQ ID NO: 1549454 - RNA, 19 nt, Artificial Sequence
  Description of Artificial Sequence: Synthetic oligonucleotide
  Sense strand starting at position 3779 of SEQ ID NO: 1245265
gggacauauuuaggauauu

SEQ ID NO: 1549455 - RNA, 19 nt, Artificial Sequence
  Description of Artificial Sequence: Synthetic oligonucleotide
  Antisense strand to SEQ ID NO: 1549454
aauauccuaaauauguccc

SEQ ID NO: 1549456 - RNA, 19 nt, Artificial Sequence
  Description of Artificial Sequence: Synthetic oligonucleotide
  Sense strand starting at position 3802 of SEQ ID NO: 1245265
uaacuucugugguuugaau

SEQ ID NO: 1549457 - RNA, 19 nt, Artificial Sequence
  Description of Artificial Sequence: Synthetic oligonucleotide
  Antisense strand to SEQ ID NO: 1549456
auucaaaccacagaaguua

SEQ ID NO: 1549458 - RNA, 19 nt, Artificial Sequence
  Description of Artificial Sequence: Synthetic oligonucleotide
  Sense strand starting at position 3829 of SEQ ID NO: 1245265
cuccaagaauucuuguuga

SEQ ID NO: 1549459 - RNA, 19 nt, Artificial Sequence
  Description of Artificial Sequence: Synthetic oligonucleotide
  Antisense strand to SEQ ID NO: 1549458
ucaacaagaauucuuggag

SEQ ID NO: 1549460 - RNA, 19 nt, Artificial Sequence
  Description of Artificial Sequence: Synthetic oligonucleotide
  Sense strand starting at position 3930 of SEQ ID NO: 1245265
auggauuaauggguuagua

SEQ ID NO: 1549461 - RNA, 19 nt, Artificial Sequence
  Description of Artificial Sequence: Synthetic oligonucleotide
  Antisense strand to SEQ ID NO: 1549460
uacuaacccauuaauccau

SEQ ID NO: 1549462 - RNA, 19 nt, Artificial Sequence
  Description of Artificial Sequence: Synthetic oligonucleotide
  Sense strand starting at position 3934 of SEQ ID NO: 1245265
auuaauggguuaguagauu

SEQ ID NO: 1549463 - RNA, 19 nt, Artificial Sequence
  Description of Artificial Sequence: Synthetic oligonucleotide
  Antisense strand to SEQ ID NO: 1549462
aaucuacuaacccauuaau

SEQ ID NO: 1549464 - RNA, 19 nt, Artificial Sequence
  Description of Artificial Sequence: Synthetic oligonucleotide
  Sense strand starting at position 3945 of SEQ ID NO: 1245265
aguagauuaauggguuauc

SEQ ID NO: 1549465 - RNA, 19 nt, Artificial Sequence
  Description of Artificial Sequence: Synthetic oligonucleotide
  Antisense strand to SEQ ID NO: 1549464
gauaacccauuaaucuacu

SEQ ID NO: 1549466 - RNA, 19 nt, Artificial Sequence
  Description of Artificial Sequence: Synthetic oligonucleotide
  Sense strand starting at position 3946 of SEQ ID NO: 1245265
guagauuaauggguuauca

SEQ ID NO: 1549467 - RNA, 19 nt, Artificial Sequence
  Description of Artificial Sequence: Synthetic oligonucleotide
  Antisense strand to SEQ ID NO: 1549466
ugauaacccauuaaucuac

SEQ ID NO: 1549468 - RNA, 19 nt, Artificial Sequence
  Description of Artificial Sequence: Synthetic oligonucleotide
  Sense strand starting at position 3980 of SEQ ID NO: 1245265
ggcuuuaugcuuuauaaga

SEQ ID NO: 1549469 - RNA, 19 nt, Artificial Sequence
  Description of Artificial Sequence: Synthetic oligonucleotide
  Antisense strand to SEQ ID NO: 1549468
ucuuauaaagcauaaagcc

SEQ ID NO: 1549470 - RNA, 19 nt, Artificial Sequence
  Description of Artificial Sequence: Synthetic oligonucleotide
  Sense strand starting at position 271 of SEQ ID NO: 1245266
gcucucucacaugaagauu

SEQ ID NO: 1549471 - RNA, 19 nt, Artificial Sequence
  Description of Artificial Sequence: Synthetic oligonucleotide
  Antisense strand to SEQ ID NO: 1549470
aaucuucaugugagagagc

SEQ ID NO: 1549472 - RNA, 19 nt, Artificial Sequence
  Description of Artificial Sequence: Synthetic oligonucleotide
  Sense strand starting at position 311 of SEQ ID NO: 1245266
gauugucuauaauuggaag

SEQ ID NO: 1549473 - RNA, 19 nt, Artificial Sequence
  Description of Artificial Sequence: Synthetic oligonucleotide
  Antisense strand to SEQ ID NO: 1549472
cuuccaauuauagacaauc

SEQ ID NO: 1549474 - RNA, 19 nt, Artificial Sequence
  Description of Artificial Sequence: Synthetic oligonucleotide
  Sense strand starting at position 323 of SEQ ID NO: 1245266
uuggaagaguccuuaccag

SEQ ID NO: 1549475 - RNA, 19 nt, Artificial Sequence
  Description of Artificial Sequence: Synthetic oligonucleotide
  Antisense strand to SEQ ID NO: 1549474
cugguaaggacucuuccaa

SEQ ID NO: 1549476 - RNA, 19 nt, Artificial Sequence
  Description of Artificial Sequence: Synthetic oligonucleotide
  Sense strand starting at position 670 of SEQ ID NO: 1245266
aagguagucuaguugacau

SEQ ID NO: 1549477 - RNA, 19 nt, Artificial Sequence
  Description of Artificial Sequence: Synthetic oligonucleotide
  Antisense strand to SEQ ID NO: 1549476
augucaacuagacuaccuu

SEQ ID NO: 1549478 - RNA, 19 nt, Artificial Sequence
  Description of Artificial Sequence: Synthetic oligonucleotide
  Sense strand starting at position 672 of SEQ ID NO: 1245266
gguagucuaguugacauaa

SEQ ID NO: 1549479 - RNA, 19 nt, Artificial Sequence
  Description of Artificial Sequence: Synthetic oligonucleotide
  Antisense strand to SEQ ID NO: 1549478
uuaugucaacuagacuacc

SEQ ID NO: 1549480 - RNA, 19 nt, Artificial Sequence
  Description of Artificial Sequence: Synthetic oligonucleotide
  Sense strand starting at position 700 of SEQ ID NO: 1245266
aucacagguguuuauacua

SEQ ID NO: 1549481 - RNA, 19 nt, Artificial Sequence
  Description of Artificial Sequence: Synthetic oligonucleotide
  Antisense strand to SEQ ID NO: 1549480
uaguauaaacaccugugau

SEQ ID NO: 1549482 - RNA, 19 nt, Artificial Sequence
  Description of Artificial Sequence: Synthetic oligonucleotide
  Sense strand starting at position 909 of SEQ ID NO: 1245266
gggaaaguauaccucagua

SEQ ID NO: 1549483 - RNA, 19 nt, Artificial Sequence
  Description of Artificial Sequence: Synthetic oligonucleotide
  Antisense strand to SEQ ID NO: 1549482
uacugagguauacuuuccc

SEQ ID NO: 1549484 - RNA, 19 nt, Artificial Sequence
  Description of Artificial Sequence: Synthetic oligonucleotide
  Sense strand starting at position 913 of SEQ ID NO: 1245266
aaguauaccucaguaagga

SEQ ID NO: 1549485 - RNA, 19 nt, Artificial Sequence
  Description of Artificial Sequence: Synthetic oligonucleotide
  Antisense strand to SEQ ID NO: 1549484
uccuuacugagguauacuu

SEQ ID NO: 1549486 - RNA, 19 nt, Artificial Sequence
  Description of Artificial Sequence: Synthetic oligonucleotide
  Sense strand starting at position 2752 of SEQ ID NO: 1245266
ucaggugugccauaaccau

SEQ ID NO: 1549487 - RNA, 19 nt, Artificial Sequence
  Description of Artificial Sequence: Synthetic oligonucleotide
  Antisense strand to SEQ ID NO: 1549486
augguuauggcacaccuga

SEQ ID NO: 1549488 - RNA, 19 nt, Artificial Sequence
  Description of Artificial Sequence: Synthetic oligonucleotide
  Sense strand starting at position 2817 of SEQ ID NO: 1245266
ucuaucaucgaagacaguu

SEQ ID NO: 1549489 - RNA, 19 nt, Artificial Sequence
  Description of Artificial Sequence: Synthetic oligonucleotide
  Antisense strand to SEQ ID NO: 1549488
aacugucuucgaugauaga

SEQ ID NO: 1549490 - RNA, 19 nt, Artificial Sequence
  Description of Artificial Sequence: Synthetic oligonucleotide
  Sense strand starting at position 2952 of SEQ ID NO: 1245266
gcuagaagaaaucguauua

SEQ ID NO: 1549491 - RNA, 19 nt, Artificial Sequence
  Description of Artificial Sequence: Synthetic oligonucleotide
  Antisense strand to SEQ ID NO: 1549490
uaauacgauuucuucuagc

SEQ ID NO: 1549492 - RNA, 19 nt, Artificial Sequence
  Description of Artificial Sequence: Synthetic oligonucleotide
  Sense strand starting at position 3004 of SEQ ID NO: 1245266
uaguaugauuuagagauac

SEQ ID NO: 1549493 - RNA, 19 nt, Artificial Sequence
  Description of Artificial Sequence: Synthetic oligonucleotide
  Antisense strand to SEQ ID NO: 1549492
guaucucuaaaucauacua

SEQ ID NO: 1549494 - RNA, 19 nt, Artificial Sequence
  Description of Artificial Sequence: Synthetic oligonucleotide
  Sense strand starting at position 3069 of SEQ ID NO: 1245266
uucugaaauucugucauug

SEQ ID NO: 1549495 - RNA, 19 nt, Artificial Sequence
  Description of Artificial Sequence: Synthetic oligonucleotide
  Antisense strand to SEQ ID NO: 1549494
caaugacagaauuucagaa

SEQ ID NO: 1549496 - RNA, 19 nt, Artificial Sequence
  Description of Artificial Sequence: Synthetic oligonucleotide
  Sense strand starting at position 3099 of SEQ ID NO: 1245266
uuugauuaaaggcauggua

SEQ ID NO: 1549497 - RNA, 19 nt, Artificial Sequence
  Description of Artificial Sequence: Synthetic oligonucleotide
  Antisense strand to SEQ ID NO: 1549496
uaccaugccuuuaaucaaa

SEQ ID NO: 1549498 - RNA, 19 nt, Artificial Sequence
  Description of Artificial Sequence: Synthetic oligonucleotide
  Sense strand starting at position 3101 of SEQ ID NO: 1245266
ugauuaaaggcaugguauc

SEQ ID NO: 1549499 - RNA, 19 nt, Artificial Sequence
  Description of Artificial Sequence: Synthetic oligonucleotide
  Antisense strand to SEQ ID NO: 1549498
gauaccaugccuuuaauca

SEQ ID NO: 1549500 - RNA, 19 nt, Artificial Sequence
  Description of Artificial Sequence: Synthetic oligonucleotide
  Sense strand starting at position 3102 of SEQ ID NO: 1245266
gauuaaaggcaugguaucu

SEQ ID NO: 1549501 - RNA, 19 nt, Artificial Sequence
  Description of Artificial Sequence: Synthetic oligonucleotide
  Antisense strand to SEQ ID NO: 1549500
agauaccaugccuuuaauc

SEQ ID NO: 1549502 - RNA, 19 nt, Artificial Sequence
  Description of Artificial Sequence: Synthetic oligonucleotide
  Sense strand starting at position 3113 of SEQ ID NO: 1245266
ugguaucucccagaauauc

SEQ ID NO: 1549503 - RNA, 19 nt, Artificial Sequence
  Description of Artificial Sequence: Synthetic oligonucleotide
  Antisense strand to SEQ ID NO: 1549502
gauauucugggagauacca

SEQ ID NO: 1549504 - RNA, 19 nt, Artificial Sequence
  Description of Artificial Sequence: Synthetic oligonucleotide
  Sense strand starting at position 3123 of SEQ ID NO: 1245266
cagaauauccugugaaugu

SEQ ID NO: 1549505 - RNA, 19 nt, Artificial Sequence
  Description of Artificial Sequence: Synthetic oligonucleotide
  Antisense strand to SEQ ID NO: 1549504
acauucacaggauauucug

SEQ ID NO: 1549506 - RNA, 19 nt, Artificial Sequence
  Description of Artificial Sequence: Synthetic oligonucleotide
  Sense strand starting at position 3183 of SEQ ID NO: 1245266
uacuguguucuacaaagga

SEQ ID NO: 1549507 - RNA, 19 nt, Artificial Sequence
  Description of Artificial Sequence: Synthetic oligonucleotide
  Antisense strand to SEQ ID NO: 1549506
uccuuuguagaacacagua

SEQ ID NO: 1549508 - RNA, 19 nt, Artificial Sequence
  Description of Artificial Sequence: Synthetic oligonucleotide
  Sense strand starting at position 3199 of SEQ ID NO: 1245266
ggaggagcaucuuuaucuc

SEQ ID NO: 1549509 - RNA, 19 nt, Artificial Sequence
  Description of Artificial Sequence: Synthetic oligonucleotide
  Antisense strand to SEQ ID NO: 1549508
gagauaaagaugcuccucc

SEQ ID NO: 1549510 - RNA, 19 nt, Artificial Sequence
  Description of Artificial Sequence: Synthetic oligonucleotide
  Sense strand starting at position 3202 of SEQ ID NO: 1245266
ggagcaucuuuaucucaaa

SEQ ID NO: 1549511 - RNA, 19 nt, Artificial Sequence
  Description of Artificial Sequence: Synthetic oligonucleotide
  Antisense strand to SEQ ID NO: 1549510
uuugagauaaagaugcucc

SEQ ID NO: 1549512 - RNA, 19 nt, Artificial Sequence
  Description of Artificial Sequence: Synthetic oligonucleotide
  Sense strand starting at position 3224 of SEQ ID NO: 1245266
gcaguucuuaucgccaagu

SEQ ID NO: 1549513 - RNA, 19 nt, Artificial Sequence
  Description of Artificial Sequence: Synthetic oligonucleotide
  Antisense strand to SEQ ID NO: 1549512
acuuggcgauaagaacugc

SEQ ID NO: 1549514 - RNA, 19 nt, Artificial Sequence
  Description of Artificial Sequence: Synthetic oligonucleotide
  Sense strand starting at position 3245 of SEQ ID NO: 1245266
ucagcaucucuuuggaauu

SEQ ID NO: 1549515 - RNA, 19 nt, Artificial Sequence
  Description of Artificial Sequence: Synthetic oligonucleotide
  Antisense strand to SEQ ID NO: 1549514
aauuccaaagagaugcuga

SEQ ID NO: 1549516 - RNA, 19 nt, Artificial Sequence
  Description of Artificial Sequence: Synthetic oligonucleotide
  Sense strand starting at position 3278 of SEQ ID NO: 1245266
ucugguuccgggagcugua

SEQ ID NO: 1549517 - RNA, 19 nt, Artificial Sequence
  Description of Artificial Sequence: Synthetic oligonucleotide
  Antisense strand to SEQ ID NO: 1549516
uacagcucccggaaccaga

SEQ ID NO: 1549518 - RNA, 19 nt, Artificial Sequence
  Description of Artificial Sequence: Synthetic oligonucleotide
  Sense strand starting at position 3287 of SEQ ID NO: 1245266
gggagcuguauuugccuau

SEQ ID NO: 1549519 - RNA, 19 nt, Artificial Sequence
  Description of Artificial Sequence: Synthetic oligonucleotide
  Antisense strand to SEQ ID NO: 1549518
auaggcaaauacagcuccc

SEQ ID NO: 1549520 - RNA, 19 nt, Artificial Sequence
  Description of Artificial Sequence: Synthetic oligonucleotide
  Sense strand starting at position 3290 of SEQ ID NO: 1245266
agcuguauuugccuaucuu

SEQ ID NO: 1549521 - RNA, 19 nt, Artificial Sequence
  Description of Artificial Sequence: Synthetic oligonucleotide
  Antisense strand to SEQ ID NO: 1549520
aagauaggcaaauacagcu

SEQ ID NO: 1549522 - RNA, 19 nt, Artificial Sequence
  Description of Artificial Sequence: Synthetic oligonucleotide
  Sense strand starting at position 3291 of SEQ ID NO: 1245266
gcuguauuugccuaucuua

SEQ ID NO: 1549523 - RNA, 19 nt, Artificial Sequence
  Description of Artificial Sequence: Synthetic oligonucleotide
  Antisense strand to SEQ ID NO: 1549522
uaagauaggcaaauacagc

SEQ ID NO: 1549524 - RNA, 19 nt, Artificial Sequence
  Description of Artificial Sequence: Synthetic oligonucleotide
  Sense strand starting at position 3294 of SEQ ID NO: 1245266
guauuugccuaucuuaguu

SEQ ID NO: 1549525 - RNA, 19 nt, Artificial Sequence
  Description of Artificial Sequence: Synthetic oligonucleotide
  Antisense strand to SEQ ID NO: 1549524
aacuaagauaggcaaauac

SEQ ID NO: 1549526 - RNA, 19 nt, Artificial Sequence
  Description of Artificial Sequence: Synthetic oligonucleotide
  Sense strand starting at position 3447 of SEQ ID NO: 1245266
ccaggagacuacuuaagca

SEQ ID NO: 1549527 - RNA, 19 nt, Artificial Sequence
  Description of Artificial Sequence: Synthetic oligonucleotide
  Antisense strand to SEQ ID NO: 1549526
ugcuuaaguagucuccugg

SEQ ID NO: 1549528 - RNA, 19 nt, Artificial Sequence
  Description of Artificial Sequence: Synthetic oligonucleotide
  Sense strand starting at position 3501 of SEQ ID NO: 1245266
ugagaaugauugcuccaga

SEQ ID NO: 1549529 - RNA, 19 nt, Artificial Sequence
  Description of Artificial Sequence: Synthetic oligonucleotide
  Antisense strand to SEQ ID NO: 1549528
ucuggagcaaucauucuca

SEQ ID NO: 1549530 - RNA, 19 nt, Artificial Sequence
  Description of Artificial Sequence: Synthetic oligonucleotide
  Sense strand starting at position 3502 of SEQ ID NO: 1245266
gagaaugauugcuccagaa

SEQ ID NO: 1549531 - RNA, 19 nt, Artificial Sequence
  Description of Artificial Sequence: Synthetic oligonucleotide
  Antisense strand to SEQ ID NO: 1549530
uucuggagcaaucauucuc

SEQ ID NO: 1549532 - RNA, 19 nt, Artificial Sequence
  Description of Artificial Sequence: Synthetic oligonucleotide
  Sense strand starting at position 3601 of SEQ ID NO: 1245266
aagauaugacuuggucucu

SEQ ID NO: 1549533 - RNA, 19 nt, Artificial Sequence
  Description of Artificial Sequence: Synthetic oligonucleotide
  Antisense strand to SEQ ID NO: 1549532
agagaccaagucauaucuu

SEQ ID NO: 1549534 - RNA, 19 nt, Artificial Sequence
  Description of Artificial Sequence: Synthetic oligonucleotide
  Sense strand starting at position 3614 of SEQ ID NO: 1245266
gucucuccgacauauguga

SEQ ID NO: 1549535 - RNA, 19 nt, Artificial Sequence
  Description of Artificial Sequence: Synthetic oligonucleotide
  Antisense strand to SEQ ID NO: 1549534
ucacauaugucggagagac

SEQ ID NO: 1549536 - RNA, 19 nt, Artificial Sequence
  Description of Artificial Sequence: Synthetic oligonucleotide
  Sense strand starting at position 3621 of SEQ ID NO: 1245266
cgacauaugugacucccaa

SEQ ID NO: 1549537 - RNA, 19 nt, Artificial Sequence
  Description of Artificial Sequence: Synthetic oligonucleotide
  Antisense strand to SEQ ID NO: 1549536
uugggagucacauaugucg

SEQ ID NO: 1549538 - RNA, 19 nt, Artificial Sequence
  Description of Artificial Sequence: Synthetic oligonucleotide
  Sense strand starting at position 3773 of SEQ ID NO: 1245266
cuuugauaguaggcauacu

SEQ ID NO: 1549539 - RNA, 19 nt, Artificial Sequence
  Description of Artificial Sequence: Synthetic oligonucleotide
  Antisense strand to SEQ ID NO: 1549538
aguaugccuacuaucaaag

SEQ ID NO: 1549540 - RNA, 19 nt, Artificial Sequence
  Description of Artificial Sequence: Synthetic oligonucleotide
  Sense strand starting at position 3797 of SEQ ID NO: 1245266
gugcauacuguuuauauau

SEQ ID NO: 1549541 - RNA, 19 nt, Artificial Sequence
  Description of Artificial Sequence: Synthetic oligonucleotide
  Antisense strand to SEQ ID NO: 1549540
auauauaaacaguaugcac

SEQ ID NO: 1549542 - RNA, 19 nt, Artificial Sequence
  Description of Artificial Sequence: Synthetic oligonucleotide
  Sense strand starting at position 3945 of SEQ ID NO: 1245266
acagauaaugcuuggugga

SEQ ID NO: 1549543 - RNA, 19 nt, Artificial Sequence
  Description of Artificial Sequence: Synthetic oligonucleotide
  Antisense strand to SEQ ID NO: 1549542
uccaccaagcauuaucugu

SEQ ID NO: 1549544 - RNA, 19 nt, Artificial Sequence
  Description of Artificial Sequence: Synthetic oligonucleotide
  Sense strand starting at position 3946 of SEQ ID NO: 1245266
cagauaaugcuugguggau

SEQ ID NO: 1549545 - RNA, 19 nt, Artificial Sequence
  Description of Artificial Sequence: Synthetic oligonucleotide
  Antisense strand to SEQ ID NO: 1549544
auccaccaagcauuaucug

SEQ ID NO: 1549546 - RNA, 19 nt, Artificial Sequence
  Description of Artificial Sequence: Synthetic oligonucleotide
  Sense strand starting at position 3947 of SEQ ID NO: 1245266
agauaaugcuugguggauu

SEQ ID NO: 1549547 - RNA, 19 nt, Artificial Sequence
  Description of Artificial Sequence: Synthetic oligonucleotide
  Antisense strand to SEQ ID NO: 1549546
aauccaccaagcauuaucu

SEQ ID NO: 1549548 - RNA, 19 nt, Artificial Sequence
  Description of Artificial Sequence: Synthetic oligonucleotide
  Sense strand starting at position 3950 of SEQ ID NO: 1245266
uaaugcuugguggauuaca

SEQ ID NO: 1549549 - RNA, 19 nt, Artificial Sequence
  Description of Artificial Sequence: Synthetic oligonucleotide
  Antisense strand to SEQ ID NO: 1549548
uguaauccaccaagcauua

SEQ ID NO: 1549550 - RNA, 19 nt, Artificial Sequence
  Description of Artificial Sequence: Synthetic oligonucleotide
  Sense strand starting at position 187 of SEQ ID NO: 1245267
gcucuuuacuguuuaugaa

SEQ ID NO: 1549551 - RNA, 19 nt, Artificial Sequence
  Description of Artificial Sequence: Synthetic oligonucleotide
  Antisense strand to SEQ ID NO: 1549550
uucauaaacaguaaagagc

SEQ ID NO: 1549552 - RNA, 19 nt, Artificial Sequence
  Description of Artificial Sequence: Synthetic oligonucleotide
  Sense strand starting at position 353 of SEQ ID NO: 1245267
gcauguggaccuuaaugaa

SEQ ID NO: 1549553 - RNA, 19 nt, Artificial Sequence
  Description of Artificial Sequence: Synthetic oligonucleotide
  Antisense strand to SEQ ID NO: 1549552
uucauuaagguccacaugc

SEQ ID NO: 1549554 - RNA, 19 nt, Artificial Sequence
  Description of Artificial Sequence: Synthetic oligonucleotide
  Sense strand starting at position 401 of SEQ ID NO: 1245267
gugcaaaugggccagcauu

SEQ ID NO: 1549555 - RNA, 19 nt, Artificial Sequence
  Description of Artificial Sequence: Synthetic oligonucleotide
  Antisense strand to SEQ ID NO: 1549554
aaugcuggcccauuugcac

SEQ ID NO: 1549556 - RNA, 19 nt, Artificial Sequence
  Description of Artificial Sequence: Synthetic oligonucleotide
  Sense strand starting at position 432 of SEQ ID NO: 1245267
accugugucacccagguaa

SEQ ID NO: 1549557 - RNA, 19 nt, Artificial Sequence
  Description of Artificial Sequence: Synthetic oligonucleotide
  Antisense strand to SEQ ID NO: 1549556
uuaccugggugacacaggu

SEQ ID NO: 1549558 - RNA, 19 nt, Artificial Sequence
  Description of Artificial Sequence: Synthetic oligonucleotide
  Sense strand starting at position 434 of SEQ ID NO: 1245267
cugugucacccagguaaua

SEQ ID NO: 1549559 - RNA, 19 nt, Artificial Sequence
  Description of Artificial Sequence: Synthetic oligonucleotide
  Antisense strand to SEQ ID NO: 1549558
uauuaccugggugacacag

SEQ ID NO: 1549560 - RNA, 19 nt, Artificial Sequence
  Description of Artificial Sequence: Synthetic oligonucleotide
  Sense strand starting at position 452 of SEQ ID NO: 1245267
aaaggucauccugguugua

SEQ ID NO: 1549561 - RNA, 19 nt, Artificial Sequence
  Description of Artificial Sequence: Synthetic oligonucleotide
  Antisense strand to SEQ ID NO: 1549560
uacaaccaggaugaccuuu

SEQ ID NO: 1549562 - RNA, 19 nt, Artificial Sequence
  Description of Artificial Sequence: Synthetic oligonucleotide
  Sense strand starting at position 454 of SEQ ID NO: 1245267
aggucauccugguuguaaa

SEQ ID NO: 1549563 - RNA, 19 nt, Artificial Sequence
  Description of Artificial Sequence: Synthetic oligonucleotide
  Antisense strand to SEQ ID NO: 1549562
uuuacaaccaggaugaccu

SEQ ID NO: 1549564 - RNA, 19 nt, Artificial Sequence
  Description of Artificial Sequence: Synthetic oligonucleotide
  Sense strand starting at position 455 of SEQ ID NO: 1245267
ggucauccugguuguaaac

SEQ ID NO: 1549565 - RNA, 19 nt, Artificial Sequence
  Description of Artificial Sequence: Synthetic oligonucleotide
  Antisense strand to SEQ ID NO: 1549564
guuuacaaccaggaugacc

SEQ ID NO: 1549566 - RNA, 19 nt, Artificial Sequence
  Description of Artificial Sequence: Synthetic oligonucleotide
  Sense strand starting at position 2315 of SEQ ID NO: 1245267
ucacgagccgcgaguaguu

SEQ ID NO: 1549567 - RNA, 19 nt, Artificial Sequence
  Description of Artificial Sequence: Synthetic oligonucleotide
  Antisense strand to SEQ ID NO: 1549566
aacuacucgcggcucguga

SEQ ID NO: 1549568 - RNA, 19 nt, Artificial Sequence
  Description of Artificial Sequence: Synthetic oligonucleotide
  Sense strand starting at position 2782 of SEQ ID NO: 1245267
ggacauaacccgugguuuc

SEQ ID NO: 1549569 - RNA, 19 nt, Artificial Sequence
  Description of Artificial Sequence: Synthetic oligonucleotide
  Antisense strand to SEQ ID NO: 1549568
gaaaccacggguuaugucc

SEQ ID NO: 1549570 - RNA, 19 nt, Artificial Sequence
  Description of Artificial Sequence: Synthetic oligonucleotide
  Sense strand starting at position 2783 of SEQ ID NO: 1245267
gacauaacccgugguuucu

SEQ ID NO: 1549571 - RNA, 19 nt, Artificial Sequence
  Description of Artificial Sequence: Synthetic oligonucleotide
  Antisense strand to SEQ ID NO: 1549570
agaaaccacggguuauguc

SEQ ID NO: 1549572 - RNA, 19 nt, Artificial Sequence
  Description of Artificial Sequence: Synthetic oligonucleotide
  Sense strand starting at position 2809 of SEQ ID NO: 1245267
gugcaaagugcugagaaac

SEQ ID NO: 1549573 - RNA, 19 nt, Artificial Sequence
  Description of Artificial Sequence: Synthetic oligonucleotide
  Antisense strand to SEQ ID NO: 1549572
guuucucagcacuuugcac

SEQ ID NO: 1549574 - RNA, 19 nt, Artificial Sequence
  Description of Artificial Sequence: Synthetic oligonucleotide
  Sense strand starting at position 2848 of SEQ ID NO: 1245267
gggugaaucaaguaauguc

SEQ ID NO: 1549575 - RNA, 19 nt, Artificial Sequence
  Description of Artificial Sequence: Synthetic oligonucleotide
  Antisense strand to SEQ ID NO: 1549574
gacauuacuugauucaccc

SEQ ID NO: 1549576 - RNA, 19 nt, Artificial Sequence
  Description of Artificial Sequence: Synthetic oligonucleotide
  Sense strand starting at position 2891 of SEQ ID NO: 1245267
uugggucugagugaauuaa

SEQ ID NO: 1549577 - RNA, 19 nt, Artificial Sequence
  Description of Artificial Sequence: Synthetic oligonucleotide
  Antisense strand to SEQ ID NO: 1549576
uuaauucacucagacccaa

SEQ ID NO: 1549578 - RNA, 19 nt, Artificial Sequence
  Description of Artificial Sequence: Synthetic oligonucleotide
  Sense strand starting at position 2980 of SEQ ID NO: 1245267
uucuaucuuccagggaaua

SEQ ID NO: 1549579 - RNA, 19 nt, Artificial Sequence
  Description of Artificial Sequence: Synthetic oligonucleotide
  Antisense strand to SEQ ID NO: 1549578
uauucccuggaagauagaa

SEQ ID NO: 1549580 - RNA, 19 nt, Artificial Sequence
  Description of Artificial Sequence: Synthetic oligonucleotide
  Sense strand starting at position 2981 of SEQ ID NO: 1245267
ucuaucuuccagggaauaa

SEQ ID NO: 1549581 - RNA, 19 nt, Artificial Sequence
  Description of Artificial Sequence: Synthetic oligonucleotide
  Antisense strand to SEQ ID NO: 1549580
uuauucccuggaagauaga

SEQ ID NO: 1549582 - RNA, 19 nt, Artificial Sequence
  Description of Artificial Sequence: Synthetic oligonucleotide
  Sense strand starting at position 3077 of SEQ ID NO: 1245267
agguuaaauuaggaaccaa

SEQ ID NO: 1549583 - RNA, 19 nt, Artificial Sequence
  Description of Artificial Sequence: Synthetic oligonucleotide
  Antisense strand to SEQ ID NO: 1549582
uugguuccuaauuuaaccu

SEQ ID NO: 1549584 - RNA, 19 nt, Artificial Sequence
  Description of Artificial Sequence: Synthetic oligonucleotide
  Sense strand starting at position 3111 of SEQ ID NO: 1245267
ggguucuagcaaugauucu

SEQ ID NO: 1549585 - RNA, 19 nt, Artificial Sequence
  Description of Artificial Sequence: Synthetic oligonucleotide
  Antisense strand to SEQ ID NO: 1549584
agaaucauugcuagaaccc

SEQ ID NO: 1549586 - RNA, 19 nt, Artificial Sequence
  Description of Artificial Sequence: Synthetic oligonucleotide
  Sense strand starting at position 3120 of SEQ ID NO: 1245267
caaugauucuggcuagaag

SEQ ID NO: 1549587 - RNA, 19 nt, Artificial Sequence
  Description of Artificial Sequence: Synthetic oligonucleotide
  Antisense strand to SEQ ID NO: 1549586
cuucuagccagaaucauug

SEQ ID NO: 1549588 - RNA, 19 nt, Artificial Sequence
  Description of Artificial Sequence: Synthetic oligonucleotide
  Sense strand starting at position 3136 of SEQ ID NO: 1245267
aaggcaaaccggugauaca

SEQ ID NO: 1549589 - RNA, 19 nt, Artificial Sequence
  Description of Artificial Sequence: Synthetic oligonucleotide
  Antisense strand to SEQ ID NO: 1549588
uguaucaccgguuugccuu

SEQ ID NO: 1549590 - RNA, 19 nt, Artificial Sequence
  Description of Artificial Sequence: Synthetic oligonucleotide
  Sense strand starting at position 3342 of SEQ ID NO: 1245267
cuagaagacuugccuuuag

SEQ ID NO: 1549591 - RNA, 19 nt, Artificial Sequence
  Description of Artificial Sequence: Synthetic oligonucleotide
  Antisense strand to SEQ ID NO: 1549590
cuaaaggcaagucuucuag

SEQ ID NO: 1549592 - RNA, 19 nt, Artificial Sequence
  Description of Artificial Sequence: Synthetic oligonucleotide
  Sense strand starting at position 3393 of SEQ ID NO: 1245267
guccacuuacuagauacuu

SEQ ID NO: 1549593 - RNA, 19 nt, Artificial Sequence
  Description of Artificial Sequence: Synthetic oligonucleotide
  Antisense strand to SEQ ID NO: 1549592
aaguaucuaguaaguggac

SEQ ID NO: 1549594 - RNA, 19 nt, Artificial Sequence
  Description of Artificial Sequence: Synthetic oligonucleotide
  Sense strand starting at position 3415 of SEQ ID NO: 1245267
agaccugcucuuuagaagu

SEQ ID NO: 1549595 - RNA, 19 nt, Artificial Sequence
  Description of Artificial Sequence: Synthetic oligonucleotide
  Antisense strand to SEQ ID NO: 1549594
acuucuaaagagcaggucu

SEQ ID NO: 1549596 - RNA, 19 nt, Artificial Sequence
  Description of Artificial Sequence: Synthetic oligonucleotide
  Sense strand starting at position 3453 of SEQ ID NO: 1245267
uuguuaauaugagcuuaca

SEQ ID NO: 1549597 - RNA, 19 nt, Artificial Sequence
  Description of Artificial Sequence: Synthetic oligonucleotide
  Antisense strand to SEQ ID NO: 1549596
uguaagcucauauuaacaa

SEQ ID NO: 1549598 - RNA, 19 nt, Artificial Sequence
  Description of Artificial Sequence: Synthetic oligonucleotide
  Sense strand starting at position 3456 of SEQ ID NO: 1245267
uuaauaugagcuuacauug

SEQ ID NO: 1549599 - RNA, 19 nt, Artificial Sequence
  Description of Artificial Sequence: Synthetic oligonucleotide
  Antisense strand to SEQ ID NO: 1549598
caauguaagcucauauuaa

SEQ ID NO: 1549600 - RNA, 19 nt, Artificial Sequence
  Description of Artificial Sequence: Synthetic oligonucleotide
  Sense strand starting at position 3489 of SEQ ID NO: 1245267
ccaacuaugugcuuaugga

SEQ ID NO: 1549601 - RNA, 19 nt, Artificial Sequence
  Description of Artificial Sequence: Synthetic oligonucleotide
  Antisense strand to SEQ ID NO: 1549600
uccauaagcacauaguugg

SEQ ID NO: 1549602 - RNA, 19 nt, Artificial Sequence
  Description of Artificial Sequence: Synthetic oligonucleotide
  Sense strand starting at position 3490 of SEQ ID NO: 1245267
caacuaugugcuuauggaa

SEQ ID NO: 1549603 - RNA, 19 nt, Artificial Sequence
  Description of Artificial Sequence: Synthetic oligonucleotide
  Antisense strand to SEQ ID NO: 1549602
uuccauaagcacauaguug

SEQ ID NO: 1549604 - RNA, 19 nt, Artificial Sequence
  Description of Artificial Sequence: Synthetic oligonucleotide
  Sense strand starting at position 3505 of SEQ ID NO: 1245267
ggaaccuuaucuuuaauug

SEQ ID NO: 1549605 - RNA, 19 nt, Artificial Sequence
  Description of Artificial Sequence: Synthetic oligonucleotide
  Antisense strand to SEQ ID NO: 1549604
caauuaaagauaagguucc

SEQ ID NO: 1549606 - RNA, 19 nt, Artificial Sequence
  Description of Artificial Sequence: Synthetic oligonucleotide
  Sense strand starting at position 3534 of SEQ ID NO: 1245267
auugaaaucucagaaagga

SEQ ID NO: 1549607 - RNA, 19 nt, Artificial Sequence
  Description of Artificial Sequence: Synthetic oligonucleotide
  Antisense strand to SEQ ID NO: 1549606
uccuuucugagauuucaau

SEQ ID NO: 1549608 - RNA, 19 nt, Artificial Sequence
  Description of Artificial Sequence: Synthetic oligonucleotide
  Sense strand starting at position 3572 of SEQ ID NO: 1245267
gcaagugaggauggucaaa

SEQ ID NO: 1549609 - RNA, 19 nt, Artificial Sequence
  Description of Artificial Sequence: Synthetic oligonucleotide
  Antisense strand to SEQ ID NO: 1549608
uuugaccauccucacuugc

SEQ ID NO: 1549610 - RNA, 19 nt, Artificial Sequence
  Description of Artificial Sequence: Synthetic oligonucleotide
  Sense strand starting at position 3574 of SEQ ID NO: 1245267
aagugaggauggucaaauc

SEQ ID NO: 1549611 - RNA, 19 nt, Artificial Sequence
  Description of Artificial Sequence: Synthetic oligonucleotide
  Antisense strand to SEQ ID NO: 1549610
gauuugaccauccucacuu

SEQ ID NO: 1549612 - RNA, 19 nt, Artificial Sequence
  Description of Artificial Sequence: Synthetic oligonucleotide
  Sense strand starting at position 3614 of SEQ ID NO: 1245267
ugauguacuuguguucuau

SEQ ID NO: 1549613 - RNA, 19 nt, Artificial Sequence
  Description of Artificial Sequence: Synthetic oligonucleotide
  Antisense strand to SEQ ID NO: 1549612
auagaacacaaguacauca

SEQ ID NO: 1549614 - RNA, 19 nt, Artificial Sequence
  Description of Artificial Sequence: Synthetic oligonucleotide
  Sense strand starting at position 3616 of SEQ ID NO: 1245267
auguacuuguguucuauac

SEQ ID NO: 1549615 - RNA, 19 nt, Artificial Sequence
  Description of Artificial Sequence: Synthetic oligonucleotide
  Antisense strand to SEQ ID NO: 1549614
guauagaacacaaguacau

SEQ ID NO: 1549616 - RNA, 19 nt, Artificial Sequence
  Description of Artificial Sequence: Synthetic oligonucleotide
  Sense strand starting at position 3620 of SEQ ID NO: 1245267
acuuguguucuauacugca

SEQ ID NO: 1549617 - RNA, 19 nt, Artificial Sequence
  Description of Artificial Sequence: Synthetic oligonucleotide
  Antisense strand to SEQ ID NO: 1549616
ugcaguauagaacacaagu

SEQ ID NO: 1549618 - RNA, 19 nt, Artificial Sequence
  Description of Artificial Sequence: Synthetic oligonucleotide
  Sense strand starting at position 3669 of SEQ ID NO: 1245267
uaggcuuuccaauggaguu

SEQ ID NO: 1549619 - RNA, 19 nt, Artificial Sequence
  Description of Artificial Sequence: Synthetic oligonucleotide
  Antisense strand to SEQ ID NO: 1549618
aacuccauuggaaagccua

SEQ ID NO: 1549620 - RNA, 19 nt, Artificial Sequence
  Description of Artificial Sequence: Synthetic oligonucleotide
  Sense strand starting at position 3670 of SEQ ID NO: 1245267
aggcuuuccaauggaguuu

SEQ ID NO: 1549621 - RNA, 19 nt, Artificial Sequence
  Description of Artificial Sequence: Synthetic oligonucleotide
  Antisense strand to SEQ ID NO: 1549620
aaacuccauuggaaagccu

SEQ ID NO: 1549622 - RNA, 19 nt, Artificial Sequence
  Description of Artificial Sequence: Synthetic oligonucleotide
  Sense strand starting at position 3763 of SEQ ID NO: 1245267
ucuuuaaauuaggugaagu

SEQ ID NO: 1549623 - RNA, 19 nt, Artificial Sequence
  Description of Artificial Sequence: Synthetic oligonucleotide
  Antisense strand to SEQ ID NO: 1549622
acuucaccuaauuuaaaga

SEQ ID NO: 1549624 - RNA, 19 nt, Artificial Sequence
  Description of Artificial Sequence: Synthetic oligonucleotide
  Sense strand starting at position 3865 of SEQ ID NO: 1245267
gugcuaaguacuggagguu

SEQ ID NO: 1549625 - RNA, 19 nt, Artificial Sequence
  Description of Artificial Sequence: Synthetic oligonucleotide
  Antisense strand to SEQ ID NO: 1549624
aaccuccaguacuuagcac

SEQ ID NO: 1549626 - RNA, 19 nt, Artificial Sequence
  Description of Artificial Sequence: Synthetic oligonucleotide
  Sense strand starting at position 3871 of SEQ ID NO: 1245267
aguacuggagguugucuua

SEQ ID NO: 1549627 - RNA, 19 nt, Artificial Sequence
  Description of Artificial Sequence: Synthetic oligonucleotide
  Antisense strand to SEQ ID NO: 1549626
uaagacaaccuccaguacu

SEQ ID NO: 1549628 - RNA, 19 nt, Artificial Sequence
  Description of Artificial Sequence: Synthetic oligonucleotide
  Sense strand starting at position 3913 of SEQ ID NO: 1245267
ccuggagguuaggauuuaa

SEQ ID NO: 1549629 - RNA, 19 nt, Artificial Sequence
  Description of Artificial Sequence: Synthetic oligonucleotide
  Antisense strand to SEQ ID NO: 1549628
uuaaauccuaaccuccagg

SEQ ID NO: 1549630 - RNA, 19 nt, Artificial Sequence
  Description of Artificial Sequence: Synthetic oligonucleotide
  Sense strand starting at position 207 of SEQ ID NO: 1245268
cccuguacucugcaugauc

SEQ ID NO: 1549631 - RNA, 19 nt, Artificial Sequence
  Description of Artificial Sequence: Synthetic oligonucleotide
  Antisense strand to SEQ ID NO: 1549630
gaucaugcagaguacaggg

SEQ ID NO: 1549632 - RNA, 19 nt, Artificial Sequence
  Description of Artificial Sequence: Synthetic oligonucleotide
  Sense strand starting at position 210 of SEQ ID NO: 1245268
uguacucugcaugauccaa

SEQ ID NO: 1549633 - RNA, 19 nt, Artificial Sequence
  Description of Artificial Sequence: Synthetic oligonucleotide
  Antisense strand to SEQ ID NO: 1549632
uuggaucaugcagaguaca

SEQ ID NO: 1549634 - RNA, 19 nt, Artificial Sequence
  Description of Artificial Sequence: Synthetic oligonucleotide
  Sense strand starting at position 503 of SEQ ID NO: 1245268
uggaacuaccacugguuau

SEQ ID NO: 1549635 - RNA, 19 nt, Artificial Sequence
  Description of Artificial Sequence: Synthetic oligonucleotide
  Antisense strand to SEQ ID NO: 1549634
auaaccagugguaguucca

SEQ ID NO: 1549636 - RNA, 19 nt, Artificial Sequence
  Description of Artificial Sequence: Synthetic oligonucleotide
  Sense strand starting at position 574 of SEQ ID NO: 1245268
ucuccugacuacucaguuu

SEQ ID NO: 1549637 - RNA, 19 nt, Artificial Sequence
  Description of Artificial Sequence: Synthetic oligonucleotide
  Antisense strand to SEQ ID NO: 1549636
aaacugaguagucaggaga

SEQ ID NO: 1549638 - RNA, 19 nt, Artificial Sequence
  Description of Artificial Sequence: Synthetic oligonucleotide
  Sense strand starting at position 621 of SEQ ID NO: 1245268
cuuccuaucacggaaguga

SEQ ID NO: 1549639 - RNA, 19 nt, Artificial Sequence
  Description of Artificial Sequence: Synthetic oligonucleotide
  Antisense strand to SEQ ID NO: 1549638
ucacuuccgugauaggaag

SEQ ID NO: 1549640 - RNA, 19 nt, Artificial Sequence
  Description of Artificial Sequence: Synthetic oligonucleotide
  Sense strand starting at position 632 of SEQ ID NO: 1245268
ggaagugacugcccuuuau

SEQ ID NO: 1549641 - RNA, 19 nt, Artificial Sequence
  Description of Artificial Sequence: Synthetic oligonucleotide
  Antisense strand to SEQ ID NO: 1549640
auaaagggcagucacuucc

SEQ ID NO: 1549642 - RNA, 19 nt, Artificial Sequence
  Description of Artificial Sequence: Synthetic oligonucleotide
  Sense strand starting at position 741 of SEQ ID NO: 1245268
ugucaaguccucuaagcau

SEQ ID NO: 1549643 - RNA, 19 nt, Artificial Sequence
  Description of Artificial Sequence: Synthetic oligonucleotide
  Antisense strand to SEQ ID NO: 1549642
augcuuagaggacuugaca

SEQ ID NO: 1549644 - RNA, 19 nt, Artificial Sequence
  Description of Artificial Sequence: Synthetic oligonucleotide
  Sense strand starting at position 747 of SEQ ID NO: 1245268
guccucuaagcaugacuua

SEQ ID NO: 1549645 - RNA, 19 nt, Artificial Sequence
  Description of Artificial Sequence: Synthetic oligonucleotide
  Antisense strand to SEQ ID NO: 1549644
uaagucaugcuuagaggac

SEQ ID NO: 1549646 - RNA, 19 nt, Artificial Sequence
  Description of Artificial Sequence: Synthetic oligonucleotide
  Sense strand starting at position 873 of SEQ ID NO: 1245268
gcgguacuggaggaaucaa

SEQ ID NO: 1549647 - RNA, 19 nt, Artificial Sequence
  Description of Artificial Sequence: Synthetic oligonucleotide
  Antisense strand to SEQ ID NO: 1549646
uugauuccuccaguaccgc

SEQ ID NO: 1549648 - RNA, 19 nt, Artificial Sequence
  Description of Artificial Sequence: Synthetic oligonucleotide
  Sense strand starting at position 914 of SEQ ID NO: 1245268
guuguuugaggucauggau

SEQ ID NO: 1549649 - RNA, 19 nt, Artificial Sequence
  Description of Artificial Sequence: Synthetic oligonucleotide
  Antisense strand to SEQ ID NO: 1549648
auccaugaccucaaacaac

SEQ ID NO: 1549650 - RNA, 19 nt, Artificial Sequence
  Description of Artificial Sequence: Synthetic oligonucleotide
  Sense strand starting at position 917 of SEQ ID NO: 1245268
guuugaggucauggauaaa

SEQ ID NO: 1549651 - RNA, 19 nt, Artificial Sequence
  Description of Artificial Sequence: Synthetic oligonucleotide
  Antisense strand to SEQ ID NO: 1549650
uuuauccaugaccucaaac

SEQ ID NO: 1549652 - RNA, 19 nt, Artificial Sequence
  Description of Artificial Sequence: Synthetic oligonucleotide
  Sense strand starting at position 966 of SEQ ID NO: 1245268
cggcuagcacgagaaacuu

SEQ ID NO: 1549653 - RNA, 19 nt, Artificial Sequence
  Description of Artificial Sequence: Synthetic oligonucleotide
  Antisense strand to SEQ ID NO: 1549652
aaguuucucgugcuagccg

SEQ ID NO: 1549654 - RNA, 19 nt, Artificial Sequence
  Description of Artificial Sequence: Synthetic oligonucleotide
  Sense strand starting at position 972 of SEQ ID NO: 1245268
gcacgagaaacuuacugua

SEQ ID NO: 1549655 - RNA, 19 nt, Artificial Sequence
  Description of Artificial Sequence: Synthetic oligonucleotide
  Antisense strand to SEQ ID NO: 1549654
uacaguaaguuucucgugc

SEQ ID NO: 1549656 - RNA, 19 nt, Artificial Sequence
  Description of Artificial Sequence: Synthetic oligonucleotide
  Sense strand starting at position 974 of SEQ ID NO: 1245268
acgagaaacuuacuguagu

SEQ ID NO: 1549657 - RNA, 19 nt, Artificial Sequence
  Description of Artificial Sequence: Synthetic oligonucleotide
  Antisense strand to SEQ ID NO: 1549656
acuacaguaaguuucucgu

SEQ ID NO: 1549658 - RNA, 19 nt, Artificial Sequence
  Description of Artificial Sequence: Synthetic oligonucleotide
  Sense strand starting at position 1008 of SEQ ID NO: 1245268
cuccauaggugacuuuaaa

SEQ ID NO: 1549659 - RNA, 19 nt, Artificial Sequence
  Description of Artificial Sequence: Synthetic oligonucleotide
  Antisense strand to SEQ ID NO: 1549658
uuuaaagucaccuauggag

SEQ ID NO: 1549660 - RNA, 19 nt, Artificial Sequence
  Description of Artificial Sequence: Synthetic oligonucleotide
  Sense strand starting at position 2311 of SEQ ID NO: 1245268
acaagaaacuuaguguggu

SEQ ID NO: 1549661 - RNA, 19 nt, Artificial Sequence
  Description of Artificial Sequence: Synthetic oligonucleotide
  Antisense strand to SEQ ID NO: 1549660
accacacuaaguuucuugu

SEQ ID NO: 1549662 - RNA, 19 nt, Artificial Sequence
  Description of Artificial Sequence: Synthetic oligonucleotide
  Sense strand starting at position 2800 of SEQ ID NO: 1245268
caaacagugcgagaagauu

SEQ ID NO: 1549663 - RNA, 19 nt, Artificial Sequence
  Description of Artificial Sequence: Synthetic oligonucleotide
  Antisense strand to SEQ ID NO: 1549662
aaucuucucgcacuguuug

SEQ ID NO: 1549664 - RNA, 19 nt, Artificial Sequence
  Description of Artificial Sequence: Synthetic oligonucleotide
  Sense strand starting at position 2806 of SEQ ID NO: 1245268
gugcgagaagauugaaacu

SEQ ID NO: 1549665 - RNA, 19 nt, Artificial Sequence
  Description of Artificial Sequence: Synthetic oligonucleotide
  Antisense strand to SEQ ID NO: 1549664
aguuucaaucuucucgcac

SEQ ID NO: 1549666 - RNA, 19 nt, Artificial Sequence
  Description of Artificial Sequence: Synthetic oligonucleotide
  Sense strand starting at position 2858 of SEQ ID NO: 1245268
cauuucuguuuggaaggau

SEQ ID NO: 1549667 - RNA, 19 nt, Artificial Sequence
  Description of Artificial Sequence: Synthetic oligonucleotide
  Antisense strand to SEQ ID NO: 1549666
auccuuccaaacagaaaug

SEQ ID NO: 1549668 - RNA, 19 nt, Artificial Sequence
  Description of Artificial Sequence: Synthetic oligonucleotide
  Sense strand starting at position 2898 of SEQ ID NO: 1245268
gcugauuccuugccagaga

SEQ ID NO: 1549669 - RNA, 19 nt, Artificial Sequence
  Description of Artificial Sequence: Synthetic oligonucleotide
  Antisense strand to SEQ ID NO: 1549668
ucucuggcaaggaaucagc

SEQ ID NO: 1549670 - RNA, 19 nt, Artificial Sequence
  Description of Artificial Sequence: Synthetic oligonucleotide
  Sense strand starting at position 2909 of SEQ ID NO: 1245268
gccagagauuuguuuagca

SEQ ID NO: 1549671 - RNA, 19 nt, Artificial Sequence
  Description of Artificial Sequence: Synthetic oligonucleotide
  Antisense strand to SEQ ID NO: 1549670
ugcuaaacaaaucucuggc

SEQ ID NO: 1549672 - RNA, 19 nt, Artificial Sequence
  Description of Artificial Sequence: Synthetic oligonucleotide
  Sense strand starting at position 2925 of SEQ ID NO: 1245268
gcaaauuccucagcuugaa

SEQ ID NO: 1549673 - RNA, 19 nt, Artificial Sequence
  Description of Artificial Sequence: Synthetic oligonucleotide
  Antisense strand to SEQ ID NO: 1549672
uucaagcugaggaauuugc

SEQ ID NO: 1549674 - RNA, 19 nt, Artificial Sequence
  Description of Artificial Sequence: Synthetic oligonucleotide
  Sense strand starting at position 3000 of SEQ ID NO: 1245268
gaaugaucacguuacccac

SEQ ID NO: 1549675 - RNA, 19 nt, Artificial Sequence
  Description of Artificial Sequence: Synthetic oligonucleotide
  Antisense strand to SEQ ID NO: 1549674
guggguaacgugaucauuc

SEQ ID NO: 1549676 - RNA, 19 nt, Artificial Sequence
  Description of Artificial Sequence: Synthetic oligonucleotide
  Sense strand starting at position 3049 of SEQ ID NO: 1245268
gguuuaguaaugcacagua

SEQ ID NO: 1549677 - RNA, 19 nt, Artificial Sequence
  Description of Artificial Sequence: Synthetic oligonucleotide
  Antisense strand to SEQ ID NO: 1549676
uacugugcauuacuaaacc

SEQ ID NO: 1549678 - RNA, 19 nt, Artificial Sequence
  Description of Artificial Sequence: Synthetic oligonucleotide
  Sense strand starting at position 3051 of SEQ ID NO: 1245268
uuuaguaaugcacaguaca

SEQ ID NO: 1549679 - RNA, 19 nt, Artificial Sequence
  Description of Artificial Sequence: Synthetic oligonucleotide
  Antisense strand to SEQ ID NO: 1549678
uguacugugcauuacuaaa

SEQ ID NO: 1549680 - RNA, 19 nt, Artificial Sequence
  Description of Artificial Sequence: Synthetic oligonucleotide
  Sense strand starting at position 3062 of SEQ ID NO: 1245268
acaguacacgcauauguua

SEQ ID NO: 1549681 - RNA, 19 nt, Artificial Sequence
  Description of Artificial Sequence: Synthetic oligonucleotide
  Antisense strand to SEQ ID NO: 1549680
uaacauaugcguguacugu

SEQ ID NO: 1549682 - RNA, 19 nt, Artificial Sequence
  Description of Artificial Sequence: Synthetic oligonucleotide
  Sense strand starting at position 3133 of SEQ ID NO: 1245268
aguuuacaucuaugagagc

SEQ ID NO: 1549683 - RNA, 19 nt, Artificial Sequence
  Description of Artificial Sequence: Synthetic oligonucleotide
  Antisense strand to SEQ ID NO: 1549682
gcucucauagauguaaacu

SEQ ID NO: 1549684 - RNA, 19 nt, Artificial Sequence
  Description of Artificial Sequence: Synthetic oligonucleotide
  Sense strand starting at position 3144 of SEQ ID NO: 1245268
augagagcauucuuaacug

SEQ ID NO: 1549685 - RNA, 19 nt, Artificial Sequence
  Description of Artificial Sequence: Synthetic oligonucleotide
  Antisense strand to SEQ ID NO: 1549684
caguuaagaaugcucucau

SEQ ID NO: 1549686 - RNA, 19 nt, Artificial Sequence
  Description of Artificial Sequence: Synthetic oligonucleotide
  Sense strand starting at position 3502 of SEQ ID NO: 1245268
ugguuuguuaaccaggcua

SEQ ID NO: 1549687 - RNA, 19 nt, Artificial Sequence
  Description of Artificial Sequence: Synthetic oligonucleotide
  Antisense strand to SEQ ID NO: 1549686
uagccugguuaacaaacca

SEQ ID NO: 1549688 - RNA, 19 nt, Artificial Sequence
  Description of Artificial Sequence: Synthetic oligonucleotide
  Sense strand starting at position 3616 of SEQ ID NO: 1245268
cgcagaacauuucuuagcu

SEQ ID NO: 1549689 - RNA, 19 nt, Artificial Sequence
  Description of Artificial Sequence: Synthetic oligonucleotide
  Antisense strand to SEQ ID NO: 1549688
agcuaagaaauguucugcg

SEQ ID NO: 1549690 - RNA, 19 nt, Artificial Sequence
  Description of Artificial Sequence: Synthetic oligonucleotide
  Sense strand starting at position 3640 of SEQ ID NO: 1245268
uuucucuucuguucuauga

SEQ ID NO: 1549691 - RNA, 19 nt, Artificial Sequence
  Description of Artificial Sequence: Synthetic oligonucleotide
  Antisense strand to SEQ ID NO: 1549690
ucauagaacagaagagaaa

SEQ ID NO: 1549692 - RNA, 19 nt, Artificial Sequence
  Description of Artificial Sequence: Synthetic oligonucleotide
  Sense strand starting at position 3644 of SEQ ID NO: 1245268
ucuucuguucuaugagaau

SEQ ID NO: 1549693 - RNA, 19 nt, Artificial Sequence
  Description of Artificial Sequence: Synthetic oligonucleotide
  Antisense strand to SEQ ID NO: 1549692
auucucauagaacagaaga

SEQ ID NO: 1549694 - RNA, 19 nt, Artificial Sequence
  Description of Artificial Sequence: Synthetic oligonucleotide
  Sense strand starting at position 3650 of SEQ ID NO: 1245268
guucuaugagaaugagagu

SEQ ID NO: 1549695 - RNA, 19 nt, Artificial Sequence
  Description of Artificial Sequence: Synthetic oligonucleotide
  Antisense strand to SEQ ID NO: 1549694
acucucauucucauagaac

SEQ ID NO: 1549696 - RNA, 19 nt, Artificial Sequence
  Description of Artificial Sequence: Synthetic oligonucleotide
  Sense strand starting at position 3684 of SEQ ID NO: 1245268
ccucuagcauuguuaggaa

SEQ ID NO: 1549697 - RNA, 19 nt, Artificial Sequence
  Description of Artificial Sequence: Synthetic oligonucleotide
  Antisense strand to SEQ ID NO: 1549696
uuccuaacaaugcuagagg

SEQ ID NO: 1549698 - RNA, 19 nt, Artificial Sequence
  Description of Artificial Sequence: Synthetic oligonucleotide
  Sense strand starting at position 3774 of SEQ ID NO: 1245268
cugauuuaugcauggcuuu

SEQ ID NO: 1549699 - RNA, 19 nt, Artificial Sequence
  Description of Artificial Sequence: Synthetic oligonucleotide
  Antisense strand to SEQ ID NO: 1549698
aaagccaugcauaaaucag

SEQ ID NO: 1549700 - RNA, 19 nt, Artificial Sequence
  Description of Artificial Sequence: Synthetic oligonucleotide
  Sense strand starting at position 3858 of SEQ ID NO: 1245268
gguccauucugauuaauag

SEQ ID NO: 1549701 - RNA, 19 nt, Artificial Sequence
  Description of Artificial Sequence: Synthetic oligonucleotide
  Antisense strand to SEQ ID NO: 1549700
cuauuaaucagaauggacc

SEQ ID NO: 1549702 - RNA, 19 nt, Artificial Sequence
  Description of Artificial Sequence: Synthetic oligonucleotide
  Sense strand starting at position 3886 of SEQ ID NO: 1245268
ucuuaauaggcagaugcau

SEQ ID NO: 1549703 - RNA, 19 nt, Artificial Sequence
  Description of Artificial Sequence: Synthetic oligonucleotide
  Antisense strand to SEQ ID NO: 1549702
augcaucugccuauuaaga

SEQ ID NO: 1549704 - RNA, 19 nt, Artificial Sequence
  Description of Artificial Sequence: Synthetic oligonucleotide
  Sense strand starting at position 3961 of SEQ ID NO: 1245268
uaagguagaucuguaguuu

SEQ ID NO: 1549705 - RNA, 19 nt, Artificial Sequence
  Description of Artificial Sequence: Synthetic oligonucleotide
  Antisense strand to SEQ ID NO: 1549704
aaacuacagaucuaccuua

SEQ ID NO: 1549706 - RNA, 19 nt, Artificial Sequence
  Description of Artificial Sequence: Synthetic oligonucleotide
  Sense strand starting at position 3962 of SEQ ID NO: 1245268
aagguagaucuguaguuuc

SEQ ID NO: 1549707 - RNA, 19 nt, Artificial Sequence
  Description of Artificial Sequence: Synthetic oligonucleotide
  Antisense strand to SEQ ID NO: 1549706
gaaacuacagaucuaccuu

SEQ ID NO: 1549708 - RNA, 19 nt, Artificial Sequence
  Description of Artificial Sequence: Synthetic oligonucleotide
  Sense strand starting at position 3975 of SEQ ID NO: 1245268
aguuucugccacuagaaua

SEQ ID NO: 1549709 - RNA, 19 nt, Artificial Sequence
  Description of Artificial Sequence: Synthetic oligonucleotide
  Antisense strand to SEQ ID NO: 1549708
uauucuaguggcagaaacu

SEQ ID NO: 1549710 - RNA, 19 nt, Artificial Sequence
  Description of Artificial Sequence: Synthetic oligonucleotide
  Sense strand starting at position 6 of SEQ ID NO: 1245269
ucaaccugccuugaugaau

SEQ ID NO: 1549711 - RNA, 19 nt, Artificial Sequence
  Description of Artificial Sequence: Synthetic oligonucleotide
  Antisense strand to SEQ ID NO: 1549710
auucaucaaggcagguuga

SEQ ID NO: 1549712 - RNA, 19 nt, Artificial Sequence
  Description of Artificial Sequence: Synthetic oligonucleotide
  Sense strand starting at position 38 of SEQ ID NO: 1245269
uggauugugagaugaguuu

SEQ ID NO: 1549713 - RNA, 19 nt, Artificial Sequence
  Description of Artificial Sequence: Synthetic oligonucleotide
  Antisense strand to SEQ ID NO: 1549712
aaacucaucucacaaucca

SEQ ID NO: 1549714 - RNA, 19 nt, Artificial Sequence
  Description of Artificial Sequence: Synthetic oligonucleotide
  Sense strand starting at position 160 of SEQ ID NO: 1245269
ucugaacuaccuggacauu

SEQ ID NO: 1549715 - RNA, 19 nt, Artificial Sequence
  Description of Artificial Sequence: Synthetic oligonucleotide
  Antisense strand to SEQ ID NO: 1549714
aauguccagguaguucaga

SEQ ID NO: 1549716 - RNA, 19 nt, Artificial Sequence
  Description of Artificial Sequence: Synthetic oligonucleotide
  Sense strand starting at position 169 of SEQ ID NO: 1245269
ccuggacauuuggauaacu

SEQ ID NO: 1549717 - RNA, 19 nt, Artificial Sequence
  Description of Artificial Sequence: Synthetic oligonucleotide
  Antisense strand to SEQ ID NO: 1549716
aguuauccaaauguccagg

SEQ ID NO: 1549718 - RNA, 19 nt, Artificial Sequence
  Description of Artificial Sequence: Synthetic oligonucleotide
  Sense strand starting at position 312 of SEQ ID NO: 1245269
ucccuauugggucaaacau

SEQ ID NO: 1549719 - RNA, 19 nt, Artificial Sequence
  Description of Artificial Sequence: Synthetic oligonucleotide
  Antisense strand to SEQ ID NO: 1549718
auguuugacccaauaggga

SEQ ID NO: 1549720 - RNA, 19 nt, Artificial Sequence
  Description of Artificial Sequence: Synthetic oligonucleotide
  Sense strand starting at position 329 of SEQ ID NO: 1245269
augccuguuccagaaauga

SEQ ID NO: 1549721 - RNA, 19 nt, Artificial Sequence
  Description of Artificial Sequence: Synthetic oligonucleotide
  Antisense strand to SEQ ID NO: 1549720
ucauuucuggaacaggcau

SEQ ID NO: 1549722 - RNA, 19 nt, Artificial Sequence
  Description of Artificial Sequence: Synthetic oligonucleotide
  Sense strand starting at position 561 of SEQ ID NO: 1245269
uggucauugguaggaauca

SEQ ID NO: 1549723 - RNA, 19 nt, Artificial Sequence
  Description of Artificial Sequence: Synthetic oligonucleotide
  Antisense strand to SEQ ID NO: 1549722
ugauuccuaccaaugacca

SEQ ID NO: 1549724 - RNA, 19 nt, Artificial Sequence
  Description of Artificial Sequence: Synthetic oligonucleotide
  Sense strand starting at position 611 of SEQ ID NO: 1245269
uggguagaggauuaugcua

SEQ ID NO: 1549725 - RNA, 19 nt, Artificial Sequence
  Description of Artificial Sequence: Synthetic oligonucleotide
  Antisense strand to SEQ ID NO: 1549724
uagcauaauccucuaccca

SEQ ID NO: 1549726 - RNA, 19 nt, Artificial Sequence
  Description of Artificial Sequence: Synthetic oligonucleotide
  Sense strand starting at position 618 of SEQ ID NO: 1245269
aggauuaugcuaggaaacu

SEQ ID NO: 1549727 - RNA, 19 nt, Artificial Sequence
  Description of Artificial Sequence: Synthetic oligonucleotide
  Antisense strand to SEQ ID NO: 1549726
aguuuccuagcauaauccu

SEQ ID NO: 1549728 - RNA, 19 nt, Artificial Sequence
  Description of Artificial Sequence: Synthetic oligonucleotide
  Sense strand starting at position 827 of SEQ ID NO: 1245269
augaaugaauaugugugaa

SEQ ID NO: 1549729 - RNA, 19 nt, Artificial Sequence
  Description of Artificial Sequence: Synthetic oligonucleotide
  Antisense strand to SEQ ID NO: 1549728
uucacacauauucauucau

SEQ ID NO: 1549730 - RNA, 19 nt, Artificial Sequence
  Description of Artificial Sequence: Synthetic oligonucleotide
  Sense strand starting at position 934 of SEQ ID NO: 1245269
uguuguuaauaaccuugaa

SEQ ID NO: 1549731 - RNA, 19 nt, Artificial Sequence
  Description of Artificial Sequence: Synthetic oligonucleotide
  Antisense strand to SEQ ID NO: 1549730
uucaagguuauuaacaaca

SEQ ID NO: 1549732 - RNA, 19 nt, Artificial Sequence
  Description of Artificial Sequence: Synthetic oligonucleotide
  Sense strand starting at position 977 of SEQ ID NO: 1245269
auuuaaugaugugcaguuu

SEQ ID NO: 1549733 - RNA, 19 nt, Artificial Sequence
  Description of Artificial Sequence: Synthetic oligonucleotide
  Antisense strand to SEQ ID NO: 1549732
aaacugcacaucauuaaau

SEQ ID NO: 1549734 - RNA, 19 nt, Artificial Sequence
  Description of Artificial Sequence: Synthetic oligonucleotide
  Sense strand starting at position 1053 of SEQ ID NO: 1245269
acaugauacaggugugaag

SEQ ID NO: 1549735 - RNA, 19 nt, Artificial Sequence
  Description of Artificial Sequence: Synthetic oligonucleotide
  Antisense strand to SEQ ID NO: 1549734
cuucacaccuguaucaugu

SEQ ID NO: 1549736 - RNA, 19 nt, Artificial Sequence
  Description of Artificial Sequence: Synthetic oligonucleotide
  Sense strand starting at position 1064 of SEQ ID NO: 1245269
gugugaaggcucuaaccaa

SEQ ID NO: 1549737 - RNA, 19 nt, Artificial Sequence
  Description of Artificial Sequence: Synthetic oligonucleotide
  Antisense strand to SEQ ID NO: 1549736
uugguuagagccuucacac

SEQ ID NO: 1549738 - RNA, 19 nt, Artificial Sequence
  Description of Artificial Sequence: Synthetic oligonucleotide
  Sense strand starting at position 1196 of SEQ ID NO: 1245269
gugaucaguugggugaaca

SEQ ID NO: 1549739 - RNA, 19 nt, Artificial Sequence
  Description of Artificial Sequence: Synthetic oligonucleotide
  Antisense strand to SEQ ID NO: 1549738
uguucacccaacugaucac

SEQ ID NO: 1549740 - RNA, 19 nt, Artificial Sequence
  Description of Artificial Sequence: Synthetic oligonucleotide
  Sense strand starting at position 1337 of SEQ ID NO: 1245269
gcauauaaaugucuuauug

SEQ ID NO: 1549741 - RNA, 19 nt, Artificial Sequence
  Description of Artificial Sequence: Synthetic oligonucleotide
  Antisense strand to SEQ ID NO: 1549740
caauaagacauuuauaugc

SEQ ID NO: 1549742 - RNA, 19 nt, Artificial Sequence
  Description of Artificial Sequence: Synthetic oligonucleotide
  Sense strand starting at position 1379 of SEQ ID NO: 1245269
ucgcuccuccuggaaugaa

SEQ ID NO: 1549743 - RNA, 19 nt, Artificial Sequence
  Description of Artificial Sequence: Synthetic oligonucleotide
  Antisense strand to SEQ ID NO: 1549742
uucauuccaggaggagcga

SEQ ID NO: 1549744 - RNA, 19 nt, Artificial Sequence
  Description of Artificial Sequence: Synthetic oligonucleotide
  Sense strand starting at position 1526 of SEQ ID NO: 1245269
uaaccagcuguuugauaag

SEQ ID NO: 1549745 - RNA, 19 nt, Artificial Sequence
  Description of Artificial Sequence: Synthetic oligonucleotide
  Antisense strand to SEQ ID NO: 1549744
cuuaucaaacagcugguua

SEQ ID NO: 1549746 - RNA, 19 nt, Artificial Sequence
  Description of Artificial Sequence: Synthetic oligonucleotide
  Sense strand starting at position 2373 of SEQ ID NO: 1245269
agaggauggccucgggaaa

SEQ ID NO: 1549747 - RNA, 19 nt, Artificial Sequence
  Description of Artificial Sequence: Synthetic oligonucleotide
  Antisense strand to SEQ ID NO: 1549746
uuucccgaggccauccucu

SEQ ID NO: 1549748 - RNA, 19 nt, Artificial Sequence
  Description of Artificial Sequence: Synthetic oligonucleotide
  Sense strand starting at position 2374 of SEQ ID NO: 1245269
gaggauggccucgggaaau

SEQ ID NO: 1549749 - RNA, 19 nt, Artificial Sequence
  Description of Artificial Sequence: Synthetic oligonucleotide
  Antisense strand to SEQ ID NO: 1549748
auuucccgaggccauccuc

SEQ ID NO: 1549750 - RNA, 19 nt, Artificial Sequence
  Description of Artificial Sequence: Synthetic oligonucleotide
  Sense strand starting at position 2399 of SEQ ID NO: 1245269
gggcguuggaaagaaauua

SEQ ID NO: 1549751 - RNA, 19 nt, Artificial Sequence
  Description of Artificial Sequence: Synthetic oligonucleotide
  Antisense strand to SEQ ID NO: 1549750
uaauuucuuuccaacgccc

SEQ ID NO: 1549752 - RNA, 19 nt, Artificial Sequence
  Description of Artificial Sequence: Synthetic oligonucleotide
  Sense strand starting at position 2450 of SEQ ID NO: 1245269
ugcauuaaucaguaugcaa

SEQ ID NO: 1549753 - RNA, 19 nt, Artificial Sequence
  Description of Artificial Sequence: Synthetic oligonucleotide
  Antisense strand to SEQ ID NO: 1549752
uugcauacugauuaaugca

SEQ ID NO: 1549754 - RNA, 19 nt, Artificial Sequence
  Description of Artificial Sequence: Synthetic oligonucleotide
  Sense strand starting at position 2529 of SEQ ID NO: 1245269
gguuaccacuaaguaagau

SEQ ID NO: 1549755 - RNA, 19 nt, Artificial Sequence
  Description of Artificial Sequence: Synthetic oligonucleotide
  Antisense strand to SEQ ID NO: 1549754
aucuuacuuagugguaacc

SEQ ID NO: 1549756 - RNA, 19 nt, Artificial Sequence
  Description of Artificial Sequence: Synthetic oligonucleotide
  Sense strand starting at position 2596 of SEQ ID NO: 1245269
gugcuaugccguguucuaa

SEQ ID NO: 1549757 - RNA, 19 nt, Artificial Sequence
  Description of Artificial Sequence: Synthetic oligonucleotide
  Antisense strand to SEQ ID NO: 1549756
uuagaacacggcauagcac

SEQ ID NO: 1549758 - RNA, 19 nt, Artificial Sequence
  Description of Artificial Sequence: Synthetic oligonucleotide
  Sense strand starting at position 2597 of SEQ ID NO: 1245269
ugcuaugccguguucuaaa

SEQ ID NO: 1549759 - RNA, 19 nt, Artificial Sequence
  Description of Artificial Sequence: Synthetic oligonucleotide
  Antisense strand to SEQ ID NO: 1549758
uuuagaacacggcauagca

SEQ ID NO: 1549760 - RNA, 19 nt, Artificial Sequence
  Description of Artificial Sequence: Synthetic oligonucleotide
  Sense strand starting at position 2617 of SEQ ID NO: 1245269
acauuagauucguccacaa

SEQ ID NO: 1549761 - RNA, 19 nt, Artificial Sequence
  Description of Artificial Sequence: Synthetic oligonucleotide
  Antisense strand to SEQ ID NO: 1549760
uuguggacgaaucuaaugu

SEQ ID NO: 1549762 - RNA, 19 nt, Artificial Sequence
  Description of Artificial Sequence: Synthetic oligonucleotide
  Sense strand starting at position 2619 of SEQ ID NO: 1245269
auuagauucguccacaaag

SEQ ID NO: 1549763 - RNA, 19 nt, Artificial Sequence
  Description of Artificial Sequence: Synthetic oligonucleotide
  Antisense strand to SEQ ID NO: 1549762
cuuuguggacgaaucuaau

SEQ ID NO: 1549764 - RNA, 19 nt, Artificial Sequence
  Description of Artificial Sequence: Synthetic oligonucleotide
  Sense strand starting at position 2621 of SEQ ID NO: 1245269
uagauucguccacaaagca

SEQ ID NO: 1549765 - RNA, 19 nt, Artificial Sequence
  Description of Artificial Sequence: Synthetic oligonucleotide
  Antisense strand to SEQ ID NO: 1549764
ugcuuuguggacgaaucua

SEQ ID NO: 1549766 - RNA, 19 nt, Artificial Sequence
  Description of Artificial Sequence: Synthetic oligonucleotide
  Sense strand starting at position 2703 of SEQ ID NO: 1245269
acugguaguaaagguaaga

SEQ ID NO: 1549767 - RNA, 19 nt, Artificial Sequence
  Description of Artificial Sequence: Synthetic oligonucleotide
  Antisense strand to SEQ ID NO: 1549766
ucuuaccuuuacuaccagu

SEQ ID NO: 1549768 - RNA, 19 nt, Artificial Sequence
  Description of Artificial Sequence: Synthetic oligonucleotide
  Sense strand starting at position 2751 of SEQ ID NO: 1245269
ccgauuuacuccucuguga

SEQ ID NO: 1549769 - RNA, 19 nt, Artificial Sequence
  Description of Artificial Sequence: Synthetic oligonucleotide
  Antisense strand to SEQ ID NO: 1549768
ucacagaggaguaaaucgg

SEQ ID NO: 1549770 - RNA, 19 nt, Artificial Sequence
  Description of Artificial Sequence: Synthetic oligonucleotide
  Sense strand starting at position 2918 of SEQ ID NO: 1245269
gagaauuucuuguagaagg

SEQ ID NO: 1549771 - RNA, 19 nt, Artificial Sequence
  Description of Artificial Sequence: Synthetic oligonucleotide
  Antisense strand to SEQ ID NO: 1549770
ccuucuacaagaaauucuc

SEQ ID NO: 1549772 - RNA, 19 nt, Artificial Sequence
  Description of Artificial Sequence: Synthetic oligonucleotide
  Sense strand starting at position 3439 of SEQ ID NO: 1245269
acauaagagccuugaaucu

SEQ ID NO: 1549773 - RNA, 19 nt, Artificial Sequence
  Description of Artificial Sequence: Synthetic oligonucleotide
  Antisense strand to SEQ ID NO: 1549772
agauucaaggcucuuaugu

SEQ ID NO: 1549774 - RNA, 19 nt, Artificial Sequence
  Description of Artificial Sequence: Synthetic oligonucleotide
  Sense strand starting at position 3494 of SEQ ID NO: 1245269
ugugcuauacaaugauaac

SEQ ID NO: 1549775 - RNA, 19 nt, Artificial Sequence
  Description of Artificial Sequence: Synthetic oligonucleotide
  Antisense strand to SEQ ID NO: 1549774
guuaucauuguauagcaca

SEQ ID NO: 1549776 - RNA, 19 nt, Artificial Sequence
  Description of Artificial Sequence: Synthetic oligonucleotide
  Sense strand starting at position 3665 of SEQ ID NO: 1245269
gaaugagguaacugagguu

SEQ ID NO: 1549777 - RNA, 19 nt, Artificial Sequence
  Description of Artificial Sequence: Synthetic oligonucleotide
  Antisense strand to SEQ ID NO: 1549776
aaccucaguuaccucauuc

SEQ ID NO: 1549778 - RNA, 19 nt, Artificial Sequence
  Description of Artificial Sequence: Synthetic oligonucleotide
  Sense strand starting at position 3671 of SEQ ID NO: 1245269
gguaacugagguugagaaa

SEQ ID NO: 1549779 - RNA, 19 nt, Artificial Sequence
  Description of Artificial Sequence: Synthetic oligonucleotide
  Antisense strand to SEQ ID NO: 1549778
uuucucaaccucaguuacc

SEQ ID NO: 1549780 - RNA, 19 nt, Artificial Sequence
  Description of Artificial Sequence: Synthetic oligonucleotide
  Sense strand starting at position 3695 of SEQ ID NO: 1245269
aguaaaucuguccaaagug

SEQ ID NO: 1549781 - RNA, 19 nt, Artificial Sequence
  Description of Artificial Sequence: Synthetic oligonucleotide
  Antisense strand to SEQ ID NO: 1549780
cacuuuggacagauuuacu

SEQ ID NO: 1549782 - RNA, 19 nt, Artificial Sequence
  Description of Artificial Sequence: Synthetic oligonucleotide
  Sense strand starting at position 3736 of SEQ ID NO: 1245269
caggucuauugauccugaa

SEQ ID NO: 1549783 - RNA, 19 nt, Artificial Sequence
  Description of Artificial Sequence: Synthetic oligonucleotide
  Antisense strand to SEQ ID NO: 1549782
uucaggaucaauagaccug

SEQ ID NO: 1549784 - RNA, 19 nt, Artificial Sequence
  Description of Artificial Sequence: Synthetic oligonucleotide
  Sense strand starting at position 3809 of SEQ ID NO: 1245269
agguuccugccauaagaaa

SEQ ID NO: 1549785 - RNA, 19 nt, Artificial Sequence
  Description of Artificial Sequence: Synthetic oligonucleotide
  Antisense strand to SEQ ID NO: 1549784
uuucuuauggcaggaaccu

SEQ ID NO: 1549786 - RNA, 19 nt, Artificial Sequence
  Description of Artificial Sequence: Synthetic oligonucleotide
  Sense strand starting at position 3927 of SEQ ID NO: 1245269
uggagugacuugccacaua

SEQ ID NO: 1549787 - RNA, 19 nt, Artificial Sequence
  Description of Artificial Sequence: Synthetic oligonucleotide
  Antisense strand to SEQ ID NO: 1549786
uauguggcaagucacucca

SEQ ID NO: 1549788 - RNA, 19 nt, Artificial Sequence
  Description of Artificial Sequence: Synthetic oligonucleotide
  Sense strand starting at position 3980 of SEQ ID NO: 1245269
aguaguguuacauagugac

SEQ ID NO: 1549789 - RNA, 19 nt, Artificial Sequence
  Description of Artificial Sequence: Synthetic oligonucleotide
  Antisense strand to SEQ ID NO: 1549788
gucacuauguaacacuacu

SEQ ID NO: 1549790 - RNA, 19 nt, Artificial Sequence
  Description of Artificial Sequence: Synthetic oligonucleotide
  Sense strand starting at position 20 of SEQ ID NO: 1245270
agcucuuuggugggaaaga

SEQ ID NO: 1549791 - RNA, 19 nt, Artificial Sequence
  Description of Artificial Sequence: Synthetic oligonucleotide
  Antisense strand to SEQ ID NO: 1549790
ucuuucccaccaaagagcu

SEQ ID NO: 1549792 - RNA, 19 nt, Artificial Sequence
  Description of Artificial Sequence: Synthetic oligonucleotide
  Sense strand starting at position 83 of SEQ ID NO: 1245270
ccugaucaguguccuggua

SEQ ID NO: 1549793 - RNA, 19 nt, Artificial Sequence
  Description of Artificial Sequence: Synthetic oligonucleotide
  Antisense strand to SEQ ID NO: 1549792
uaccaggacacugaucagg

SEQ ID NO: 1549794 - RNA, 19 nt, Artificial Sequence
  Description of Artificial Sequence: Synthetic oligonucleotide
  Sense strand starting at position 111 of SEQ ID NO: 1245270
agagaccugucccuaaaca

SEQ ID NO: 1549795 - RNA, 19 nt, Artificial Sequence
  Description of Artificial Sequence: Synthetic oligonucleotide
  Antisense strand to SEQ ID NO: 1549794
uguuuagggacaggucucu

SEQ ID NO: 1549796 - RNA, 19 nt, Artificial Sequence
  Description of Artificial Sequence: Synthetic oligonucleotide
  Sense strand starting at position 299 of SEQ ID NO: 1245270
acacgacauuccuucuaag

SEQ ID NO: 1549797 - RNA, 19 nt, Artificial Sequence
  Description of Artificial Sequence: Synthetic oligonucleotide
  Antisense strand to SEQ ID NO: 1549796
cuuagaaggaaugucgugu

SEQ ID NO: 1549798 - RNA, 19 nt, Artificial Sequence
  Description of Artificial Sequence: Synthetic oligonucleotide
  Sense strand starting at position 378 of SEQ ID NO: 1245270
gaauuuaugucuggaaaua

SEQ ID NO: 1549799 - RNA, 19 nt, Artificial Sequence
  Description of Artificial Sequence: Synthetic oligonucleotide
  Antisense strand to SEQ ID NO: 1549798
uauuuccagacauaaauuc

SEQ ID NO: 1549800 - RNA, 19 nt, Artificial Sequence
  Description of Artificial Sequence: Synthetic oligonucleotide
  Sense strand starting at position 580 of SEQ ID NO: 1245270
ggacaaucgaguuagcgua

SEQ ID NO: 1549801 - RNA, 19 nt, Artificial Sequence
  Description of Artificial Sequence: Synthetic oligonucleotide
  Antisense strand to SEQ ID NO: 1549800
uacgcuaacucgauugucc

SEQ ID NO: 1549802 - RNA, 19 nt, Artificial Sequence
  Description of Artificial Sequence: Synthetic oligonucleotide
  Sense strand starting at position 585 of SEQ ID NO: 1245270
aucgaguuagcguaaggga

SEQ ID NO: 1549803 - RNA, 19 nt, Artificial Sequence
  Description of Artificial Sequence: Synthetic oligonucleotide
  Antisense strand to SEQ ID NO: 1549802
ucccuuacgcuaacucgau

SEQ ID NO: 1549804 - RNA, 19 nt, Artificial Sequence
  Description of Artificial Sequence: Synthetic oligonucleotide
  Sense strand starting at position 587 of SEQ ID NO: 1245270
cgaguuagcguaagggaug

SEQ ID NO: 1549805 - RNA, 19 nt, Artificial Sequence
  Description of Artificial Sequence: Synthetic oligonucleotide
  Antisense strand to SEQ ID NO: 1549804
caucccuuacgcuaacucg

SEQ ID NO: 1549806 - RNA, 19 nt, Artificial Sequence
  Description of Artificial Sequence: Synthetic oligonucleotide
  Sense strand starting at position 751 of SEQ ID NO: 1245270
gacagaucaguucgcacaa

SEQ ID NO: 1549807 - RNA, 19 nt, Artificial Sequence
  Description of Artificial Sequence: Synthetic oligonucleotide
  Antisense strand to SEQ ID NO: 1549806
uugugcgaacugaucuguc

SEQ ID NO: 1549808 - RNA, 19 nt, Artificial Sequence
  Description of Artificial Sequence: Synthetic oligonucleotide
  Sense strand starting at position 841 of SEQ ID NO: 1245270
ggguacaccagaugcuaau

SEQ ID NO: 1549809 - RNA, 19 nt, Artificial Sequence
  Description of Artificial Sequence: Synthetic oligonucleotide
  Antisense strand to SEQ ID NO: 1549808
auuagcaucugguguaccc

SEQ ID NO: 1549810 - RNA, 19 nt, Artificial Sequence
  Description of Artificial Sequence: Synthetic oligonucleotide
  Sense strand starting at position 943 of SEQ ID NO: 1245270
acccuacguuuaucugaau

SEQ ID NO: 1549811 - RNA, 19 nt, Artificial Sequence
  Description of Artificial Sequence: Synthetic oligonucleotide
  Antisense strand to SEQ ID NO: 1549810
auucagauaaacguagggu

SEQ ID NO: 1549812 - RNA, 19 nt, Artificial Sequence
  Description of Artificial Sequence: Synthetic oligonucleotide
  Sense strand starting at position 944 of SEQ ID NO: 1245270
cccuacguuuaucugaauu

SEQ ID NO: 1549813 - RNA, 19 nt, Artificial Sequence
  Description of Artificial Sequence: Synthetic oligonucleotide
  Antisense strand to SEQ ID NO: 1549812
aauucagauaaacguaggg

SEQ ID NO: 1549814 - RNA, 19 nt, Artificial Sequence
  Description of Artificial Sequence: Synthetic oligonucleotide
  Sense strand starting at position 1324 of SEQ ID NO: 1245270
cuuaaacuuucugccggaa

SEQ ID NO: 1549815 - RNA, 19 nt, Artificial Sequence
  Description of Artificial Sequence: Synthetic oligonucleotide
  Antisense strand to SEQ ID NO: 1549814
uuccggcagaaaguuuaag

SEQ ID NO: 1549816 - RNA, 19 nt, Artificial Sequence
  Description of Artificial Sequence: Synthetic oligonucleotide
  Sense strand starting at position 1327 of SEQ ID NO: 1245270
aaacuuucugccggaagga

SEQ ID NO: 1549817 - RNA, 19 nt, Artificial Sequence
  Description of Artificial Sequence: Synthetic oligonucleotide
  Antisense strand to SEQ ID NO: 1549816
uccuuccggcagaaaguuu

SEQ ID NO: 1549818 - RNA, 19 nt, Artificial Sequence
  Description of Artificial Sequence: Synthetic oligonucleotide
  Sense strand starting at position 1328 of SEQ ID NO: 1245270
aacuuucugccggaaggaa

SEQ ID NO: 1549819 - RNA, 19 nt, Artificial Sequence
  Description of Artificial Sequence: Synthetic oligonucleotide
  Antisense strand to SEQ ID NO: 1549818
uuccuuccggcagaaaguu

SEQ ID NO: 1549820 - RNA, 19 nt, Artificial Sequence
  Description of Artificial Sequence: Synthetic oligonucleotide
  Sense strand starting at position 2263 of SEQ ID NO: 1245270
augccauucucaucuggaa

SEQ ID NO: 1549821 - RNA, 19 nt, Artificial Sequence
  Description of Artificial Sequence: Synthetic oligonucleotide
  Antisense strand to SEQ ID NO: 1549820
uuccagaugagaauggcau

SEQ ID NO: 1549822 - RNA, 19 nt, Artificial Sequence
  Description of Artificial Sequence: Synthetic oligonucleotide
  Sense strand starting at position 2467 of SEQ ID NO: 1245270
cgagcuuccguuuaacaua

SEQ ID NO: 1549823 - RNA, 19 nt, Artificial Sequence
  Description of Artificial Sequence: Synthetic oligonucleotide
  Antisense strand to SEQ ID NO: 1549822
uauguuaaacggaagcucg

SEQ ID NO: 1549824 - RNA, 19 nt, Artificial Sequence
  Description of Artificial Sequence: Synthetic oligonucleotide
  Sense strand starting at position 2562 of SEQ ID NO: 1245270
ccgugucugaaacgggaaa

SEQ ID NO: 1549825 - RNA, 19 nt, Artificial Sequence
  Description of Artificial Sequence: Synthetic oligonucleotide
  Antisense strand to SEQ ID NO: 1549824
uuucccguuucagacacgg

SEQ ID NO: 1549826 - RNA, 19 nt, Artificial Sequence
  Description of Artificial Sequence: Synthetic oligonucleotide
  Sense strand starting at position 2580 of SEQ ID NO: 1245270
acuugcuuucuggagcaaa

SEQ ID NO: 1549827 - RNA, 19 nt, Artificial Sequence
  Description of Artificial Sequence: Synthetic oligonucleotide
  Antisense strand to SEQ ID NO: 1549826
uuugcuccagaaagcaagu

SEQ ID NO: 1549828 - RNA, 19 nt, Artificial Sequence
  Description of Artificial Sequence: Synthetic oligonucleotide
  Sense strand starting at position 2627 of SEQ ID NO: 1245270
caacucgugugggcagaaa

SEQ ID NO: 1549829 - RNA, 19 nt, Artificial Sequence
  Description of Artificial Sequence: Synthetic oligonucleotide
  Antisense strand to SEQ ID NO: 1549828
uuucugcccacacgaguug

SEQ ID NO: 1549830 - RNA, 19 nt, Artificial Sequence
  Description of Artificial Sequence: Synthetic oligonucleotide
  Sense strand starting at position 2663 of SEQ ID NO: 1245270
cagguagaaacguggagau

SEQ ID NO: 1549831 - RNA, 19 nt, Artificial Sequence
  Description of Artificial Sequence: Synthetic oligonucleotide
  Antisense strand to SEQ ID NO: 1549830
aucuccacguuucuaccug

SEQ ID NO: 1549832 - RNA, 19 nt, Artificial Sequence
  Description of Artificial Sequence: Synthetic oligonucleotide
  Sense strand starting at position 2697 of SEQ ID NO: 1245270
caucguuccuaacugggaa

SEQ ID NO: 1549833 - RNA, 19 nt, Artificial Sequence
  Description of Artificial Sequence: Synthetic oligonucleotide
  Antisense strand to SEQ ID NO: 1549832
uucccaguuaggaacgaug

SEQ ID NO: 1549834 - RNA, 19 nt, Artificial Sequence
  Description of Artificial Sequence: Synthetic oligonucleotide
  Sense strand starting at position 2698 of SEQ ID NO: 1245270
aucguuccuaacugggaaa

SEQ ID NO: 1549835 - RNA, 19 nt, Artificial Sequence
  Description of Artificial Sequence: Synthetic oligonucleotide
  Antisense strand to SEQ ID NO: 1549834
uuucccaguuaggaacgau

SEQ ID NO: 1549836 - RNA, 19 nt, Artificial Sequence
  Description of Artificial Sequence: Synthetic oligonucleotide
  Sense strand starting at position 2699 of SEQ ID NO: 1245270
ucguuccuaacugggaaau

SEQ ID NO: 1549837 - RNA, 19 nt, Artificial Sequence
  Description of Artificial Sequence: Synthetic oligonucleotide
  Antisense strand to SEQ ID NO: 1549836
auuucccaguuaggaacga

SEQ ID NO: 1549838 - RNA, 19 nt, Artificial Sequence
  Description of Artificial Sequence: Synthetic oligonucleotide
  Sense strand starting at position 2764 of SEQ ID NO: 1245270
uguucucuucuccauguau

SEQ ID NO: 1549839 - RNA, 19 nt, Artificial Sequence
  Description of Artificial Sequence: Synthetic oligonucleotide
  Antisense strand to SEQ ID NO: 1549838
auacauggagaagagaaca

SEQ ID NO: 1549840 - RNA, 19 nt, Artificial Sequence
  Description of Artificial Sequence: Synthetic oligonucleotide
  Sense strand starting at position 2775 of SEQ ID NO: 1245270
ccauguauggccuagagca

SEQ ID NO: 1549841 - RNA, 19 nt, Artificial Sequence
  Description of Artificial Sequence: Synthetic oligonucleotide
  Antisense strand to SEQ ID NO: 1549840
ugcucuaggccauacaugg

SEQ ID NO: 1549842 - RNA, 19 nt, Artificial Sequence
  Description of Artificial Sequence: Synthetic oligonucleotide
  Sense strand starting at position 3207 of SEQ ID NO: 1245270
gcuuguagagauuacucaa

SEQ ID NO: 1549843 - RNA, 19 nt, Artificial Sequence
  Description of Artificial Sequence: Synthetic oligonucleotide
  Antisense strand to SEQ ID NO: 1549842
uugaguaaucucuacaagc

SEQ ID NO: 1549844 - RNA, 19 nt, Artificial Sequence
  Description of Artificial Sequence: Synthetic oligonucleotide
  Sense strand starting at position 3210 of SEQ ID NO: 1245270
uguagagauuacucaaaug

SEQ ID NO: 1549845 - RNA, 19 nt, Artificial Sequence
  Description of Artificial Sequence: Synthetic oligonucleotide
  Antisense strand to SEQ ID NO: 1549844
cauuugaguaaucucuaca

SEQ ID NO: 1549846 - RNA, 19 nt, Artificial Sequence
  Description of Artificial Sequence: Synthetic oligonucleotide
  Sense strand starting at position 3255 of SEQ ID NO: 1245270
ggacaaguuacagguccau

SEQ ID NO: 1549847 - RNA, 19 nt, Artificial Sequence
  Description of Artificial Sequence: Synthetic oligonucleotide
  Antisense strand to SEQ ID NO: 1549846
auggaccuguaacuugucc

SEQ ID NO: 1549848 - RNA, 19 nt, Artificial Sequence
  Description of Artificial Sequence: Synthetic oligonucleotide
  Sense strand starting at position 3259 of SEQ ID NO: 1245270
aaguuacagguccauugua

SEQ ID NO: 1549849 - RNA, 19 nt, Artificial Sequence
  Description of Artificial Sequence: Synthetic oligonucleotide
  Antisense strand to SEQ ID NO: 1549848
uacaauggaccuguaacuu

SEQ ID NO: 1549850 - RNA, 19 nt, Artificial Sequence
  Description of Artificial Sequence: Synthetic oligonucleotide
  Sense strand starting at position 3305 of SEQ ID NO: 1245270
aaagcagagucuucuaugu

SEQ ID NO: 1549851 - RNA, 19 nt, Artificial Sequence
  Description of Artificial Sequence: Synthetic oligonucleotide
  Antisense strand to SEQ ID NO: 1549850
acauagaagacucugcuuu

SEQ ID NO: 1549852 - RNA, 19 nt, Artificial Sequence
  Description of Artificial Sequence: Synthetic oligonucleotide
  Sense strand starting at position 3462 of SEQ ID NO: 1245270
gcaccuccacagugaaaca

SEQ ID NO: 1549853 - RNA, 19 nt, Artificial Sequence
  Description of Artificial Sequence: Synthetic oligonucleotide
  Antisense strand to SEQ ID NO: 1549852
uguuucacuguggaggugc

SEQ ID NO: 1549854 - RNA, 19 nt, Artificial Sequence
  Description of Artificial Sequence: Synthetic oligonucleotide
  Sense strand starting at position 3536 of SEQ ID NO: 1245270
ccuccacuguguucuacau

SEQ ID NO: 1549855 - RNA, 19 nt, Artificial Sequence
  Description of Artificial Sequence: Synthetic oligonucleotide
  Antisense strand to SEQ ID NO: 1549854
auguagaacacaguggagg

SEQ ID NO: 1549856 - RNA, 19 nt, Artificial Sequence
  Description of Artificial Sequence: Synthetic oligonucleotide
  Sense strand starting at position 3575 of SEQ ID NO: 1245270
uugugaaguugccuuagau

SEQ ID NO: 1549857 - RNA, 19 nt, Artificial Sequence
  Description of Artificial Sequence: Synthetic oligonucleotide
  Antisense strand to SEQ ID NO: 1549856
aucuaaggcaacuucacaa

SEQ ID NO: 1549858 - RNA, 19 nt, Artificial Sequence
  Description of Artificial Sequence: Synthetic oligonucleotide
  Sense strand starting at position 3602 of SEQ ID NO: 1245270
gcagaacugugcccagaca

SEQ ID NO: 1549859 - RNA, 19 nt, Artificial Sequence
  Description of Artificial Sequence: Synthetic oligonucleotide
  Antisense strand to SEQ ID NO: 1549858
ugucugggcacaguucugc

SEQ ID NO: 1549860 - RNA, 19 nt, Artificial Sequence
  Description of Artificial Sequence: Synthetic oligonucleotide
  Sense strand starting at position 3631 of SEQ ID NO: 1245270
aaccgaauuucucuugugu

SEQ ID NO: 1549861 - RNA, 19 nt, Artificial Sequence
  Description of Artificial Sequence: Synthetic oligonucleotide
  Antisense strand to SEQ ID NO: 1549860
acacaagagaaauucgguu

SEQ ID NO: 1549862 - RNA, 19 nt, Artificial Sequence
  Description of Artificial Sequence: Synthetic oligonucleotide
  Sense strand starting at position 3759 of SEQ ID NO: 1245270
gcccuucccucccugagaa

SEQ ID NO: 1549863 - RNA, 19 nt, Artificial Sequence
  Description of Artificial Sequence: Synthetic oligonucleotide
  Antisense strand to SEQ ID NO: 1549862
uucucagggagggaagggc

SEQ ID NO: 1549864 - RNA, 19 nt, Artificial Sequence
  Description of Artificial Sequence: Synthetic oligonucleotide
  Sense strand starting at position 3833 of SEQ ID NO: 1245270
auuugugucucauucugau

SEQ ID NO: 1549865 - RNA, 19 nt, Artificial Sequence
  Description of Artificial Sequence: Synthetic oligonucleotide
  Antisense strand to SEQ ID NO: 1549864
aucagaaugagacacaaau

SEQ ID NO: 1549866 - RNA, 19 nt, Artificial Sequence
  Description of Artificial Sequence: Synthetic oligonucleotide
  Sense strand starting at position 3839 of SEQ ID NO: 1245270
gucucauucugaucagguc

SEQ ID NO: 1549867 - RNA, 19 nt, Artificial Sequence
  Description of Artificial Sequence: Synthetic oligonucleotide
  Antisense strand to SEQ ID NO: 1549866
gaccugaucagaaugagac

SEQ ID NO: 1549868 - RNA, 19 nt, Artificial Sequence
  Description of Artificial Sequence: Synthetic oligonucleotide
  Sense strand starting at position 3858 of SEQ ID NO: 1245270
uugggcucuucuuuacaaa

SEQ ID NO: 1549869 - RNA, 19 nt, Artificial Sequence
  Description of Artificial Sequence: Synthetic oligonucleotide
  Antisense strand to SEQ ID NO: 1549868
uuuguaaagaagagcccaa

SEQ ID NO: 1549870 - RNA, 19 nt, Artificial Sequence
  Description of Artificial Sequence: Synthetic oligonucleotide
  Sense strand starting at position 36 of SEQ ID NO: 1245271
aguuucuaucagggaucuu

SEQ ID NO: 1549871 - RNA, 19 nt, Artificial Sequence
  Description of Artificial Sequence: Synthetic oligonucleotide
  Antisense strand to SEQ ID NO: 1549870
aagaucccugauagaaacu

SEQ ID NO: 1549872 - RNA, 19 nt, Artificial Sequence
  Description of Artificial Sequence: Synthetic oligonucleotide
  Sense strand starting at position 258 of SEQ ID NO: 1245271
guauuacauuguuucgaga

SEQ ID NO: 1549873 - RNA, 19 nt, Artificial Sequence
  Description of Artificial Sequence: Synthetic oligonucleotide
  Antisense strand to SEQ ID NO: 1549872
ucucgaaacaauguaauac

SEQ ID NO: 1549874 - RNA, 19 nt, Artificial Sequence
  Description of Artificial Sequence: Synthetic oligonucleotide
  Sense strand starting at position 272 of SEQ ID NO: 1245271
cgagauaccuuguuuaaag

SEQ ID NO: 1549875 - RNA, 19 nt, Artificial Sequence
  Description of Artificial Sequence: Synthetic oligonucleotide
  Antisense strand to SEQ ID NO: 1549874
cuuuaaacaagguaucucg

SEQ ID NO: 1549876 - RNA, 19 nt, Artificial Sequence
  Description of Artificial Sequence: Synthetic oligonucleotide
  Sense strand starting at position 273 of SEQ ID NO: 1245271
gagauaccuuguuuaaaga

SEQ ID NO: 1549877 - RNA, 19 nt, Artificial Sequence
  Description of Artificial Sequence: Synthetic oligonucleotide
  Antisense strand to SEQ ID NO: 1549876
ucuuuaaacaagguaucuc

SEQ ID NO: 1549878 - RNA, 19 nt, Artificial Sequence
  Description of Artificial Sequence: Synthetic oligonucleotide
  Sense strand starting at position 658 of SEQ ID NO: 1245271
accagauacuuugaaugag

SEQ ID NO: 1549879 - RNA, 19 nt, Artificial Sequence
  Description of Artificial Sequence: Synthetic oligonucleotide
  Antisense strand to SEQ ID NO: 1549878
cucauucaaaguaucuggu

SEQ ID NO: 1549880 - RNA, 19 nt, Artificial Sequence
  Description of Artificial Sequence: Synthetic oligonucleotide
  Sense strand starting at position 794 of SEQ ID NO: 1245271
cagaaagugaggugaucuu

SEQ ID NO: 1549881 - RNA, 19 nt, Artificial Sequence
  Description of Artificial Sequence: Synthetic oligonucleotide
  Antisense strand to SEQ ID NO: 1549880
aagaucaccucacuuucug

SEQ ID NO: 1549882 - RNA, 19 nt, Artificial Sequence
  Description of Artificial Sequence: Synthetic oligonucleotide
  Sense strand starting at position 923 of SEQ ID NO: 1245271
aaaguacugcagcauuaga

SEQ ID NO: 1549883 - RNA, 19 nt, Artificial Sequence
  Description of Artificial Sequence: Synthetic oligonucleotide
  Antisense strand to SEQ ID NO: 1549882
ucuaaugcugcaguacuuu

SEQ ID NO: 1549884 - RNA, 19 nt, Artificial Sequence
  Description of Artificial Sequence: Synthetic oligonucleotide
  Sense strand starting at position 1107 of SEQ ID NO: 1245271
agaggaaggcuuuguaaua

SEQ ID NO: 1549885 - RNA, 19 nt, Artificial Sequence
  Description of Artificial Sequence: Synthetic oligonucleotide
  Antisense strand to SEQ ID NO: 1549884
uauuacaaagccuuccucu

SEQ ID NO: 1549886 - RNA, 19 nt, Artificial Sequence
  Description of Artificial Sequence: Synthetic oligonucleotide
  Sense strand starting at position 1108 of SEQ ID NO: 1245271
gaggaaggcuuuguaauac

SEQ ID NO: 1549887 - RNA, 19 nt, Artificial Sequence
  Description of Artificial Sequence: Synthetic oligonucleotide
  Antisense strand to SEQ ID NO: 1549886
guauuacaaagccuuccuc

SEQ ID NO: 1549888 - RNA, 19 nt, Artificial Sequence
  Description of Artificial Sequence: Synthetic oligonucleotide
  Sense strand starting at position 1163 of SEQ ID NO: 1245271
ggaagacggagguguuaaa

SEQ ID NO: 1549889 - RNA, 19 nt, Artificial Sequence
  Description of Artificial Sequence: Synthetic oligonucleotide
  Antisense strand to SEQ ID NO: 1549888
uuuaacaccuccgucuucc

SEQ ID NO: 1549890 - RNA, 19 nt, Artificial Sequence
  Description of Artificial Sequence: Synthetic oligonucleotide
  Sense strand starting at position 1173 of SEQ ID NO: 1245271
gguguuaaauauucuguaa

SEQ ID NO: 1549891 - RNA, 19 nt, Artificial Sequence
  Description of Artificial Sequence: Synthetic oligonucleotide
  Antisense strand to SEQ ID NO: 1549890
uuacagaauauuuaacacc

SEQ ID NO: 1549892 - RNA, 19 nt, Artificial Sequence
  Description of Artificial Sequence: Synthetic oligonucleotide
  Sense strand starting at position 1276 of SEQ ID NO: 1245271
aguugaacaugaguuguga

SEQ ID NO: 1549893 - RNA, 19 nt, Artificial Sequence
  Description of Artificial Sequence: Synthetic oligonucleotide
  Antisense strand to SEQ ID NO: 1549892
ucacaacucauguucaacu

SEQ ID NO: 1549894 - RNA, 19 nt, Artificial Sequence
  Description of Artificial Sequence: Synthetic oligonucleotide
  Sense strand starting at position 1278 of SEQ ID NO: 1245271
uugaacaugaguugugaaa

SEQ ID NO: 1549895 - RNA, 19 nt, Artificial Sequence
  Description of Artificial Sequence: Synthetic oligonucleotide
  Antisense strand to SEQ ID NO: 1549894
uuucacaacucauguucaa

SEQ ID NO: 1549896 - RNA, 19 nt, Artificial Sequence
  Description of Artificial Sequence: Synthetic oligonucleotide
  Sense strand starting at position 1310 of SEQ ID NO: 1245271
ucagaucugucuguccauu

SEQ ID NO: 1549897 - RNA, 19 nt, Artificial Sequence
  Description of Artificial Sequence: Synthetic oligonucleotide
  Antisense strand to SEQ ID NO: 1549896
aauggacagacagaucuga

SEQ ID NO: 1549898 - RNA, 19 nt, Artificial Sequence
  Description of Artificial Sequence: Synthetic oligonucleotide
  Sense strand starting at position 2490 of SEQ ID NO: 1245271
cgugcuuuagucguuccaa

SEQ ID NO: 1549899 - RNA, 19 nt, Artificial Sequence
  Description of Artificial Sequence: Synthetic oligonucleotide
  Antisense strand to SEQ ID NO: 1549898
uuggaacgacuaaagcacg

SEQ ID NO: 1549900 - RNA, 19 nt, Artificial Sequence
  Description of Artificial Sequence: Synthetic oligonucleotide
  Sense strand starting at position 2611 of SEQ ID NO: 1245271
uagggauaggcgggaauaa

SEQ ID NO: 1549901 - RNA, 19 nt, Artificial Sequence
  Description of Artificial Sequence: Synthetic oligonucleotide
  Antisense strand to SEQ ID NO: 1549900
uuauucccgccuaucccua

SEQ ID NO: 1549902 - RNA, 19 nt, Artificial Sequence
  Description of Artificial Sequence: Synthetic oligonucleotide
  Sense strand starting at position 2624 of SEQ ID NO: 1245271
gaauaaaccucugucggga

SEQ ID NO: 1549903 - RNA, 19 nt, Artificial Sequence
  Description of Artificial Sequence: Synthetic oligonucleotide
  Antisense strand to SEQ ID NO: 1549902
ucccgacagagguuuauuc

SEQ ID NO: 1549904 - RNA, 19 nt, Artificial Sequence
  Description of Artificial Sequence: Synthetic oligonucleotide
  Sense strand starting at position 2638 of SEQ ID NO: 1245271
cgggaacauccacggaauu

SEQ ID NO: 1549905 - RNA, 19 nt, Artificial Sequence
  Description of Artificial Sequence: Synthetic oligonucleotide
  Antisense strand to SEQ ID NO: 1549904
aauuccguggauguucccg

SEQ ID NO: 1549906 - RNA, 19 nt, Artificial Sequence
  Description of Artificial Sequence: Synthetic oligonucleotide
  Sense strand starting at position 2957 of SEQ ID NO: 1245271
cuucguugcccguuuagau

SEQ ID NO: 1549907 - RNA, 19 nt, Artificial Sequence
  Description of Artificial Sequence: Synthetic oligonucleotide
  Antisense strand to SEQ ID NO: 1549906
aucuaaacgggcaacgaag

SEQ ID NO: 1549908 - RNA, 19 nt, Artificial Sequence
  Description of Artificial Sequence: Synthetic oligonucleotide
  Sense strand starting at position 2958 of SEQ ID NO: 1245271
uucguugcccguuuagauu

SEQ ID NO: 1549909 - RNA, 19 nt, Artificial Sequence
  Description of Artificial Sequence: Synthetic oligonucleotide
  Antisense strand to SEQ ID NO: 1549908
aaucuaaacgggcaacgaa

SEQ ID NO: 1549910 - RNA, 19 nt, Artificial Sequence
  Description of Artificial Sequence: Synthetic oligonucleotide
  Sense strand starting at position 2969 of SEQ ID NO: 1245271
uuuagauuggccgcugcua

SEQ ID NO: 1549911 - RNA, 19 nt, Artificial Sequence
  Description of Artificial Sequence: Synthetic oligonucleotide
  Antisense strand to SEQ ID NO: 1549910
uagcagcggccaaucuaaa

SEQ ID NO: 1549912 - RNA, 19 nt, Artificial Sequence
  Description of Artificial Sequence: Synthetic oligonucleotide
  Sense strand starting at position 3030 of SEQ ID NO: 1245271
ggcgguaaauuugucccua

SEQ ID NO: 1549913 - RNA, 19 nt, Artificial Sequence
  Description of Artificial Sequence: Synthetic oligonucleotide
  Antisense strand to SEQ ID NO: 1549912
uagggacaaauuuaccgcc

SEQ ID NO: 1549914 - RNA, 19 nt, Artificial Sequence
  Description of Artificial Sequence: Synthetic oligonucleotide
  Sense strand starting at position 3031 of SEQ ID NO: 1245271
gcgguaaauuugucccuag

SEQ ID NO: 1549915 - RNA, 19 nt, Artificial Sequence
  Description of Artificial Sequence: Synthetic oligonucleotide
  Antisense strand to SEQ ID NO: 1549914
cuagggacaaauuuaccgc

SEQ ID NO: 1549916 - RNA, 19 nt, Artificial Sequence
  Description of Artificial Sequence: Synthetic oligonucleotide
  Sense strand starting at position 3032 of SEQ ID NO: 1245271
cgguaaauuugucccuagu

SEQ ID NO: 1549917 - RNA, 19 nt, Artificial Sequence
  Description of Artificial Sequence: Synthetic oligonucleotide
  Antisense strand to SEQ ID NO: 1549916
acuagggacaaauuuaccg

SEQ ID NO: 1549918 - RNA, 19 nt, Artificial Sequence
  Description of Artificial Sequence: Synthetic oligonucleotide
  Sense strand starting at position 3034 of SEQ ID NO: 1245271
guaaauuugucccuaguac

SEQ ID NO: 1549919 - RNA, 19 nt, Artificial Sequence
  Description of Artificial Sequence: Synthetic oligonucleotide
  Antisense strand to SEQ ID NO: 1549918
guacuagggacaaauuuac

SEQ ID NO: 1549920 - RNA, 19 nt, Artificial Sequence
  Description of Artificial Sequence: Synthetic oligonucleotide
  Sense strand starting at position 3059 of SEQ ID NO: 1245271
cucccuacucaguaaaguu

SEQ ID NO: 1549921 - RNA, 19 nt, Artificial Sequence
  Description of Artificial Sequence: Synthetic oligonucleotide
  Antisense strand to SEQ ID NO: 1549920
aacuuuacugaguagggag

SEQ ID NO: 1549922 - RNA, 19 nt, Artificial Sequence
  Description of Artificial Sequence: Synthetic oligonucleotide
  Sense strand starting at position 3142 of SEQ ID NO: 1245271
agccauuggucuuugacuu

SEQ ID NO: 1549923 - RNA, 19 nt, Artificial Sequence
  Description of Artificial Sequence: Synthetic oligonucleotide
  Antisense strand to SEQ ID NO: 1549922
aagucaaagaccaauggcu

SEQ ID NO: 1549924 - RNA, 19 nt, Artificial Sequence
  Description of Artificial Sequence: Synthetic oligonucleotide
  Sense strand starting at position 3192 of SEQ ID NO: 1245271
guagaacagucuucucuga

SEQ ID NO: 1549925 - RNA, 19 nt, Artificial Sequence
  Description of Artificial Sequence: Synthetic oligonucleotide
  Antisense strand to SEQ ID NO: 1549924
ucagagaagacuguucuac

SEQ ID NO: 1549926 - RNA, 19 nt, Artificial Sequence
  Description of Artificial Sequence: Synthetic oligonucleotide
  Sense strand starting at position 3228 of SEQ ID NO: 1245271
ugagcauggcagugacaau

SEQ ID NO: 1549927 - RNA, 19 nt, Artificial Sequence
  Description of Artificial Sequence: Synthetic oligonucleotide
  Antisense strand to SEQ ID NO: 1549926
auugucacugccaugcuca

SEQ ID NO: 1549928 - RNA, 19 nt, Artificial Sequence
  Description of Artificial Sequence: Synthetic oligonucleotide
  Sense strand starting at position 3572 of SEQ ID NO: 1245271
gauuuauuauuuggagcca

SEQ ID NO: 1549929 - RNA, 19 nt, Artificial Sequence
  Description of Artificial Sequence: Synthetic oligonucleotide
  Antisense strand to SEQ ID NO: 1549928
uggcuccaaauaauaaauc

SEQ ID NO: 1549930 - RNA, 19 nt, Artificial Sequence
  Description of Artificial Sequence: Synthetic oligonucleotide
  Sense strand starting at position 3584 of SEQ ID NO: 1245271
ggagccaauauguguggau

SEQ ID NO: 1549931 - RNA, 19 nt, Artificial Sequence
  Description of Artificial Sequence: Synthetic oligonucleotide
  Antisense strand to SEQ ID NO: 1549930
auccacacauauuggcucc

SEQ ID NO: 1549932 - RNA, 19 nt, Artificial Sequence
  Description of Artificial Sequence: Synthetic oligonucleotide
  Sense strand starting at position 3585 of SEQ ID NO: 1245271
gagccaauauguguggaua

SEQ ID NO: 1549933 - RNA, 19 nt, Artificial Sequence
  Description of Artificial Sequence: Synthetic oligonucleotide
  Antisense strand to SEQ ID NO: 1549932
uauccacacauauuggcuc

SEQ ID NO: 1549934 - RNA, 19 nt, Artificial Sequence
  Description of Artificial Sequence: Synthetic oligonucleotide
  Sense strand starting at position 3586 of SEQ ID NO: 1245271
agccaauauguguggauau

SEQ ID NO: 1549935 - RNA, 19 nt, Artificial Sequence
  Description of Artificial Sequence: Synthetic oligonucleotide
  Antisense strand to SEQ ID NO: 1549934
auauccacacauauuggcu

SEQ ID NO: 1549936 - RNA, 19 nt, Artificial Sequence
  Description of Artificial Sequence: Synthetic oligonucleotide
  Sense strand starting at position 3588 of SEQ ID NO: 1245271
ccaauauguguggauauug

SEQ ID NO: 1549937 - RNA, 19 nt, Artificial Sequence
  Description of Artificial Sequence: Synthetic oligonucleotide
  Antisense strand to SEQ ID NO: 1549936
caauauccacacauauugg

SEQ ID NO: 1549938 - RNA, 19 nt, Artificial Sequence
  Description of Artificial Sequence: Synthetic oligonucleotide
  Sense strand starting at position 3769 of SEQ ID NO: 1245271
ucuagcaugguguaaguau

SEQ ID NO: 1549939 - RNA, 19 nt, Artificial Sequence
  Description of Artificial Sequence: Synthetic oligonucleotide
  Antisense strand to SEQ ID NO: 1549938
auacuuacaccaugcuaga

SEQ ID NO: 1549940 - RNA, 19 nt, Artificial Sequence
  Description of Artificial Sequence: Synthetic oligonucleotide
  Sense strand starting at position 3783 of SEQ ID NO: 1245271
aguauaugaugccuggaaa

SEQ ID NO: 1549941 - RNA, 19 nt, Artificial Sequence
  Description of Artificial Sequence: Synthetic oligonucleotide
  Antisense strand to SEQ ID NO: 1549940
uuuccaggcaucauauacu

SEQ ID NO: 1549942 - RNA, 19 nt, Artificial Sequence
  Description of Artificial Sequence: Synthetic oligonucleotide
  Sense strand starting at position 3784 of SEQ ID NO: 1245271
guauaugaugccuggaaau

SEQ ID NO: 1549943 - RNA, 19 nt, Artificial Sequence
  Description of Artificial Sequence: Synthetic oligonucleotide
  Antisense strand to SEQ ID NO: 1549942
auuuccaggcaucauauac

SEQ ID NO: 1549944 - RNA, 19 nt, Artificial Sequence
  Description of Artificial Sequence: Synthetic oligonucleotide
  Sense strand starting at position 3786 of SEQ ID NO: 1245271
auaugaugccuggaaaugu

SEQ ID NO: 1549945 - RNA, 19 nt, Artificial Sequence
  Description of Artificial Sequence: Synthetic oligonucleotide
  Antisense strand to SEQ ID NO: 1549944
acauuuccaggcaucauau

SEQ ID NO: 1549946 - RNA, 19 nt, Artificial Sequence
  Description of Artificial Sequence: Synthetic oligonucleotide
  Sense strand starting at position 3897 of SEQ ID NO: 1245271
gucaaaugaaugcgggaaa

SEQ ID NO: 1549947 - RNA, 19 nt, Artificial Sequence
  Description of Artificial Sequence: Synthetic oligonucleotide
  Antisense strand to SEQ ID NO: 1549946
uuucccgcauucauuugac

SEQ ID NO: 1549948 - RNA, 19 nt, Artificial Sequence
  Description of Artificial Sequence: Synthetic oligonucleotide
  Sense strand starting at position 3919 of SEQ ID NO: 1245271
ggagaagaaccuuguguuu

SEQ ID NO: 1549949 - RNA, 19 nt, Artificial Sequence
  Description of Artificial Sequence: Synthetic oligonucleotide
  Antisense strand to SEQ ID NO: 1549948
aaacacaagguucuucucc

SEQ ID NO: 1549950 - RNA, 19 nt, Artificial Sequence
  Description of Artificial Sequence: Synthetic oligonucleotide
  Sense strand starting at position 35 of SEQ ID NO: 1245272
aagucacauuagggaauua

SEQ ID NO: 1549951 - RNA, 19 nt, Artificial Sequence
  Description of Artificial Sequence: Synthetic oligonucleotide
  Antisense strand to SEQ ID NO: 1549950
uaauucccuaaugugacuu

SEQ ID NO: 1549952 - RNA, 19 nt, Artificial Sequence
  Description of Artificial Sequence: Synthetic oligonucleotide
  Sense strand starting at position 165 of SEQ ID NO: 1245272
acacuugaguguucucauu

SEQ ID NO: 1549953 - RNA, 19 nt, Artificial Sequence
  Description of Artificial Sequence: Synthetic oligonucleotide
  Antisense strand to SEQ ID NO: 1549952
aaugagaacacucaagugu

SEQ ID NO: 1549954 - RNA, 19 nt, Artificial Sequence
  Description of Artificial Sequence: Synthetic oligonucleotide
  Sense strand starting at position 167 of SEQ ID NO: 1245272
acuugaguguucucauuuc

SEQ ID NO: 1549955 - RNA, 19 nt, Artificial Sequence
  Description of Artificial Sequence: Synthetic oligonucleotide
  Antisense strand to SEQ ID NO: 1549954
gaaaugagaacacucaagu

SEQ ID NO: 1549956 - RNA, 19 nt, Artificial Sequence
  Description of Artificial Sequence: Synthetic oligonucleotide
  Sense strand starting at position 175 of SEQ ID NO: 1245272
guucucauuuccuggaaau

SEQ ID NO: 1549957 - RNA, 19 nt, Artificial Sequence
  Description of Artificial Sequence: Synthetic oligonucleotide
  Antisense strand to SEQ ID NO: 1549956
auuuccaggaaaugagaac

SEQ ID NO: 1549958 - RNA, 19 nt, Artificial Sequence
  Description of Artificial Sequence: Synthetic oligonucleotide
  Sense strand starting at position 304 of SEQ ID NO: 1245272
uggaaauccucccagauuu

SEQ ID NO: 1549959 - RNA, 19 nt, Artificial Sequence
  Description of Artificial Sequence: Synthetic oligonucleotide
  Antisense strand to SEQ ID NO: 1549958
aaaucugggaggauuucca

SEQ ID NO: 1549960 - RNA, 19 nt, Artificial Sequence
  Description of Artificial Sequence: Synthetic oligonucleotide
  Sense strand starting at position 432 of SEQ ID NO: 1245272
ggccuuugcagcgagaagu

SEQ ID NO: 1549961 - RNA, 19 nt, Artificial Sequence
  Description of Artificial Sequence: Synthetic oligonucleotide
  Antisense strand to SEQ ID NO: 1549960
acuucucgcugcaaaggcc

SEQ ID NO: 1549962 - RNA, 19 nt, Artificial Sequence
  Description of Artificial Sequence: Synthetic oligonucleotide
  Sense strand starting at position 442 of SEQ ID NO: 1245272
gcgagaaguuugguuggau

SEQ ID NO: 1549963 - RNA, 19 nt, Artificial Sequence
  Description of Artificial Sequence: Synthetic oligonucleotide
  Antisense strand to SEQ ID NO: 1549962
auccaaccaaacuucucgc

SEQ ID NO: 1549964 - RNA, 19 nt, Artificial Sequence
  Description of Artificial Sequence: Synthetic oligonucleotide
  Sense strand starting at position 443 of SEQ ID NO: 1245272
cgagaaguuugguuggaug

SEQ ID NO: 1549965 - RNA, 19 nt, Artificial Sequence
  Description of Artificial Sequence: Synthetic oligonucleotide
  Antisense strand to SEQ ID NO: 1549964
cauccaaccaaacuucucg

SEQ ID NO: 1549966 - RNA, 19 nt, Artificial Sequence
  Description of Artificial Sequence: Synthetic oligonucleotide
  Sense strand starting at position 493 of SEQ ID NO: 1245272
auaaauccacccgaaguuu

SEQ ID NO: 1549967 - RNA, 19 nt, Artificial Sequence
  Description of Artificial Sequence: Synthetic oligonucleotide
  Antisense strand to SEQ ID NO: 1549966
aaacuucggguggauuuau

SEQ ID NO: 1549968 - RNA, 19 nt, Artificial Sequence
  Description of Artificial Sequence: Synthetic oligonucleotide
  Sense strand starting at position 528 of SEQ ID NO: 1245272
ggcccuucgcaaggaaaca

SEQ ID NO: 1549969 - RNA, 19 nt, Artificial Sequence
  Description of Artificial Sequence: Synthetic oligonucleotide
  Antisense strand to SEQ ID NO: 1549968
uguuuccuugcgaagggcc

SEQ ID NO: 1549970 - RNA, 19 nt, Artificial Sequence
  Description of Artificial Sequence: Synthetic oligonucleotide
  Sense strand starting at position 565 of SEQ ID NO: 1245272
cgguauucgcagcuaguga

SEQ ID NO: 1549971 - RNA, 19 nt, Artificial Sequence
  Description of Artificial Sequence: Synthetic oligonucleotide
  Antisense strand to SEQ ID NO: 1549970
ucacuagcugcgaauaccg

SEQ ID NO: 1549972 - RNA, 19 nt, Artificial Sequence
  Description of Artificial Sequence: Synthetic oligonucleotide
  Sense strand starting at position 663 of SEQ ID NO: 1245272
ccuuccuggcuaugucuaa

SEQ ID NO: 1549973 - RNA, 19 nt, Artificial Sequence
  Description of Artificial Sequence: Synthetic oligonucleotide
  Antisense strand to SEQ ID NO: 1549972
uuagacauagccaggaagg

SEQ ID NO: 1549974 - RNA, 19 nt, Artificial Sequence
  Description of Artificial Sequence: Synthetic oligonucleotide
  Sense strand starting at position 664 of SEQ ID NO: 1245272
cuuccuggcuaugucuaau

SEQ ID NO: 1549975 - RNA, 19 nt, Artificial Sequence
  Description of Artificial Sequence: Synthetic oligonucleotide
  Antisense strand to SEQ ID NO: 1549974
auuagacauagccaggaag

SEQ ID NO: 1549976 - RNA, 19 nt, Artificial Sequence
  Description of Artificial Sequence: Synthetic oligonucleotide
  Sense strand starting at position 823 of SEQ ID NO: 1245272
gugccucucccuugagacu

SEQ ID NO: 1549977 - RNA, 19 nt, Artificial Sequence
  Description of Artificial Sequence: Synthetic oligonucleotide
  Antisense strand to SEQ ID NO: 1549976
agucucaagggagaggcac

SEQ ID NO: 1549978 - RNA, 19 nt, Artificial Sequence
  Description of Artificial Sequence: Synthetic oligonucleotide
  Sense strand starting at position 889 of SEQ ID NO: 1245272
cgugaauuccgagaagcau

SEQ ID NO: 1549979 - RNA, 19 nt, Artificial Sequence
  Description of Artificial Sequence: Synthetic oligonucleotide
  Antisense strand to SEQ ID NO: 1549978
augcuucucggaauucacg

SEQ ID NO: 1549980 - RNA, 19 nt, Artificial Sequence
  Description of Artificial Sequence: Synthetic oligonucleotide
  Sense strand starting at position 900 of SEQ ID NO: 1245272
agaagcauuggcugcaauu

SEQ ID NO: 1549981 - RNA, 19 nt, Artificial Sequence
  Description of Artificial Sequence: Synthetic oligonucleotide
  Antisense strand to SEQ ID NO: 1549980
aauugcagccaaugcuucu

SEQ ID NO: 1549982 - RNA, 19 nt, Artificial Sequence
  Description of Artificial Sequence: Synthetic oligonucleotide
  Sense strand starting at position 1116 of SEQ ID NO: 1245272
ggcuguuccuccucugaca

SEQ ID NO: 1549983 - RNA, 19 nt, Artificial Sequence
  Description of Artificial Sequence: Synthetic oligonucleotide
  Antisense strand to SEQ ID NO: 1549982
ugucagaggaggaacagcc

SEQ ID NO: 1549984 - RNA, 19 nt, Artificial Sequence
  Description of Artificial Sequence: Synthetic oligonucleotide
  Sense strand starting at position 1361 of SEQ ID NO: 1245272
guccuaagcuuucucugaa

SEQ ID NO: 1549985 - RNA, 19 nt, Artificial Sequence
  Description of Artificial Sequence: Synthetic oligonucleotide
  Antisense strand to SEQ ID NO: 1549984
uucagagaaagcuuaggac

SEQ ID NO: 1549986 - RNA, 19 nt, Artificial Sequence
  Description of Artificial Sequence: Synthetic oligonucleotide
  Sense strand starting at position 1368 of SEQ ID NO: 1245272
gcuuucucugaaugcaaau

SEQ ID NO: 1549987 - RNA, 19 nt, Artificial Sequence
  Description of Artificial Sequence: Synthetic oligonucleotide
  Antisense strand to SEQ ID NO: 1549986
auuugcauucagagaaagc

SEQ ID NO: 1549988 - RNA, 19 nt, Artificial Sequence
  Description of Artificial Sequence: Synthetic oligonucleotide
  Sense strand starting at position 2540 of SEQ ID NO: 1245272
gcacucgucgcaguuugaa

SEQ ID NO: 1549989 - RNA, 19 nt, Artificial Sequence
  Description of Artificial Sequence: Synthetic oligonucleotide
  Antisense strand to SEQ ID NO: 1549988
uucaaacugcgacgagugc

SEQ ID NO: 1549990 - RNA, 19 nt, Artificial Sequence
  Description of Artificial Sequence: Synthetic oligonucleotide
  Sense strand starting at position 2542 of SEQ ID NO: 1245272
acucgucgcaguuugaauu

SEQ ID NO: 1549991 - RNA, 19 nt, Artificial Sequence
  Description of Artificial Sequence: Synthetic oligonucleotide
  Antisense strand to SEQ ID NO: 1549990
aauucaaacugcgacgagu

SEQ ID NO: 1549992 - RNA, 19 nt, Artificial Sequence
  Description of Artificial Sequence: Synthetic oligonucleotide
  Sense strand starting at position 2632 of SEQ ID NO: 1245272
uuuaguuuguccgucuaua

SEQ ID NO: 1549993 - RNA, 19 nt, Artificial Sequence
  Description of Artificial Sequence: Synthetic oligonucleotide
  Antisense strand to SEQ ID NO: 1549992
uauagacggacaaacuaaa

SEQ ID NO: 1549994 - RNA, 19 nt, Artificial Sequence
  Description of Artificial Sequence: Synthetic oligonucleotide
  Sense strand starting at position 2641 of SEQ ID NO: 1245272
uccgucuauaucuguugua

SEQ ID NO: 1549995 - RNA, 19 nt, Artificial Sequence
  Description of Artificial Sequence: Synthetic oligonucleotide
  Antisense strand to SEQ ID NO: 1549994
uacaacagauauagacgga

SEQ ID NO: 1549996 - RNA, 19 nt, Artificial Sequence
  Description of Artificial Sequence: Synthetic oligonucleotide
  Sense strand starting at position 2642 of SEQ ID NO: 1245272
ccgucuauaucuguuguaa

SEQ ID NO: 1549997 - RNA, 19 nt, Artificial Sequence
  Description of Artificial Sequence: Synthetic oligonucleotide
  Antisense strand to SEQ ID NO: 1549996
uuacaacagauauagacgg

SEQ ID NO: 1549998 - RNA, 19 nt, Artificial Sequence
  Description of Artificial Sequence: Synthetic oligonucleotide
  Sense strand starting at position 2653 of SEQ ID NO: 1245272
uguuguaacuccucccagu

SEQ ID NO: 1549999 - RNA, 19 nt, Artificial Sequence
  Description of Artificial Sequence: Synthetic oligonucleotide
  Antisense strand to SEQ ID NO: 1549998
acugggaggaguuacaaca

SEQ ID NO: 1550000 - RNA, 19 nt, Artificial Sequence
  Description of Artificial Sequence: Synthetic oligonucleotide
  Sense strand starting at position 2728 of SEQ ID NO: 1245272
gccauuuauguccgcaagu

SEQ ID NO: 1550001 - RNA, 19 nt, Artificial Sequence
  Description of Artificial Sequence: Synthetic oligonucleotide
  Antisense strand to SEQ ID NO: 1550000
acuugcggacauaaauggc

SEQ ID NO: 1550002 - RNA, 19 nt, Artificial Sequence
  Description of Artificial Sequence: Synthetic oligonucleotide
  Sense strand starting at position 2729 of SEQ ID NO: 1245272
ccauuuauguccgcaaguc

SEQ ID NO: 1550003 - RNA, 19 nt, Artificial Sequence
  Description of Artificial Sequence: Synthetic oligonucleotide
  Antisense strand to SEQ ID NO: 1550002
gacuugcggacauaaaugg

SEQ ID NO: 1550004 - RNA, 19 nt, Artificial Sequence
  Description of Artificial Sequence: Synthetic oligonucleotide
  Sense strand starting at position 3013 of SEQ ID NO: 1245272
gaguaauuggcuugcaguu

SEQ ID NO: 1550005 - RNA, 19 nt, Artificial Sequence
  Description of Artificial Sequence: Synthetic oligonucleotide
  Antisense strand to SEQ ID NO: 1550004
aacugcaagccaauuacuc

SEQ ID NO: 1550006 - RNA, 19 nt, Artificial Sequence
  Description of Artificial Sequence: Synthetic oligonucleotide
  Sense strand starting at position 3107 of SEQ ID NO: 1245272
gggugaguguguuucaccu

SEQ ID NO: 1550007 - RNA, 19 nt, Artificial Sequence
  Description of Artificial Sequence: Synthetic oligonucleotide
  Antisense strand to SEQ ID NO: 1550006
aggugaaacacacucaccc

SEQ ID NO: 1550008 - RNA, 19 nt, Artificial Sequence
  Description of Artificial Sequence: Synthetic oligonucleotide
  Sense strand starting at position 3140 of SEQ ID NO: 1245272
ggacaauggcgcugugaac

SEQ ID NO: 1550009 - RNA, 19 nt, Artificial Sequence
  Description of Artificial Sequence: Synthetic oligonucleotide
  Antisense strand to SEQ ID NO: 1550008
guucacagcgccauugucc

SEQ ID NO: 1550010 - RNA, 19 nt, Artificial Sequence
  Description of Artificial Sequence: Synthetic oligonucleotide
  Sense strand starting at position 3219 of SEQ ID NO: 1245272
uggccugaaccgugaauua

SEQ ID NO: 1550011 - RNA, 19 nt, Artificial Sequence
  Description of Artificial Sequence: Synthetic oligonucleotide
  Antisense strand to SEQ ID NO: 1550010
uaauucacgguucaggcca

SEQ ID NO: 1550012 - RNA, 19 nt, Artificial Sequence
  Description of Artificial Sequence: Synthetic oligonucleotide
  Sense strand starting at position 3338 of SEQ ID NO: 1245272
ucccgcuugcguucagaca

SEQ ID NO: 1550013 - RNA, 19 nt, Artificial Sequence
  Description of Artificial Sequence: Synthetic oligonucleotide
  Antisense strand to SEQ ID NO: 1550012
ugucugaacgcaagcggga

SEQ ID NO: 1550014 - RNA, 19 nt, Artificial Sequence
  Description of Artificial Sequence: Synthetic oligonucleotide
  Sense strand starting at position 3339 of SEQ ID NO: 1245272
cccgcuugcguucagacaa

SEQ ID NO: 1550015 - RNA, 19 nt, Artificial Sequence
  Description of Artificial Sequence: Synthetic oligonucleotide
  Antisense strand to SEQ ID NO: 1550014
uugucugaacgcaagcggg

SEQ ID NO: 1550016 - RNA, 19 nt, Artificial Sequence
  Description of Artificial Sequence: Synthetic oligonucleotide
  Sense strand starting at position 3459 of SEQ ID NO: 1245272
uaacguccagucuggaaga

SEQ ID NO: 1550017 - RNA, 19 nt, Artificial Sequence
  Description of Artificial Sequence: Synthetic oligonucleotide
  Antisense strand to SEQ ID NO: 1550016
ucuuccagacuggacguua

SEQ ID NO: 1550018 - RNA, 19 nt, Artificial Sequence
  Description of Artificial Sequence: Synthetic oligonucleotide
  Sense strand starting at position 3530 of SEQ ID NO: 1245272
ugguguuagaaggauguuu

SEQ ID NO: 1550019 - RNA, 19 nt, Artificial Sequence
  Description of Artificial Sequence: Synthetic oligonucleotide
  Antisense strand to SEQ ID NO: 1550018
aaacauccuucuaacacca

SEQ ID NO: 1550020 - RNA, 19 nt, Artificial Sequence
  Description of Artificial Sequence: Synthetic oligonucleotide
  Sense strand starting at position 3542 of SEQ ID NO: 1245272
gauguuugcggaggacaag

SEQ ID NO: 1550021 - RNA, 19 nt, Artificial Sequence
  Description of Artificial Sequence: Synthetic oligonucleotide
  Antisense strand to SEQ ID NO: 1550020
cuuguccuccgcaaacauc

SEQ ID NO: 1550022 - RNA, 19 nt, Artificial Sequence
  Description of Artificial Sequence: Synthetic oligonucleotide
  Sense strand starting at position 3595 of SEQ ID NO: 1245272
ccaugaugggcauaucuac

SEQ ID NO: 1550023 - RNA, 19 nt, Artificial Sequence
  Description of Artificial Sequence: Synthetic oligonucleotide
  Antisense strand to SEQ ID NO: 1550022
guagauaugcccaucaugg

SEQ ID NO: 1550024 - RNA, 19 nt, Artificial Sequence
  Description of Artificial Sequence: Synthetic oligonucleotide
  Sense strand starting at position 3882 of SEQ ID NO: 1245272
ucaagcaauucucucgaca

SEQ ID NO: 1550025 - RNA, 19 nt, Artificial Sequence
  Description of Artificial Sequence: Synthetic oligonucleotide
  Antisense strand to SEQ ID NO: 1550024
ugucgagagaauugcuuga

SEQ ID NO: 1550026 - RNA, 19 nt, Artificial Sequence
  Description of Artificial Sequence: Synthetic oligonucleotide
  Sense strand starting at position 3885 of SEQ ID NO: 1245272
agcaauucucucgacaugu

SEQ ID NO: 1550027 - RNA, 19 nt, Artificial Sequence
  Description of Artificial Sequence: Synthetic oligonucleotide
  Antisense strand to SEQ ID NO: 1550026
acaugucgagagaauugcu

SEQ ID NO: 1550028 - RNA, 19 nt, Artificial Sequence
  Description of Artificial Sequence: Synthetic oligonucleotide
  Sense strand starting at position 3894 of SEQ ID NO: 1245272
cucgacaugucacuuugua

SEQ ID NO: 1550029 - RNA, 19 nt, Artificial Sequence
  Description of Artificial Sequence: Synthetic oligonucleotide
  Antisense strand to SEQ ID NO: 1550028
uacaaagugacaugucgag

SEQ ID NO: 1550030 - RNA, 19 nt, Artificial Sequence
  Description of Artificial Sequence: Synthetic oligonucleotide
  Sense strand starting at position 7 of SEQ ID NO: 1245273
cucugcgauuugcuugaaa

SEQ ID NO: 1550031 - RNA, 19 nt, Artificial Sequence
  Description of Artificial Sequence: Synthetic oligonucleotide
  Antisense strand to SEQ ID NO: 1550030
uuucaagcaaaucgcagag

SEQ ID NO: 1550032 - RNA, 19 nt, Artificial Sequence
  Description of Artificial Sequence: Synthetic oligonucleotide
  Sense strand starting at position 54 of SEQ ID NO: 1245273
aauggauguugggugaaga

SEQ ID NO: 1550033 - RNA, 19 nt, Artificial Sequence
  Description of Artificial Sequence: Synthetic oligonucleotide
  Antisense strand to SEQ ID NO: 1550032
ucuucacccaacauccauu

SEQ ID NO: 1550034 - RNA, 19 nt, Artificial Sequence
  Description of Artificial Sequence: Synthetic oligonucleotide
  Sense strand starting at position 142 of SEQ ID NO: 1245273
uccaguauuucucuugugu

SEQ ID NO: 1550035 - RNA, 19 nt, Artificial Sequence
  Description of Artificial Sequence: Synthetic oligonucleotide
  Antisense strand to SEQ ID NO: 1550034
acacaagagaaauacugga

SEQ ID NO: 1550036 - RNA, 19 nt, Artificial Sequence
  Description of Artificial Sequence: Synthetic oligonucleotide
  Sense strand starting at position 466 of SEQ ID NO: 1245273
ggcguaaggcaguaaaugu

SEQ ID NO: 1550037 - RNA, 19 nt, Artificial Sequence
  Description of Artificial Sequence: Synthetic oligonucleotide
  Antisense strand to SEQ ID NO: 1550036
acauuuacugccuuacgcc

SEQ ID NO: 1550038 - RNA, 19 nt, Artificial Sequence
  Description of Artificial Sequence: Synthetic oligonucleotide
  Sense strand starting at position 473 of SEQ ID NO: 1245273
ggcaguaaauguccaaggu

SEQ ID NO: 1550039 - RNA, 19 nt, Artificial Sequence
  Description of Artificial Sequence: Synthetic oligonucleotide
  Antisense strand to SEQ ID NO: 1550038
accuuggacauuuacugcc

SEQ ID NO: 1550040 - RNA, 19 nt, Artificial Sequence
  Description of Artificial Sequence: Synthetic oligonucleotide
  Sense strand starting at position 477 of SEQ ID NO: 1245273
guaaauguccaaggucaca

SEQ ID NO: 1550041 - RNA, 19 nt, Artificial Sequence
  Description of Artificial Sequence: Synthetic oligonucleotide
  Antisense strand to SEQ ID NO: 1550040
ugugaccuuggacauuuac

SEQ ID NO: 1550042 - RNA, 19 nt, Artificial Sequence
  Description of Artificial Sequence: Synthetic oligonucleotide
  Sense strand starting at position 507 of SEQ ID NO: 1245273
uggcuaugucagggaugga

SEQ ID NO: 1550043 - RNA, 19 nt, Artificial Sequence
  Description of Artificial Sequence: Synthetic oligonucleotide
  Antisense strand to SEQ ID NO: 1550042
uccaucccugacauagcca

SEQ ID NO: 1550044 - RNA, 19 nt, Artificial Sequence
  Description of Artificial Sequence: Synthetic oligonucleotide
  Sense strand starting at position 869 of SEQ ID NO: 1245273
cuauuaagucaacaguuua

SEQ ID NO: 1550045 - RNA, 19 nt, Artificial Sequence
  Description of Artificial Sequence: Synthetic oligonucleotide
  Antisense strand to SEQ ID NO: 1550044
uaaacuguugacuuaauag

SEQ ID NO: 1550046 - RNA, 19 nt, Artificial Sequence
  Description of Artificial Sequence: Synthetic oligonucleotide
  Sense strand starting at position 952 of SEQ ID NO: 1245273
auaagcauccuuuacguau

SEQ ID NO: 1550047 - RNA, 19 nt, Artificial Sequence
  Description of Artificial Sequence: Synthetic oligonucleotide
  Antisense strand to SEQ ID NO: 1550046
auacguaaaggaugcuuau

SEQ ID NO: 1550048 - RNA, 19 nt, Artificial Sequence
  Description of Artificial Sequence: Synthetic oligonucleotide
  Sense strand starting at position 2237 of SEQ ID NO: 1245273
gcccuugcgguucugugaa

SEQ ID NO: 1550049 - RNA, 19 nt, Artificial Sequence
  Description of Artificial Sequence: Synthetic oligonucleotide
  Antisense strand to SEQ ID NO: 1550048
uucacagaaccgcaagggc

SEQ ID NO: 1550050 - RNA, 19 nt, Artificial Sequence
  Description of Artificial Sequence: Synthetic oligonucleotide
  Sense strand starting at position 2247 of SEQ ID NO: 1245273
uucugugaaaguuaucugu

SEQ ID NO: 1550051 - RNA, 19 nt, Artificial Sequence
  Description of Artificial Sequence: Synthetic oligonucleotide
  Antisense strand to SEQ ID NO: 1550050
acagauaacuuucacagaa

SEQ ID NO: 1550052 - RNA, 19 nt, Artificial Sequence
  Description of Artificial Sequence: Synthetic oligonucleotide
  Sense strand starting at position 2249 of SEQ ID NO: 1245273
cugugaaaguuaucuguac

SEQ ID NO: 1550053 - RNA, 19 nt, Artificial Sequence
  Description of Artificial Sequence: Synthetic oligonucleotide
  Antisense strand to SEQ ID NO: 1550052
guacagauaacuuucacag

SEQ ID NO: 1550054 - RNA, 19 nt, Artificial Sequence
  Description of Artificial Sequence: Synthetic oligonucleotide
  Sense strand starting at position 2250 of SEQ ID NO: 1245273
ugugaaaguuaucuguaca

SEQ ID NO: 1550055 - RNA, 19 nt, Artificial Sequence
  Description of Artificial Sequence: Synthetic oligonucleotide
  Antisense strand to SEQ ID NO: 1550054
uguacagauaacuuucaca

SEQ ID NO: 1550056 - RNA, 19 nt, Artificial Sequence
  Description of Artificial Sequence: Synthetic oligonucleotide
  Sense strand starting at position 2251 of SEQ ID NO: 1245273
gugaaaguuaucuguacac

SEQ ID NO: 1550057 - RNA, 19 nt, Artificial Sequence
  Description of Artificial Sequence: Synthetic oligonucleotide
  Antisense strand to SEQ ID NO: 1550056
guguacagauaacuuucac

SEQ ID NO: 1550058 - RNA, 19 nt, Artificial Sequence
  Description of Artificial Sequence: Synthetic oligonucleotide
  Sense strand starting at position 2253 of SEQ ID NO: 1245273
gaaaguuaucuguacacug

SEQ ID NO: 1550059 - RNA, 19 nt, Artificial Sequence
  Description of Artificial Sequence: Synthetic oligonucleotide
  Antisense strand to SEQ ID NO: 1550058
caguguacagauaacuuuc

SEQ ID NO: 1550060 - RNA, 19 nt, Artificial Sequence
  Description of Artificial Sequence: Synthetic oligonucleotide
  Sense strand starting at position 2264 of SEQ ID NO: 1245273
guacacugugucuagcuua

SEQ ID NO: 1550061 - RNA, 19 nt, Artificial Sequence
  Description of Artificial Sequence: Synthetic oligonucleotide
  Antisense strand to SEQ ID NO: 1550060
uaagcuagacacaguguac

SEQ ID NO: 1550062 - RNA, 19 nt, Artificial Sequence
  Description of Artificial Sequence: Synthetic oligonucleotide
  Sense strand starting at position 2306 of SEQ ID NO: 1245273
uagagugaccuguaccgaa

SEQ ID NO: 1550063 - RNA, 19 nt, Artificial Sequence
  Description of Artificial Sequence: Synthetic oligonucleotide
  Antisense strand to SEQ ID NO: 1550062
uucgguacaggucacucua

SEQ ID NO: 1550064 - RNA, 19 nt, Artificial Sequence
  Description of Artificial Sequence: Synthetic oligonucleotide
  Sense strand starting at position 2310 of SEQ ID NO: 1245273
gugaccuguaccgaaugaa

SEQ ID NO: 1550065 - RNA, 19 nt, Artificial Sequence
  Description of Artificial Sequence: Synthetic oligonucleotide
  Antisense strand to SEQ ID NO: 1550064
uucauucgguacaggucac

SEQ ID NO: 1550066 - RNA, 19 nt, Artificial Sequence
  Description of Artificial Sequence: Synthetic oligonucleotide
  Sense strand starting at position 2384 of SEQ ID NO: 1245273
ggccuugucgcuguuaucu

SEQ ID NO: 1550067 - RNA, 19 nt, Artificial Sequence
  Description of Artificial Sequence: Synthetic oligonucleotide
  Antisense strand to SEQ ID NO: 1550066
agauaacagcgacaaggcc

SEQ ID NO: 1550068 - RNA, 19 nt, Artificial Sequence
  Description of Artificial Sequence: Synthetic oligonucleotide
  Sense strand starting at position 2397 of SEQ ID NO: 1245273
uuaucugcaguuuagugau

SEQ ID NO: 1550069 - RNA, 19 nt, Artificial Sequence
  Description of Artificial Sequence: Synthetic oligonucleotide
  Antisense strand to SEQ ID NO: 1550068
aucacuaaacugcagauaa

SEQ ID NO: 1550070 - RNA, 19 nt, Artificial Sequence
  Description of Artificial Sequence: Synthetic oligonucleotide
  Sense strand starting at position 2434 of SEQ ID NO: 1245273
gcgguaacgccauagauca

SEQ ID NO: 1550071 - RNA, 19 nt, Artificial Sequence
  Description of Artificial Sequence: Synthetic oligonucleotide
  Antisense strand to SEQ ID NO: 1550070
ugaucuauggcguuaccgc

SEQ ID NO: 1550072 - RNA, 19 nt, Artificial Sequence
  Description of Artificial Sequence: Synthetic oligonucleotide
  Sense strand starting at position 2436 of SEQ ID NO: 1245273
gguaacgccauagaucaaa

SEQ ID NO: 1550073 - RNA, 19 nt, Artificial Sequence
  Description of Artificial Sequence: Synthetic oligonucleotide
  Antisense strand to SEQ ID NO: 1550072
uuugaucuauggcguuacc

SEQ ID NO: 1550074 - RNA, 19 nt, Artificial Sequence
  Description of Artificial Sequence: Synthetic oligonucleotide
  Sense strand starting at position 2471 of SEQ ID NO: 1245273
ugagguuaaacgggaaguu

SEQ ID NO: 1550075 - RNA, 19 nt, Artificial Sequence
  Description of Artificial Sequence: Synthetic oligonucleotide
  Antisense strand to SEQ ID NO: 1550074
aacuucccguuuaaccuca

SEQ ID NO: 1550076 - RNA, 19 nt, Artificial Sequence
  Description of Artificial Sequence: Synthetic oligonucleotide
  Sense strand starting at position 2472 of SEQ ID NO: 1245273
gagguuaaacgggaaguuu

SEQ ID NO: 1550077 - RNA, 19 nt, Artificial Sequence
  Description of Artificial Sequence: Synthetic oligonucleotide
  Antisense strand to SEQ ID NO: 1550076
aaacuucccguuuaaccuc

SEQ ID NO: 1550078 - RNA, 19 nt, Artificial Sequence
  Description of Artificial Sequence: Synthetic oligonucleotide
  Sense strand starting at position 2483 of SEQ ID NO: 1245273
ggaaguuucuggcaaauuu

SEQ ID NO: 1550079 - RNA, 19 nt, Artificial Sequence
  Description of Artificial Sequence: Synthetic oligonucleotide
  Antisense strand to SEQ ID NO: 1550078
aaauuugccagaaacuucc

SEQ ID NO: 1550080 - RNA, 19 nt, Artificial Sequence
  Description of Artificial Sequence: Synthetic oligonucleotide
  Sense strand starting at position 2524 of SEQ ID NO: 1245273
agcauuauuuauugggaca

SEQ ID NO: 1550081 - RNA, 19 nt, Artificial Sequence
  Description of Artificial Sequence: Synthetic oligonucleotide
  Antisense strand to SEQ ID NO: 1550080
ugucccaauaaauaaugcu

SEQ ID NO: 1550082 - RNA, 19 nt, Artificial Sequence
  Description of Artificial Sequence: Synthetic oligonucleotide
  Sense strand starting at position 2527 of SEQ ID NO: 1245273
auuauuuauugggacaaca

SEQ ID NO: 1550083 - RNA, 19 nt, Artificial Sequence
  Description of Artificial Sequence: Synthetic oligonucleotide
  Antisense strand to SEQ ID NO: 1550082
uguugucccaauaaauaau

SEQ ID NO: 1550084 - RNA, 19 nt, Artificial Sequence
  Description of Artificial Sequence: Synthetic oligonucleotide
  Sense strand starting at position 2585 of SEQ ID NO: 1245273
guggcuguucguuugagau

SEQ ID NO: 1550085 - RNA, 19 nt, Artificial Sequence
  Description of Artificial Sequence: Synthetic oligonucleotide
  Antisense strand to SEQ ID NO: 1550084
aucucaaacgaacagccac

SEQ ID NO: 1550086 - RNA, 19 nt, Artificial Sequence
  Description of Artificial Sequence: Synthetic oligonucleotide
  Sense strand starting at position 2611 of SEQ ID NO: 1245273
gauaguagguauuccuauu

SEQ ID NO: 1550087 - RNA, 19 nt, Artificial Sequence
  Description of Artificial Sequence: Synthetic oligonucleotide
  Antisense strand to SEQ ID NO: 1550086
aauaggaauaccuacuauc

SEQ ID NO: 1550088 - RNA, 19 nt, Artificial Sequence
  Description of Artificial Sequence: Synthetic oligonucleotide
  Sense strand starting at position 2900 of SEQ ID NO: 1245273
cuucuauuagccuguuaca

SEQ ID NO: 1550089 - RNA, 19 nt, Artificial Sequence
  Description of Artificial Sequence: Synthetic oligonucleotide
  Antisense strand to SEQ ID NO: 1550088
uguaacaggcuaauagaag

SEQ ID NO: 1550090 - RNA, 19 nt, Artificial Sequence
  Description of Artificial Sequence: Synthetic oligonucleotide
  Sense strand starting at position 3075 of SEQ ID NO: 1245273
uuugucauuuaacagagua

SEQ ID NO: 1550091 - RNA, 19 nt, Artificial Sequence
  Description of Artificial Sequence: Synthetic oligonucleotide
  Antisense strand to SEQ ID NO: 1550090
uacucuguuaaaugacaaa

SEQ ID NO: 1550092 - RNA, 19 nt, Artificial Sequence
  Description of Artificial Sequence: Synthetic oligonucleotide
  Sense strand starting at position 3118 of SEQ ID NO: 1245273
ucuacugugguccaaagaa

SEQ ID NO: 1550093 - RNA, 19 nt, Artificial Sequence
  Description of Artificial Sequence: Synthetic oligonucleotide
  Antisense strand to SEQ ID NO: 1550092
uucuuuggaccacaguaga

SEQ ID NO: 1550094 - RNA, 19 nt, Artificial Sequence
  Description of Artificial Sequence: Synthetic oligonucleotide
  Sense strand starting at position 3216 of SEQ ID NO: 1245273
accaaagagucauccuuga

SEQ ID NO: 1550095 - RNA, 19 nt, Artificial Sequence
  Description of Artificial Sequence: Synthetic oligonucleotide
  Antisense strand to SEQ ID NO: 1550094
ucaaggaugacucuuuggu

SEQ ID NO: 1550096 - RNA, 19 nt, Artificial Sequence
  Description of Artificial Sequence: Synthetic oligonucleotide
  Sense strand starting at position 3346 of SEQ ID NO: 1245273
acuguuauuucuuaccuag

SEQ ID NO: 1550097 - RNA, 19 nt, Artificial Sequence
  Description of Artificial Sequence: Synthetic oligonucleotide
  Antisense strand to SEQ ID NO: 1550096
cuagguaagaaauaacagu

SEQ ID NO: 1550098 - RNA, 19 nt, Artificial Sequence
  Description of Artificial Sequence: Synthetic oligonucleotide
  Sense strand starting at position 3348 of SEQ ID NO: 1245273
uguuauuucuuaccuaguc

SEQ ID NO: 1550099 - RNA, 19 nt, Artificial Sequence
  Description of Artificial Sequence: Synthetic oligonucleotide
  Antisense strand to SEQ ID NO: 1550098
gacuagguaagaaauaaca

SEQ ID NO: 1550100 - RNA, 19 nt, Artificial Sequence
  Description of Artificial Sequence: Synthetic oligonucleotide
  Sense strand starting at position 3349 of SEQ ID NO: 1245273
guuauuucuuaccuagucu

SEQ ID NO: 1550101 - RNA, 19 nt, Artificial Sequence
  Description of Artificial Sequence: Synthetic oligonucleotide
  Antisense strand to SEQ ID NO: 1550100
agacuagguaagaaauaac

SEQ ID NO: 1550102 - RNA, 19 nt, Artificial Sequence
  Description of Artificial Sequence: Synthetic oligonucleotide
  Sense strand starting at position 3577 of SEQ ID NO: 1245273
uuccuuacugagugacuuu

SEQ ID NO: 1550103 - RNA, 19 nt, Artificial Sequence
  Description of Artificial Sequence: Synthetic oligonucleotide
  Antisense strand to SEQ ID NO: 1550102
aaagucacucaguaaggaa

SEQ ID NO: 1550104 - RNA, 19 nt, Artificial Sequence
  Description of Artificial Sequence: Synthetic oligonucleotide
  Sense strand starting at position 3839 of SEQ ID NO: 1245273
cuuaaauugugucuacuuu

SEQ ID NO: 1550105 - RNA, 19 nt, Artificial Sequence
  Description of Artificial Sequence: Synthetic oligonucleotide
  Antisense strand to SEQ ID NO: 1550104
aaaguagacacaauuuaag

SEQ ID NO: 1550106 - RNA, 19 nt, Artificial Sequence
  Description of Artificial Sequence: Synthetic oligonucleotide
  Sense strand starting at position 3843 of SEQ ID NO: 1245273
aauugugucuacuuugaga

SEQ ID NO: 1550107 - RNA, 19 nt, Artificial Sequence
  Description of Artificial Sequence: Synthetic oligonucleotide
  Antisense strand to SEQ ID NO: 1550106
ucucaaaguagacacaauu

SEQ ID NO: 1550108 - RNA, 19 nt, Artificial Sequence
  Description of Artificial Sequence: Synthetic oligonucleotide
  Sense strand starting at position 3878 of SEQ ID NO: 1245273
cagcuacugugaucuugaa

SEQ ID NO: 1550109 - RNA, 19 nt, Artificial Sequence
  Description of Artificial Sequence: Synthetic oligonucleotide
  Antisense strand to SEQ ID NO: 1550108
uucaagaucacaguagcug

SEQ ID NO: 1550110 - RNA, 19 nt, Artificial Sequence
  Description of Artificial Sequence: Synthetic oligonucleotide
  Sense strand starting at position 48 of SEQ ID NO: 1245274
aaaggugaaucauuaaguu

SEQ ID NO: 1550111 - RNA, 19 nt, Artificial Sequence
  Description of Artificial Sequence: Synthetic oligonucleotide
  Antisense strand to SEQ ID NO: 1550110
aacuuaaugauucaccuuu

SEQ ID NO: 1550112 - RNA, 19 nt, Artificial Sequence
  Description of Artificial Sequence: Synthetic oligonucleotide
  Sense strand starting at position 68 of SEQ ID NO: 1245274
auuacauaguccuugaaga

SEQ ID NO: 1550113 - RNA, 19 nt, Artificial Sequence
  Description of Artificial Sequence: Synthetic oligonucleotide
  Antisense strand to SEQ ID NO: 1550112
ucuucaaggacuauguaau

SEQ ID NO: 1550114 - RNA, 19 nt, Artificial Sequence
  Description of Artificial Sequence: Synthetic oligonucleotide
  Sense strand starting at position 69 of SEQ ID NO: 1245274
uuacauaguccuugaagaa

SEQ ID NO: 1550115 - RNA, 19 nt, Artificial Sequence
  Description of Artificial Sequence: Synthetic oligonucleotide
  Antisense strand to SEQ ID NO: 1550114
uucuucaaggacuauguaa

SEQ ID NO: 1550116 - RNA, 19 nt, Artificial Sequence
  Description of Artificial Sequence: Synthetic oligonucleotide
  Sense strand starting at position 174 of SEQ ID NO: 1245274
aaguaauagugaucagcaa

SEQ ID NO: 1550117 - RNA, 19 nt, Artificial Sequence
  Description of Artificial Sequence: Synthetic oligonucleotide
  Antisense strand to SEQ ID NO: 1550116
uugcugaucacuauuacuu

SEQ ID NO: 1550118 - RNA, 19 nt, Artificial Sequence
  Description of Artificial Sequence: Synthetic oligonucleotide
  Sense strand starting at position 178 of SEQ ID NO: 1245274
aauagugaucagcaagucu

SEQ ID NO: 1550119 - RNA, 19 nt, Artificial Sequence
  Description of Artificial Sequence: Synthetic oligonucleotide
  Antisense strand to SEQ ID NO: 1550118
agacuugcugaucacuauu

SEQ ID NO: 1550120 - RNA, 19 nt, Artificial Sequence
  Description of Artificial Sequence: Synthetic oligonucleotide
  Sense strand starting at position 256 of SEQ ID NO: 1245274
uccugaggucucugacaaa

SEQ ID NO: 1550121 - RNA, 19 nt, Artificial Sequence
  Description of Artificial Sequence: Synthetic oligonucleotide
  Antisense strand to SEQ ID NO: 1550120
uuugucagagaccucagga

SEQ ID NO: 1550122 - RNA, 19 nt, Artificial Sequence
  Description of Artificial Sequence: Synthetic oligonucleotide
  Sense strand starting at position 286 of SEQ ID NO: 1245274
aguaauucugaagggagca

SEQ ID NO: 1550123 - RNA, 19 nt, Artificial Sequence
  Description of Artificial Sequence: Synthetic oligonucleotide
  Antisense strand to SEQ ID NO: 1550122
ugcucccuucagaauuacu

SEQ ID NO: 1550124 - RNA, 19 nt, Artificial Sequence
  Description of Artificial Sequence: Synthetic oligonucleotide
  Sense strand starting at position 313 of SEQ ID NO: 1245274
ugugaagccacuuggugaa

SEQ ID NO: 1550125 - RNA, 19 nt, Artificial Sequence
  Description of Artificial Sequence: Synthetic oligonucleotide
  Antisense strand to SEQ ID NO: 1550124
uucaccaaguggcuucaca

SEQ ID NO: 1550126 - RNA, 19 nt, Artificial Sequence
  Description of Artificial Sequence: Synthetic oligonucleotide
  Sense strand starting at position 490 of SEQ ID NO: 1245274
uuagaaaggccuuaucugu

SEQ ID NO: 1550127 - RNA, 19 nt, Artificial Sequence
  Description of Artificial Sequence: Synthetic oligonucleotide
  Antisense strand to SEQ ID NO: 1550126
acagauaaggccuuucuaa

SEQ ID NO: 1550128 - RNA, 19 nt, Artificial Sequence
  Description of Artificial Sequence: Synthetic oligonucleotide
  Sense strand starting at position 495 of SEQ ID NO: 1245274
aaggccuuaucuguuaaag

SEQ ID NO: 1550129 - RNA, 19 nt, Artificial Sequence
  Description of Artificial Sequence: Synthetic oligonucleotide
  Antisense strand to SEQ ID NO: 1550128
cuuuaacagauaaggccuu

SEQ ID NO: 1550130 - RNA, 19 nt, Artificial Sequence
  Description of Artificial Sequence: Synthetic oligonucleotide
  Sense strand starting at position 512 of SEQ ID NO: 1245274
agggauauuuaccgagaua

SEQ ID NO: 1550131 - RNA, 19 nt, Artificial Sequence
  Description of Artificial Sequence: Synthetic oligonucleotide
  Antisense strand to SEQ ID NO: 1550130
uaucucgguaaauaucccu

SEQ ID NO: 1550132 - RNA, 19 nt, Artificial Sequence
  Description of Artificial Sequence: Synthetic oligonucleotide
  Sense strand starting at position 523 of SEQ ID NO: 1245274
ccgagauauuuacagguaa

SEQ ID NO: 1550133 - RNA, 19 nt, Artificial Sequence
  Description of Artificial Sequence: Synthetic oligonucleotide
  Antisense strand to SEQ ID NO: 1550132
uuaccuguaaauaucucgg

SEQ ID NO: 1550134 - RNA, 19 nt, Artificial Sequence
  Description of Artificial Sequence: Synthetic oligonucleotide
  Sense strand starting at position 542 of SEQ ID NO: 1245274
agggauauacucugcgauu

SEQ ID NO: 1550135 - RNA, 19 nt, Artificial Sequence
  Description of Artificial Sequence: Synthetic oligonucleotide
  Antisense strand to SEQ ID NO: 1550134
aaucgcagaguauaucccu

SEQ ID NO: 1550136 - RNA, 19 nt, Artificial Sequence
  Description of Artificial Sequence: Synthetic oligonucleotide
  Sense strand starting at position 551 of SEQ ID NO: 1245274
cucugcgauuugcuugaaa

SEQ ID NO: 1550137 - RNA, 19 nt, Artificial Sequence
  Description of Artificial Sequence: Synthetic oligonucleotide
  Antisense strand to SEQ ID NO: 1550136
uuucaagcaaaucgcagag

SEQ ID NO: 1550138 - RNA, 19 nt, Artificial Sequence
  Description of Artificial Sequence: Synthetic oligonucleotide
  Sense strand starting at position 598 of SEQ ID NO: 1245274
aauggauguugggugaaga

SEQ ID NO: 1550139 - RNA, 19 nt, Artificial Sequence
  Description of Artificial Sequence: Synthetic oligonucleotide
  Antisense strand to SEQ ID NO: 1550138
ucuucacccaacauccauu

SEQ ID NO: 1550140 - RNA, 19 nt, Artificial Sequence
  Description of Artificial Sequence: Synthetic oligonucleotide
  Sense strand starting at position 686 of SEQ ID NO: 1245274
uccaguauuucucuugugu

SEQ ID NO: 1550141 - RNA, 19 nt, Artificial Sequence
  Description of Artificial Sequence: Synthetic oligonucleotide
  Antisense strand to SEQ ID NO: 1550140
acacaagagaaauacugga

SEQ ID NO: 1550142 - RNA, 19 nt, Artificial Sequence
  Description of Artificial Sequence: Synthetic oligonucleotide
  Sense strand starting at position 1021 of SEQ ID NO: 1245274
guaaauguccaaggucaca

SEQ ID NO: 1550143 - RNA, 19 nt, Artificial Sequence
  Description of Artificial Sequence: Synthetic oligonucleotide
  Antisense strand to SEQ ID NO: 1550142
ugugaccuuggacauuuac

SEQ ID NO: 1550144 - RNA, 19 nt, Artificial Sequence
  Description of Artificial Sequence: Synthetic oligonucleotide
  Sense strand starting at position 1051 of SEQ ID NO: 1245274
uggcuaugucagggaugga

SEQ ID NO: 1550145 - RNA, 19 nt, Artificial Sequence
  Description of Artificial Sequence: Synthetic oligonucleotide
  Antisense strand to SEQ ID NO: 1550144
uccaucccugacauagcca

SEQ ID NO: 1550146 - RNA, 19 nt, Artificial Sequence
  Description of Artificial Sequence: Synthetic oligonucleotide
  Sense strand starting at position 1413 of SEQ ID NO: 1245274
cuauuaagucaacaguuua

SEQ ID NO: 1550147 - RNA, 19 nt, Artificial Sequence
  Description of Artificial Sequence: Synthetic oligonucleotide
  Antisense strand to SEQ ID NO: 1550146
uaaacuguugacuuaauag

SEQ ID NO: 1550148 - RNA, 19 nt, Artificial Sequence
  Description of Artificial Sequence: Synthetic oligonucleotide
  Sense strand starting at position 1496 of SEQ ID NO: 1245274
auaagcauccuuuacguau

SEQ ID NO: 1550149 - RNA, 19 nt, Artificial Sequence
  Description of Artificial Sequence: Synthetic oligonucleotide
  Antisense strand to SEQ ID NO: 1550148
auacguaaaggaugcuuau

SEQ ID NO: 1550150 - RNA, 19 nt, Artificial Sequence
  Description of Artificial Sequence: Synthetic oligonucleotide
  Sense strand starting at position 2781 of SEQ ID NO: 1245274
gcccuugcgguucugugaa

SEQ ID NO: 1550151 - RNA, 19 nt, Artificial Sequence
  Description of Artificial Sequence: Synthetic oligonucleotide
  Antisense strand to SEQ ID NO: 1550150
uucacagaaccgcaagggc

SEQ ID NO: 1550152 - RNA, 19 nt, Artificial Sequence
  Description of Artificial Sequence: Synthetic oligonucleotide
  Sense strand starting at position 2791 of SEQ ID NO: 1245274
uucugugaaaguuaucugu

SEQ ID NO: 1550153 - RNA, 19 nt, Artificial Sequence
  Description of Artificial Sequence: Synthetic oligonucleotide
  Antisense strand to SEQ ID NO: 1550152
acagauaacuuucacagaa

SEQ ID NO: 1550154 - RNA, 19 nt, Artificial Sequence
  Description of Artificial Sequence: Synthetic oligonucleotide
  Sense strand starting at position 2793 of SEQ ID NO: 1245274
cugugaaaguuaucuguac

SEQ ID NO: 1550155 - RNA, 19 nt, Artificial Sequence
  Description of Artificial Sequence: Synthetic oligonucleotide
  Antisense strand to SEQ ID NO: 1550154
guacagauaacuuucacag

SEQ ID NO: 1550156 - RNA, 19 nt, Artificial Sequence
  Description of Artificial Sequence: Synthetic oligonucleotide
  Sense strand starting at position 2794 of SEQ ID NO: 1245274
ugugaaaguuaucuguaca

SEQ ID NO: 1550157 - RNA, 19 nt, Artificial Sequence
  Description of Artificial Sequence: Synthetic oligonucleotide
  Antisense strand to SEQ ID NO: 1550156
uguacagauaacuuucaca

SEQ ID NO: 1550158 - RNA, 19 nt, Artificial Sequence
  Description of Artificial Sequence: Synthetic oligonucleotide
  Sense strand starting at position 2795 of SEQ ID NO: 1245274
gugaaaguuaucuguacac

SEQ ID NO: 1550159 - RNA, 19 nt, Artificial Sequence
  Description of Artificial Sequence: Synthetic oligonucleotide
  Antisense strand to SEQ ID NO: 1550158
guguacagauaacuuucac

SEQ ID NO: 1550160 - RNA, 19 nt, Artificial Sequence
  Description of Artificial Sequence: Synthetic oligonucleotide
  Sense strand starting at position 2797 of SEQ ID NO: 1245274
gaaaguuaucuguacacug

SEQ ID NO: 1550161 - RNA, 19 nt, Artificial Sequence
  Description of Artificial Sequence: Synthetic oligonucleotide
  Antisense strand to SEQ ID NO: 1550160
caguguacagauaacuuuc

SEQ ID NO: 1550162 - RNA, 19 nt, Artificial Sequence
  Description of Artificial Sequence: Synthetic oligonucleotide
  Sense strand starting at position 2850 of SEQ ID NO: 1245274
uagagugaccuguaccgaa

SEQ ID NO: 1550163 - RNA, 19 nt, Artificial Sequence
  Description of Artificial Sequence: Synthetic oligonucleotide
  Antisense strand to SEQ ID NO: 1550162
uucgguacaggucacucua

SEQ ID NO: 1550164 - RNA, 19 nt, Artificial Sequence
  Description of Artificial Sequence: Synthetic oligonucleotide
  Sense strand starting at position 2854 of SEQ ID NO: 1245274
gugaccuguaccgaaugaa

SEQ ID NO: 1550165 - RNA, 19 nt, Artificial Sequence
  Description of Artificial Sequence: Synthetic oligonucleotide
  Antisense strand to SEQ ID NO: 1550164
uucauucgguacaggucac

SEQ ID NO: 1550166 - RNA, 19 nt, Artificial Sequence
  Description of Artificial Sequence: Synthetic oligonucleotide
  Sense strand starting at position 2928 of SEQ ID NO: 1245274
ggccuugucgcuguuaucu

SEQ ID NO: 1550167 - RNA, 19 nt, Artificial Sequence
  Description of Artificial Sequence: Synthetic oligonucleotide
  Antisense strand to SEQ ID NO: 1550166
agauaacagcgacaaggcc

SEQ ID NO: 1550168 - RNA, 19 nt, Artificial Sequence
  Description of Artificial Sequence: Synthetic oligonucleotide
  Sense strand starting at position 2941 of SEQ ID NO: 1245274
uuaucugcaguuuagugau

SEQ ID NO: 1550169 - RNA, 19 nt, Artificial Sequence
  Description of Artificial Sequence: Synthetic oligonucleotide
  Antisense strand to SEQ ID NO: 1550168
aucacuaaacugcagauaa

SEQ ID NO: 1550170 - RNA, 19 nt, Artificial Sequence
  Description of Artificial Sequence: Synthetic oligonucleotide
  Sense strand starting at position 2980 of SEQ ID NO: 1245274
gguaacgccauagaucaaa

SEQ ID NO: 1550171 - RNA, 19 nt, Artificial Sequence
  Description of Artificial Sequence: Synthetic oligonucleotide
  Antisense strand to SEQ ID NO: 1550170
uuugaucuauggcguuacc

SEQ ID NO: 1550172 - RNA, 19 nt, Artificial Sequence
  Description of Artificial Sequence: Synthetic oligonucleotide
  Sense strand starting at position 3015 of SEQ ID NO: 1245274
ugagguuaaacgggaaguu

SEQ ID NO: 1550173 - RNA, 19 nt, Artificial Sequence
  Description of Artificial Sequence: Synthetic oligonucleotide
  Antisense strand to SEQ ID NO: 1550172
aacuucccguuuaaccuca

SEQ ID NO: 1550174 - RNA, 19 nt, Artificial Sequence
  Description of Artificial Sequence: Synthetic oligonucleotide
  Sense strand starting at position 3016 of SEQ ID NO: 1245274
gagguuaaacgggaaguuu

SEQ ID NO: 1550175 - RNA, 19 nt, Artificial Sequence
  Description of Artificial Sequence: Synthetic oligonucleotide
  Antisense strand to SEQ ID NO: 1550174
aaacuucccguuuaaccuc

SEQ ID NO: 1550176 - RNA, 19 nt, Artificial Sequence
  Description of Artificial Sequence: Synthetic oligonucleotide
  Sense strand starting at position 3071 of SEQ ID NO: 1245274
auuauuuauugggacaaca

SEQ ID NO: 1550177 - RNA, 19 nt, Artificial Sequence
  Description of Artificial Sequence: Synthetic oligonucleotide
  Antisense strand to SEQ ID NO: 1550176
uguugucccaauaaauaau

SEQ ID NO: 1550178 - RNA, 19 nt, Artificial Sequence
  Description of Artificial Sequence: Synthetic oligonucleotide
  Sense strand starting at position 3129 of SEQ ID NO: 1245274
guggcuguucguuugagau

SEQ ID NO: 1550179 - RNA, 19 nt, Artificial Sequence
  Description of Artificial Sequence: Synthetic oligonucleotide
  Antisense strand to SEQ ID NO: 1550178
aucucaaacgaacagccac

SEQ ID NO: 1550180 - RNA, 19 nt, Artificial Sequence
  Description of Artificial Sequence: Synthetic oligonucleotide
  Sense strand starting at position 3155 of SEQ ID NO: 1245274
gauaguagguauuccuauu

SEQ ID NO: 1550181 - RNA, 19 nt, Artificial Sequence
  Description of Artificial Sequence: Synthetic oligonucleotide
  Antisense strand to SEQ ID NO: 1550180
aauaggaauaccuacuauc

SEQ ID NO: 1550182 - RNA, 19 nt, Artificial Sequence
  Description of Artificial Sequence: Synthetic oligonucleotide
  Sense strand starting at position 3662 of SEQ ID NO: 1245274
ucuacugugguccaaagaa

SEQ ID NO: 1550183 - RNA, 19 nt, Artificial Sequence
  Description of Artificial Sequence: Synthetic oligonucleotide
  Antisense strand to SEQ ID NO: 1550182
uucuuuggaccacaguaga

SEQ ID NO: 1550184 - RNA, 19 nt, Artificial Sequence
  Description of Artificial Sequence: Synthetic oligonucleotide
  Sense strand starting at position 3760 of SEQ ID NO: 1245274
accaaagagucauccuuga

SEQ ID NO: 1550185 - RNA, 19 nt, Artificial Sequence
  Description of Artificial Sequence: Synthetic oligonucleotide
  Antisense strand to SEQ ID NO: 1550184
ucaaggaugacucuuuggu

SEQ ID NO: 1550186 - RNA, 19 nt, Artificial Sequence
  Description of Artificial Sequence: Synthetic oligonucleotide
  Sense strand starting at position 3892 of SEQ ID NO: 1245274
uguuauuucuuaccuaguc

SEQ ID NO: 1550187 - RNA, 19 nt, Artificial Sequence
  Description of Artificial Sequence: Synthetic oligonucleotide
  Antisense strand to SEQ ID NO: 1550186
gacuagguaagaaauaaca

SEQ ID NO: 1550188 - RNA, 19 nt, Artificial Sequence
  Description of Artificial Sequence: Synthetic oligonucleotide
  Sense strand starting at position 3893 of SEQ ID NO: 1245274
guuauuucuuaccuagucu

SEQ ID NO: 1550189 - RNA, 19 nt, Artificial Sequence
  Description of Artificial Sequence: Synthetic oligonucleotide
  Antisense strand to SEQ ID NO: 1550188
agacuagguaagaaauaac

SEQ ID NO: 1550190 - RNA, 19 nt, Artificial Sequence
  Description of Artificial Sequence: Synthetic oligonucleotide
  Sense strand starting at position 18 of SEQ ID NO: 1245275
cagauacuguuauaggcau

SEQ ID NO: 1550191 - RNA, 19 nt, Artificial Sequence
  Description of Artificial Sequence: Synthetic oligonucleotide
  Antisense strand to SEQ ID NO: 1550190
augccuauaacaguaucug

SEQ ID NO: 1550192 - RNA, 19 nt, Artificial Sequence
  Description of Artificial Sequence: Synthetic oligonucleotide
  Sense strand starting at position 32 of SEQ ID NO: 1245275
ggcauagacugagacugaa

SEQ ID NO: 1550193 - RNA, 19 nt, Artificial Sequence
  Description of Artificial Sequence: Synthetic oligonucleotide
  Antisense strand to SEQ ID NO: 1550192
uucagucucagucuaugcc

SEQ ID NO: 1550194 - RNA, 19 nt, Artificial Sequence
  Description of Artificial Sequence: Synthetic oligonucleotide
  Sense strand starting at position 89 of SEQ ID NO: 1245275
uggagugcgacuuacagau

SEQ ID NO: 1550195 - RNA, 19 nt, Artificial Sequence
  Description of Artificial Sequence: Synthetic oligonucleotide
  Antisense strand to SEQ ID NO: 1550194
aucuguaagucgcacucca

SEQ ID NO: 1550196 - RNA, 19 nt, Artificial Sequence
  Description of Artificial Sequence: Synthetic oligonucleotide
  Sense strand starting at position 152 of SEQ ID NO: 1245275
guuggagacagauggcuau

SEQ ID NO: 1550197 - RNA, 19 nt, Artificial Sequence
  Description of Artificial Sequence: Synthetic oligonucleotide
  Antisense strand to SEQ ID NO: 1550196
auagccaucugucuccaac

SEQ ID NO: 1550198 - RNA, 19 nt, Artificial Sequence
  Description of Artificial Sequence: Synthetic oligonucleotide
  Sense strand starting at position 164 of SEQ ID NO: 1245275
uggcuauacacggaaaugu

SEQ ID NO: 1550199 - RNA, 19 nt, Artificial Sequence
  Description of Artificial Sequence: Synthetic oligonucleotide
  Antisense strand to SEQ ID NO: 1550198
acauuuccguguauagcca

SEQ ID NO: 1550200 - RNA, 19 nt, Artificial Sequence
  Description of Artificial Sequence: Synthetic oligonucleotide
  Sense strand starting at position 172 of SEQ ID NO: 1245275
cacggaaauguuuauaggu

SEQ ID NO: 1550201 - RNA, 19 nt, Artificial Sequence
  Description of Artificial Sequence: Synthetic oligonucleotide
  Antisense strand to SEQ ID NO: 1550200
accuauaaacauuuccgug

SEQ ID NO: 1550202 - RNA, 19 nt, Artificial Sequence
  Description of Artificial Sequence: Synthetic oligonucleotide
  Sense strand starting at position 177 of SEQ ID NO: 1245275
aaauguuuauaggugcaua

SEQ ID NO: 1550203 - RNA, 19 nt, Artificial Sequence
  Description of Artificial Sequence: Synthetic oligonucleotide
  Antisense strand to SEQ ID NO: 1550202
uaugcaccuauaaacauuu

SEQ ID NO: 1550204 - RNA, 19 nt, Artificial Sequence
  Description of Artificial Sequence: Synthetic oligonucleotide
  Sense strand starting at position 221 of SEQ ID NO: 1245275
auauauccuuucgucagau

SEQ ID NO: 1550205 - RNA, 19 nt, Artificial Sequence
  Description of Artificial Sequence: Synthetic oligonucleotide
  Antisense strand to SEQ ID NO: 1550204
aucugacgaaaggauauau

SEQ ID NO: 1550206 - RNA, 19 nt, Artificial Sequence
  Description of Artificial Sequence: Synthetic oligonucleotide
  Sense strand starting at position 222 of SEQ ID NO: 1245275
uauauccuuucgucagaug

SEQ ID NO: 1550207 - RNA, 19 nt, Artificial Sequence
  Description of Artificial Sequence: Synthetic oligonucleotide
  Antisense strand to SEQ ID NO: 1550206
caucugacgaaaggauaua

SEQ ID NO: 1550208 - RNA, 19 nt, Artificial Sequence
  Description of Artificial Sequence: Synthetic oligonucleotide
  Sense strand starting at position 223 of SEQ ID NO: 1245275
auauccuuucgucagauga

SEQ ID NO: 1550209 - RNA, 19 nt, Artificial Sequence
  Description of Artificial Sequence: Synthetic oligonucleotide
  Antisense strand to SEQ ID NO: 1550208
ucaucugacgaaaggauau

SEQ ID NO: 1550210 - RNA, 19 nt, Artificial Sequence
  Description of Artificial Sequence: Synthetic oligonucleotide
  Sense strand starting at position 227 of SEQ ID NO: 1245275
ccuuucgucagaugagaug

SEQ ID NO: 1550211 - RNA, 19 nt, Artificial Sequence
  Description of Artificial Sequence: Synthetic oligonucleotide
  Antisense strand to SEQ ID NO: 1550210
caucucaucugacgaaagg

SEQ ID NO: 1550212 - RNA, 19 nt, Artificial Sequence
  Description of Artificial Sequence: Synthetic oligonucleotide
  Sense strand starting at position 411 of SEQ ID NO: 1245275
guaggaaaguguuuaacac

SEQ ID NO: 1550213 - RNA, 19 nt, Artificial Sequence
  Description of Artificial Sequence: Synthetic oligonucleotide
  Antisense strand to SEQ ID NO: 1550212
guguuaaacacuuuccuac

SEQ ID NO: 1550214 - RNA, 19 nt, Artificial Sequence
  Description of Artificial Sequence: Synthetic oligonucleotide
  Sense strand starting at position 481 of SEQ ID NO: 1245275
ggagcuuagugagcuccua

SEQ ID NO: 1550215 - RNA, 19 nt, Artificial Sequence
  Description of Artificial Sequence: Synthetic oligonucleotide
  Antisense strand to SEQ ID NO: 1550214
uaggagcucacuaagcucc

SEQ ID NO: 1550216 - RNA, 19 nt, Artificial Sequence
  Description of Artificial Sequence: Synthetic oligonucleotide
  Sense strand starting at position 501 of SEQ ID NO: 1245275
gggccugagcuggaaacau

SEQ ID NO: 1550217 - RNA, 19 nt, Artificial Sequence
  Description of Artificial Sequence: Synthetic oligonucleotide
  Antisense strand to SEQ ID NO: 1550216
auguuuccagcucaggccc

SEQ ID NO: 1550218 - RNA, 19 nt, Artificial Sequence
  Description of Artificial Sequence: Synthetic oligonucleotide
  Sense strand starting at position 510 of SEQ ID NO: 1245275
cuggaaacauucgaacaaa

SEQ ID NO: 1550219 - RNA, 19 nt, Artificial Sequence
  Description of Artificial Sequence: Synthetic oligonucleotide
  Antisense strand to SEQ ID NO: 1550218
uuuguucgaauguuuccag

SEQ ID NO: 1550220 - RNA, 19 nt, Artificial Sequence
  Description of Artificial Sequence: Synthetic oligonucleotide
  Sense strand starting at position 530 of SEQ ID NO: 1245275
cuaaguaacacgggauuau

SEQ ID NO: 1550221 - RNA, 19 nt, Artificial Sequence
  Description of Artificial Sequence: Synthetic oligonucleotide
  Antisense strand to SEQ ID NO: 1550220
auaaucccguguuacuuag

SEQ ID NO: 1550222 - RNA, 19 nt, Artificial Sequence
  Description of Artificial Sequence: Synthetic oligonucleotide
  Sense strand starting at position 539 of SEQ ID NO: 1245275
acgggauuauaacccauga

SEQ ID NO: 1550223 - RNA, 19 nt, Artificial Sequence
  Description of Artificial Sequence: Synthetic oligonucleotide
  Antisense strand to SEQ ID NO: 1550222
ucauggguuauaaucccgu

SEQ ID NO: 1550224 - RNA, 19 nt, Artificial Sequence
  Description of Artificial Sequence: Synthetic oligonucleotide
  Sense strand starting at position 550 of SEQ ID NO: 1245275
acccaugaguucuugguga

SEQ ID NO: 1550225 - RNA, 19 nt, Artificial Sequence
  Description of Artificial Sequence: Synthetic oligonucleotide
  Antisense strand to SEQ ID NO: 1550224
ucaccaagaacucaugggu

SEQ ID NO: 1550226 - RNA, 19 nt, Artificial Sequence
  Description of Artificial Sequence: Synthetic oligonucleotide
  Sense strand starting at position 552 of SEQ ID NO: 1245275
ccaugaguucuuggugaua

SEQ ID NO: 1550227 - RNA, 19 nt, Artificial Sequence
  Description of Artificial Sequence: Synthetic oligonucleotide
  Antisense strand to SEQ ID NO: 1550226
uaucaccaagaacucaugg

SEQ ID NO: 1550228 - RNA, 19 nt, Artificial Sequence
  Description of Artificial Sequence: Synthetic oligonucleotide
  Sense strand starting at position 555 of SEQ ID NO: 1245275
ugaguucuuggugauauga

SEQ ID NO: 1550229 - RNA, 19 nt, Artificial Sequence
  Description of Artificial Sequence: Synthetic oligonucleotide
  Antisense strand to SEQ ID NO: 1550228
ucauaucaccaagaacuca

SEQ ID NO: 1550230 - RNA, 19 nt, Artificial Sequence
  Description of Artificial Sequence: Synthetic oligonucleotide
  Sense strand starting at position 557 of SEQ ID NO: 1245275
aguucuuggugauaugaau

SEQ ID NO: 1550231 - RNA, 19 nt, Artificial Sequence
  Description of Artificial Sequence: Synthetic oligonucleotide
  Antisense strand to SEQ ID NO: 1550230
auucauaucaccaagaacu

SEQ ID NO: 1550232 - RNA, 19 nt, Artificial Sequence
  Description of Artificial Sequence: Synthetic oligonucleotide
  Sense strand starting at position 597 of SEQ ID NO: 1245275
agacauaucccuugugcag

SEQ ID NO: 1550233 - RNA, 19 nt, Artificial Sequence
  Description of Artificial Sequence: Synthetic oligonucleotide
  Antisense strand to SEQ ID NO: 1550232
cugcacaagggauaugucu

SEQ ID NO: 1550234 - RNA, 19 nt, Artificial Sequence
  Description of Artificial Sequence: Synthetic oligonucleotide
  Sense strand starting at position 830 of SEQ ID NO: 1245275
agccauaauccacgucuaa

SEQ ID NO: 1550235 - RNA, 19 nt, Artificial Sequence
  Description of Artificial Sequence: Synthetic oligonucleotide
  Antisense strand to SEQ ID NO: 1550234
uuagacguggauuauggcu

SEQ ID NO: 1550236 - RNA, 19 nt, Artificial Sequence
  Description of Artificial Sequence: Synthetic oligonucleotide
  Sense strand starting at position 878 of SEQ ID NO: 1245275
agaggcauccugcaaagca

SEQ ID NO: 1550237 - RNA, 19 nt, Artificial Sequence
  Description of Artificial Sequence: Synthetic oligonucleotide
  Antisense strand to SEQ ID NO: 1550236
ugcuuugcaggaugccucu

SEQ ID NO: 1550238 - RNA, 19 nt, Artificial Sequence
  Description of Artificial Sequence: Synthetic oligonucleotide
  Sense strand starting at position 1050 of SEQ ID NO: 1245275
gugaauaaaguaugagcuu

SEQ ID NO: 1550239 - RNA, 19 nt, Artificial Sequence
  Description of Artificial Sequence: Synthetic oligonucleotide
  Antisense strand to SEQ ID NO: 1550238
aagcucauacuuuauucac

SEQ ID NO: 1550240 - RNA, 19 nt, Artificial Sequence
  Description of Artificial Sequence: Synthetic oligonucleotide
  Sense strand starting at position 1084 of SEQ ID NO: 1245275
uuaucaauaucggcucauu

SEQ ID NO: 1550241 - RNA, 19 nt, Artificial Sequence
  Description of Artificial Sequence: Synthetic oligonucleotide
  Antisense strand to SEQ ID NO: 1550240
aaugagccgauauugauaa

SEQ ID NO: 1550242 - RNA, 19 nt, Artificial Sequence
  Description of Artificial Sequence: Synthetic oligonucleotide
  Sense strand starting at position 1087 of SEQ ID NO: 1245275
ucaauaucggcucauuaac

SEQ ID NO: 1550243 - RNA, 19 nt, Artificial Sequence
  Description of Artificial Sequence: Synthetic oligonucleotide
  Antisense strand to SEQ ID NO: 1550242
guuaaugagccgauauuga

SEQ ID NO: 1550244 - RNA, 19 nt, Artificial Sequence
  Description of Artificial Sequence: Synthetic oligonucleotide
  Sense strand starting at position 1164 of SEQ ID NO: 1245275
acaggaacgcgguacuauu

SEQ ID NO: 1550245 - RNA, 19 nt, Artificial Sequence
  Description of Artificial Sequence: Synthetic oligonucleotide
  Antisense strand to SEQ ID NO: 1550244
aauaguaccgcguuccugu

SEQ ID NO: 1550246 - RNA, 19 nt, Artificial Sequence
  Description of Artificial Sequence: Synthetic oligonucleotide
  Sense strand starting at position 2674 of SEQ ID NO: 1245275
uuuaaauacugggaacuga

SEQ ID NO: 1550247 - RNA, 19 nt, Artificial Sequence
  Description of Artificial Sequence: Synthetic oligonucleotide
  Antisense strand to SEQ ID NO: 1550246
ucaguucccaguauuuaaa

SEQ ID NO: 1550248 - RNA, 19 nt, Artificial Sequence
  Description of Artificial Sequence: Synthetic oligonucleotide
  Sense strand starting at position 3011 of SEQ ID NO: 1245275
gcugcuguggugugagaca

SEQ ID NO: 1550249 - RNA, 19 nt, Artificial Sequence
  Description of Artificial Sequence: Synthetic oligonucleotide
  Antisense strand to SEQ ID NO: 1550248
ugucucacaccacagcagc

SEQ ID NO: 1550250 - RNA, 19 nt, Artificial Sequence
  Description of Artificial Sequence: Synthetic oligonucleotide
  Sense strand starting at position 3020 of SEQ ID NO: 1245275
gugugagacacgucugugu

SEQ ID NO: 1550251 - RNA, 19 nt, Artificial Sequence
  Description of Artificial Sequence: Synthetic oligonucleotide
  Antisense strand to SEQ ID NO: 1550250
acacagacgugucucacac

SEQ ID NO: 1550252 - RNA, 19 nt, Artificial Sequence
  Description of Artificial Sequence: Synthetic oligonucleotide
  Sense strand starting at position 3022 of SEQ ID NO: 1245275
gugagacacgucugugugu

SEQ ID NO: 1550253 - RNA, 19 nt, Artificial Sequence
  Description of Artificial Sequence: Synthetic oligonucleotide
  Antisense strand to SEQ ID NO: 1550252
acacacagacgugucucac

SEQ ID NO: 1550254 - RNA, 19 nt, Artificial Sequence
  Description of Artificial Sequence: Synthetic oligonucleotide
  Sense strand starting at position 3061 of SEQ ID NO: 1245275
guggauguguacaugugua

SEQ ID NO: 1550255 - RNA, 19 nt, Artificial Sequence
  Description of Artificial Sequence: Synthetic oligonucleotide
  Antisense strand to SEQ ID NO: 1550254
uacacauguacacauccac

SEQ ID NO: 1550256 - RNA, 19 nt, Artificial Sequence
  Description of Artificial Sequence: Synthetic oligonucleotide
  Sense strand starting at position 3131 of SEQ ID NO: 1245275
augugcgugcgcguauaua

SEQ ID NO: 1550257 - RNA, 19 nt, Artificial Sequence
  Description of Artificial Sequence: Synthetic oligonucleotide
  Antisense strand to SEQ ID NO: 1550256
uauauacgcgcacgcacau

SEQ ID NO: 1550258 - RNA, 19 nt, Artificial Sequence
  Description of Artificial Sequence: Synthetic oligonucleotide
  Sense strand starting at position 3204 of SEQ ID NO: 1245275
cgagacaagucucuaauca

SEQ ID NO: 1550259 - RNA, 19 nt, Artificial Sequence
  Description of Artificial Sequence: Synthetic oligonucleotide
  Antisense strand to SEQ ID NO: 1550258
ugauuagagacuugucucg

SEQ ID NO: 1550260 - RNA, 19 nt, Artificial Sequence
  Description of Artificial Sequence: Synthetic oligonucleotide
  Sense strand starting at position 3324 of SEQ ID NO: 1245275
ggcggaguauugagaagca

SEQ ID NO: 1550261 - RNA, 19 nt, Artificial Sequence
  Description of Artificial Sequence: Synthetic oligonucleotide
  Antisense strand to SEQ ID NO: 1550260
ugcuucucaauacuccgcc

SEQ ID NO: 1550262 - RNA, 19 nt, Artificial Sequence
  Description of Artificial Sequence: Synthetic oligonucleotide
  Sense strand starting at position 3329 of SEQ ID NO: 1245275
aguauugagaagcagaguu

SEQ ID NO: 1550263 - RNA, 19 nt, Artificial Sequence
  Description of Artificial Sequence: Synthetic oligonucleotide
  Antisense strand to SEQ ID NO: 1550262
aacucugcuucucaauacu

SEQ ID NO: 1550264 - RNA, 19 nt, Artificial Sequence
  Description of Artificial Sequence: Synthetic oligonucleotide
  Sense strand starting at position 3476 of SEQ ID NO: 1245275
uuugcauugccaugguuaa

SEQ ID NO: 1550265 - RNA, 19 nt, Artificial Sequence
  Description of Artificial Sequence: Synthetic oligonucleotide
  Antisense strand to SEQ ID NO: 1550264
uuaaccauggcaaugcaaa

SEQ ID NO: 1550266 - RNA, 19 nt, Artificial Sequence
  Description of Artificial Sequence: Synthetic oligonucleotide
  Sense strand starting at position 3477 of SEQ ID NO: 1245275
uugcauugccaugguuaag

SEQ ID NO: 1550267 - RNA, 19 nt, Artificial Sequence
  Description of Artificial Sequence: Synthetic oligonucleotide
  Antisense strand to SEQ ID NO: 1550266
cuuaaccauggcaaugcaa

SEQ ID NO: 1550268 - RNA, 19 nt, Artificial Sequence
  Description of Artificial Sequence: Synthetic oligonucleotide
  Sense strand starting at position 3937 of SEQ ID NO: 1245275
cccuuuggcuaagugaauu

SEQ ID NO: 1550269 - RNA, 19 nt, Artificial Sequence
  Description of Artificial Sequence: Synthetic oligonucleotide
  Antisense strand to SEQ ID NO: 1550268
aauucacuuagccaaaggg

SEQ ID NO: 1550270 - RNA, 19 nt, Artificial Sequence
  Description of Artificial Sequence: Synthetic oligonucleotide
  Sense strand starting at position 125 of SEQ ID NO: 1245276
acugaauuaguuuguaagu

SEQ ID NO: 1550271 - RNA, 19 nt, Artificial Sequence
  Description of Artificial Sequence: Synthetic oligonucleotide
  Antisense strand to SEQ ID NO: 1550270
acuuacaaacuaauucagu

SEQ ID NO: 1550272 - RNA, 19 nt, Artificial Sequence
  Description of Artificial Sequence: Synthetic oligonucleotide
  Sense strand starting at position 144 of SEQ ID NO: 1245276
gaaauuuguucugagauua

SEQ ID NO: 1550273 - RNA, 19 nt, Artificial Sequence
  Description of Artificial Sequence: Synthetic oligonucleotide
  Antisense strand to SEQ ID NO: 1550272
uaaucucagaacaaauuuc

SEQ ID NO: 1550274 - RNA, 19 nt, Artificial Sequence
  Description of Artificial Sequence: Synthetic oligonucleotide
  Sense strand starting at position 154 of SEQ ID NO: 1245276
cugagauuaggauguauuc

SEQ ID NO: 1550275 - RNA, 19 nt, Artificial Sequence
  Description of Artificial Sequence: Synthetic oligonucleotide
  Antisense strand to SEQ ID NO: 1550274
gaauacauccuaaucucag

SEQ ID NO: 1550276 - RNA, 19 nt, Artificial Sequence
  Description of Artificial Sequence: Synthetic oligonucleotide
  Sense strand starting at position 165 of SEQ ID NO: 1245276
auguauucugaauagaguc

SEQ ID NO: 1550277 - RNA, 19 nt, Artificial Sequence
  Description of Artificial Sequence: Synthetic oligonucleotide
  Antisense strand to SEQ ID NO: 1550276
gacucuauucagaauacau

SEQ ID NO: 1550278 - RNA, 19 nt, Artificial Sequence
  Description of Artificial Sequence: Synthetic oligonucleotide
  Sense strand starting at position 173 of SEQ ID NO: 1245276
ugaauagagucugucucau

SEQ ID NO: 1550279 - RNA, 19 nt, Artificial Sequence
  Description of Artificial Sequence: Synthetic oligonucleotide
  Antisense strand to SEQ ID NO: 1550278
augagacagacucuauuca

SEQ ID NO: 1550280 - RNA, 19 nt, Artificial Sequence
  Description of Artificial Sequence: Synthetic oligonucleotide
  Sense strand starting at position 177 of SEQ ID NO: 1245276
uagagucugucucauuuga

SEQ ID NO: 1550281 - RNA, 19 nt, Artificial Sequence
  Description of Artificial Sequence: Synthetic oligonucleotide
  Antisense strand to SEQ ID NO: 1550280
ucaaaugagacagacucua

SEQ ID NO: 1550282 - RNA, 19 nt, Artificial Sequence
  Description of Artificial Sequence: Synthetic oligonucleotide
  Sense strand starting at position 182 of SEQ ID NO: 1245276
ucugucucauuugacauuu

SEQ ID NO: 1550283 - RNA, 19 nt, Artificial Sequence
  Description of Artificial Sequence: Synthetic oligonucleotide
  Antisense strand to SEQ ID NO: 1550282
aaaugucaaaugagacaga

SEQ ID NO: 1550284 - RNA, 19 nt, Artificial Sequence
  Description of Artificial Sequence: Synthetic oligonucleotide
  Sense strand starting at position 255 of SEQ ID NO: 1245276
ucauaauacuagucugucu

SEQ ID NO: 1550285 - RNA, 19 nt, Artificial Sequence
  Description of Artificial Sequence: Synthetic oligonucleotide
  Antisense strand to SEQ ID NO: 1550284
agacagacuaguauuauga

SEQ ID NO: 1550286 - RNA, 19 nt, Artificial Sequence
  Description of Artificial Sequence: Synthetic oligonucleotide
  Sense strand starting at position 296 of SEQ ID NO: 1245276
ugcuaaucuugaccuugua

SEQ ID NO: 1550287 - RNA, 19 nt, Artificial Sequence
  Description of Artificial Sequence: Synthetic oligonucleotide
  Antisense strand to SEQ ID NO: 1550286
uacaaggucaagauuagca

SEQ ID NO: 1550288 - RNA, 19 nt, Artificial Sequence
  Description of Artificial Sequence: Synthetic oligonucleotide
  Sense strand starting at position 395 of SEQ ID NO: 1245276
acagcuguacgagaacuuu

SEQ ID NO: 1550289 - RNA, 19 nt, Artificial Sequence
  Description of Artificial Sequence: Synthetic oligonucleotide
  Antisense strand to SEQ ID NO: 1550288
aaaguucucguacagcugu

SEQ ID NO: 1550290 - RNA, 19 nt, Artificial Sequence
  Description of Artificial Sequence: Synthetic oligonucleotide
  Sense strand starting at position 509 of SEQ ID NO: 1245276
acaaauauucuguguuagc

SEQ ID NO: 1550291 - RNA, 19 nt, Artificial Sequence
  Description of Artificial Sequence: Synthetic oligonucleotide
  Antisense strand to SEQ ID NO: 1550290
gcuaacacagaauauuugu

SEQ ID NO: 1550292 - RNA, 19 nt, Artificial Sequence
  Description of Artificial Sequence: Synthetic oligonucleotide
  Sense strand starting at position 519 of SEQ ID NO: 1245276
uguguuagcauguaaagaa

SEQ ID NO: 1550293 - RNA, 19 nt, Artificial Sequence
  Description of Artificial Sequence: Synthetic oligonucleotide
  Antisense strand to SEQ ID NO: 1550292
uucuuuacaugcuaacaca

SEQ ID NO: 1550294 - RNA, 19 nt, Artificial Sequence
  Description of Artificial Sequence: Synthetic oligonucleotide
  Sense strand starting at position 572 of SEQ ID NO: 1245276
gaccuuaauuuguggaaca

SEQ ID NO: 1550295 - RNA, 19 nt, Artificial Sequence
  Description of Artificial Sequence: Synthetic oligonucleotide
  Antisense strand to SEQ ID NO: 1550294
uguuccacaaauuaagguc

SEQ ID NO: 1550296 - RNA, 19 nt, Artificial Sequence
  Description of Artificial Sequence: Synthetic oligonucleotide
  Sense strand starting at position 573 of SEQ ID NO: 1245276
accuuaauuuguggaacaa

SEQ ID NO: 1550297 - RNA, 19 nt, Artificial Sequence
  Description of Artificial Sequence: Synthetic oligonucleotide
  Antisense strand to SEQ ID NO: 1550296
uuguuccacaaauuaaggu

SEQ ID NO: 1550298 - RNA, 19 nt, Artificial Sequence
  Description of Artificial Sequence: Synthetic oligonucleotide
  Sense strand starting at position 748 of SEQ ID NO: 1245276
aaguuuaaacgucaaagcu

SEQ ID NO: 1550299 - RNA, 19 nt, Artificial Sequence
  Description of Artificial Sequence: Synthetic oligonucleotide
  Antisense strand to SEQ ID NO: 1550298
agcuuugacguuuaaacuu

SEQ ID NO: 1550300 - RNA, 19 nt, Artificial Sequence
  Description of Artificial Sequence: Synthetic oligonucleotide
  Sense strand starting at position 758 of SEQ ID NO: 1245276
gucaaagcuuaggcagaua

SEQ ID NO: 1550301 - RNA, 19 nt, Artificial Sequence
  Description of Artificial Sequence: Synthetic oligonucleotide
  Antisense strand to SEQ ID NO: 1550300
uaucugccuaagcuuugac

SEQ ID NO: 1550302 - RNA, 19 nt, Artificial Sequence
  Description of Artificial Sequence: Synthetic oligonucleotide
  Sense strand starting at position 803 of SEQ ID NO: 1245276
cguggugcgcacuugaauu

SEQ ID NO: 1550303 - RNA, 19 nt, Artificial Sequence
  Description of Artificial Sequence: Synthetic oligonucleotide
  Antisense strand to SEQ ID NO: 1550302
aauucaagugcgcaccacg

SEQ ID NO: 1550304 - RNA, 19 nt, Artificial Sequence
  Description of Artificial Sequence: Synthetic oligonucleotide
  Sense strand starting at position 813 of SEQ ID NO: 1245276
acuugaauuucagcgucga

SEQ ID NO: 1550305 - RNA, 19 nt, Artificial Sequence
  Description of Artificial Sequence: Synthetic oligonucleotide
  Antisense strand to SEQ ID NO: 1550304
ucgacgcugaaauucaagu

SEQ ID NO: 1550306 - RNA, 19 nt, Artificial Sequence
  Description of Artificial Sequence: Synthetic oligonucleotide
  Sense strand starting at position 817 of SEQ ID NO: 1245276
gaauuucagcgucgaggga

SEQ ID NO: 1550307 - RNA, 19 nt, Artificial Sequence
  Description of Artificial Sequence: Synthetic oligonucleotide
  Antisense strand to SEQ ID NO: 1550306
ucccucgacgcugaaauuc

SEQ ID NO: 1550308 - RNA, 19 nt, Artificial Sequence
  Description of Artificial Sequence: Synthetic oligonucleotide
  Sense strand starting at position 969 of SEQ ID NO: 1245276
gacucacuuggccagugaa

SEQ ID NO: 1550309 - RNA, 19 nt, Artificial Sequence
  Description of Artificial Sequence: Synthetic oligonucleotide
  Antisense strand to SEQ ID NO: 1550308
uucacuggccaagugaguc

SEQ ID NO: 1550310 - RNA, 19 nt, Artificial Sequence
  Description of Artificial Sequence: Synthetic oligonucleotide
  Sense strand starting at position 1016 of SEQ ID NO: 1245276
guaucaucaggguguguaa

SEQ ID NO: 1550311 - RNA, 19 nt, Artificial Sequence
  Description of Artificial Sequence: Synthetic oligonucleotide
  Antisense strand to SEQ ID NO: 1550310
uuacacacccugaugauac

SEQ ID NO: 1550312 - RNA, 19 nt, Artificial Sequence
  Description of Artificial Sequence: Synthetic oligonucleotide
  Sense strand starting at position 1068 of SEQ ID NO: 1245276
cagaaaguacgcugaagaa

SEQ ID NO: 1550313 - RNA, 19 nt, Artificial Sequence
  Description of Artificial Sequence: Synthetic oligonucleotide
  Antisense strand to SEQ ID NO: 1550312
uucuucagcguacuuucug

SEQ ID NO: 1550314 - RNA, 19 nt, Artificial Sequence
  Description of Artificial Sequence: Synthetic oligonucleotide
  Sense strand starting at position 1257 of SEQ ID NO: 1245276
cgagcuuuccgagagaucc

SEQ ID NO: 1550315 - RNA, 19 nt, Artificial Sequence
  Description of Artificial Sequence: Synthetic oligonucleotide
  Antisense strand to SEQ ID NO: 1550314
ggaucucucggaaagcucg

SEQ ID NO: 1550316 - RNA, 19 nt, Artificial Sequence
  Description of Artificial Sequence: Synthetic oligonucleotide
  Sense strand starting at position 2246 of SEQ ID NO: 1245276
ugauauugaaacugaggca

SEQ ID NO: 1550317 - RNA, 19 nt, Artificial Sequence
  Description of Artificial Sequence: Synthetic oligonucleotide
  Antisense strand to SEQ ID NO: 1550316
ugccucaguuucaauauca

SEQ ID NO: 1550318 - RNA, 19 nt, Artificial Sequence
  Description of Artificial Sequence: Synthetic oligonucleotide
  Sense strand starting at position 2334 of SEQ ID NO: 1245276
agacaaucgguuugggaac

SEQ ID NO: 1550319 - RNA, 19 nt, Artificial Sequence
  Description of Artificial Sequence: Synthetic oligonucleotide
  Antisense strand to SEQ ID NO: 1550318
guucccaaaccgauugucu

SEQ ID NO: 1550320 - RNA, 19 nt, Artificial Sequence
  Description of Artificial Sequence: Synthetic oligonucleotide
  Sense strand starting at position 2449 of SEQ ID NO: 1245276
cccuaaaucucaguuccga

SEQ ID NO: 1550321 - RNA, 19 nt, Artificial Sequence
  Description of Artificial Sequence: Synthetic oligonucleotide
  Antisense strand to SEQ ID NO: 1550320
ucggaacugagauuuaggg

SEQ ID NO: 1550322 - RNA, 19 nt, Artificial Sequence
  Description of Artificial Sequence: Synthetic oligonucleotide
  Sense strand starting at position 2466 of SEQ ID NO: 1245276
gagucaguaucucuaacug

SEQ ID NO: 1550323 - RNA, 19 nt, Artificial Sequence
  Description of Artificial Sequence: Synthetic oligonucleotide
  Antisense strand to SEQ ID NO: 1550322
caguuagagauacugacuc

SEQ ID NO: 1550324 - RNA, 19 nt, Artificial Sequence
  Description of Artificial Sequence: Synthetic oligonucleotide
  Sense strand starting at position 2490 of SEQ ID NO: 1245276
acuugagagcccuggguua

SEQ ID NO: 1550325 - RNA, 19 nt, Artificial Sequence
  Description of Artificial Sequence: Synthetic oligonucleotide
  Antisense strand to SEQ ID NO: 1550324
uaacccagggcucucaagu

SEQ ID NO: 1550326 - RNA, 19 nt, Artificial Sequence
  Description of Artificial Sequence: Synthetic oligonucleotide
  Sense strand starting at position 2492 of SEQ ID NO: 1245276
uugagagcccuggguuacu

SEQ ID NO: 1550327 - RNA, 19 nt, Artificial Sequence
  Description of Artificial Sequence: Synthetic oligonucleotide
  Antisense strand to SEQ ID NO: 1550326
aguaacccagggcucucaa

SEQ ID NO: 1550328 - RNA, 19 nt, Artificial Sequence
  Description of Artificial Sequence: Synthetic oligonucleotide
  Sense strand starting at position 2501 of SEQ ID NO: 1245276
cuggguuacugaucuuaau

SEQ ID NO: 1550329 - RNA, 19 nt, Artificial Sequence
  Description of Artificial Sequence: Synthetic oligonucleotide
  Antisense strand to SEQ ID NO: 1550328
auuaagaucaguaacccag

SEQ ID NO: 1550330 - RNA, 19 nt, Artificial Sequence
  Description of Artificial Sequence: Synthetic oligonucleotide
  Sense strand starting at position 2631 of SEQ ID NO: 1245276
ugcagaugugugcuuggca

SEQ ID NO: 1550331 - RNA, 19 nt, Artificial Sequence
  Description of Artificial Sequence: Synthetic oligonucleotide
  Antisense strand to SEQ ID NO: 1550330
ugccaagcacacaucugca

SEQ ID NO: 1550332 - RNA, 19 nt, Artificial Sequence
  Description of Artificial Sequence: Synthetic oligonucleotide
  Sense strand starting at position 2646 of SEQ ID NO: 1245276
ggcaaauguugccuauaua

SEQ ID NO: 1550333 - RNA, 19 nt, Artificial Sequence
  Description of Artificial Sequence: Synthetic oligonucleotide
  Antisense strand to SEQ ID NO: 1550332
uauauaggcaacauuugcc

SEQ ID NO: 1550334 - RNA, 19 nt, Artificial Sequence
  Description of Artificial Sequence: Synthetic oligonucleotide
  Sense strand starting at position 2647 of SEQ ID NO: 1245276
gcaaauguugccuauauau

SEQ ID NO: 1550335 - RNA, 19 nt, Artificial Sequence
  Description of Artificial Sequence: Synthetic oligonucleotide
  Antisense strand to SEQ ID NO: 1550334
auauauaggcaacauuugc

SEQ ID NO: 1550336 - RNA, 19 nt, Artificial Sequence
  Description of Artificial Sequence: Synthetic oligonucleotide
  Sense strand starting at position 2675 of SEQ ID NO: 1245276
uguggaaauuguguuccuu

SEQ ID NO: 1550337 - RNA, 19 nt, Artificial Sequence
  Description of Artificial Sequence: Synthetic oligonucleotide
  Antisense strand to SEQ ID NO: 1550336
aaggaacacaauuuccaca

SEQ ID NO: 1550338 - RNA, 19 nt, Artificial Sequence
  Description of Artificial Sequence: Synthetic oligonucleotide
  Sense strand starting at position 2770 of SEQ ID NO: 1245276
ucucaauucuggcuaggaa

SEQ ID NO: 1550339 - RNA, 19 nt, Artificial Sequence
  Description of Artificial Sequence: Synthetic oligonucleotide
  Antisense strand to SEQ ID NO: 1550338
uuccuagccagaauugaga

SEQ ID NO: 1550340 - RNA, 19 nt, Artificial Sequence
  Description of Artificial Sequence: Synthetic oligonucleotide
  Sense strand starting at position 3145 of SEQ ID NO: 1245276
ugagaugcaguguaugaca

SEQ ID NO: 1550341 - RNA, 19 nt, Artificial Sequence
  Description of Artificial Sequence: Synthetic oligonucleotide
  Antisense strand to SEQ ID NO: 1550340
ugucauacacugcaucuca

SEQ ID NO: 1550342 - RNA, 19 nt, Artificial Sequence
  Description of Artificial Sequence: Synthetic oligonucleotide
  Sense strand starting at position 3147 of SEQ ID NO: 1245276
agaugcaguguaugacaaa

SEQ ID NO: 1550343 - RNA, 19 nt, Artificial Sequence
  Description of Artificial Sequence: Synthetic oligonucleotide
  Antisense strand to SEQ ID NO: 1550342
uuugucauacacugcaucu

SEQ ID NO: 1550344 - RNA, 19 nt, Artificial Sequence
  Description of Artificial Sequence: Synthetic oligonucleotide
  Sense strand starting at position 3169 of SEQ ID NO: 1245276
gugccagugagagacuauu

SEQ ID NO: 1550345 - RNA, 19 nt, Artificial Sequence
  Description of Artificial Sequence: Synthetic oligonucleotide
  Antisense strand to SEQ ID NO: 1550344
aauagucucucacuggcac

SEQ ID NO: 1550346 - RNA, 19 nt, Artificial Sequence
  Description of Artificial Sequence: Synthetic oligonucleotide
  Sense strand starting at position 3687 of SEQ ID NO: 1245276
ugaucucagccucacaaga

SEQ ID NO: 1550347 - RNA, 19 nt, Artificial Sequence
  Description of Artificial Sequence: Synthetic oligonucleotide
  Antisense strand to SEQ ID NO: 1550346
ucuugugaggcugagauca

SEQ ID NO: 1550348 - RNA, 19 nt, Artificial Sequence
  Description of Artificial Sequence: Synthetic oligonucleotide
  Sense strand starting at position 3760 of SEQ ID NO: 1245276
gggagcagucuucagggua

SEQ ID NO: 1550349 - RNA, 19 nt, Artificial Sequence
  Description of Artificial Sequence: Synthetic oligonucleotide
  Antisense strand to SEQ ID NO: 1550348
uacccugaagacugcuccc

SEQ ID NO: 1550350 - RNA, 19 nt, Artificial Sequence
  Description of Artificial Sequence: Synthetic oligonucleotide
  Sense strand starting at position 259 of SEQ ID NO: 1245277
cacuguaucugacuggauu

SEQ ID NO: 1550351 - RNA, 19 nt, Artificial Sequence
  Description of Artificial Sequence: Synthetic oligonucleotide
  Antisense strand to SEQ ID NO: 1550350
aauccagucagauacagug

SEQ ID NO: 1550352 - RNA, 19 nt, Artificial Sequence
  Description of Artificial Sequence: Synthetic oligonucleotide
  Sense strand starting at position 267 of SEQ ID NO: 1245277
cugacuggauucuuguaaa

SEQ ID NO: 1550353 - RNA, 19 nt, Artificial Sequence
  Description of Artificial Sequence: Synthetic oligonucleotide
  Antisense strand to SEQ ID NO: 1550352
uuuacaagaauccagucag

SEQ ID NO: 1550354 - RNA, 19 nt, Artificial Sequence
  Description of Artificial Sequence: Synthetic oligonucleotide
  Sense strand starting at position 385 of SEQ ID NO: 1245277
ucauuauauuuagaggaga

SEQ ID NO: 1550355 - RNA, 19 nt, Artificial Sequence
  Description of Artificial Sequence: Synthetic oligonucleotide
  Antisense strand to SEQ ID NO: 1550354
ucuccucuaaauauaauga

SEQ ID NO: 1550356 - RNA, 19 nt, Artificial Sequence
  Description of Artificial Sequence: Synthetic oligonucleotide
  Sense strand starting at position 625 of SEQ ID NO: 1245277
uuuguuguccacuaaaguc

SEQ ID NO: 1550357 - RNA, 19 nt, Artificial Sequence
  Description of Artificial Sequence: Synthetic oligonucleotide
  Antisense strand to SEQ ID NO: 1550356
gacuuuaguggacaacaaa

SEQ ID NO: 1550358 - RNA, 19 nt, Artificial Sequence
  Description of Artificial Sequence: Synthetic oligonucleotide
  Sense strand starting at position 850 of SEQ ID NO: 1245277
auauauucccaguggagau

SEQ ID NO: 1550359 - RNA, 19 nt, Artificial Sequence
  Description of Artificial Sequence: Synthetic oligonucleotide
  Antisense strand to SEQ ID NO: 1550358
aucuccacugggaauauau

SEQ ID NO: 1550360 - RNA, 19 nt, Artificial Sequence
  Description of Artificial Sequence: Synthetic oligonucleotide
  Sense strand starting at position 1124 of SEQ ID NO: 1245277
ccacaaaguuuaguuugau

SEQ ID NO: 1550361 - RNA, 19 nt, Artificial Sequence
  Description of Artificial Sequence: Synthetic oligonucleotide
  Antisense strand to SEQ ID NO: 1550360
aucaaacuaaacuuugugg

SEQ ID NO: 1550362 - RNA, 19 nt, Artificial Sequence
  Description of Artificial Sequence: Synthetic oligonucleotide
  Sense strand starting at position 1299 of SEQ ID NO: 1245277
acccaucaucccgaguaua

SEQ ID NO: 1550363 - RNA, 19 nt, Artificial Sequence
  Description of Artificial Sequence: Synthetic oligonucleotide
  Antisense strand to SEQ ID NO: 1550362
uauacucgggaugaugggu

SEQ ID NO: 1550364 - RNA, 19 nt, Artificial Sequence
  Description of Artificial Sequence: Synthetic oligonucleotide
  Sense strand starting at position 1302 of SEQ ID NO: 1245277
caucaucccgaguauaugu

SEQ ID NO: 1550365 - RNA, 19 nt, Artificial Sequence
  Description of Artificial Sequence: Synthetic oligonucleotide
  Antisense strand to SEQ ID NO: 1550364
acauauacucgggaugaug

SEQ ID NO: 1550366 - RNA, 19 nt, Artificial Sequence
  Description of Artificial Sequence: Synthetic oligonucleotide
  Sense strand starting at position 1328 of SEQ ID NO: 1245277
uguaacuguguuuaauuga

SEQ ID NO: 1550367 - RNA, 19 nt, Artificial Sequence
  Description of Artificial Sequence: Synthetic oligonucleotide
  Antisense strand to SEQ ID NO: 1550366
ucaauuaaacacaguuaca

SEQ ID NO: 1550368 - RNA, 19 nt, Artificial Sequence
  Description of Artificial Sequence: Synthetic oligonucleotide
  Sense strand starting at position 1360 of SEQ ID NO: 1245277
uucuuucuuuaugugaaga

SEQ ID NO: 1550369 - RNA, 19 nt, Artificial Sequence
  Description of Artificial Sequence: Synthetic oligonucleotide
  Antisense strand to SEQ ID NO: 1550368
ucuucacauaaagaaagaa

SEQ ID NO: 1550370 - RNA, 19 nt, Artificial Sequence
  Description of Artificial Sequence: Synthetic oligonucleotide
  Sense strand starting at position 1598 of SEQ ID NO: 1245277
acccauacucuguguuuaa

SEQ ID NO: 1550371 - RNA, 19 nt, Artificial Sequence
  Description of Artificial Sequence: Synthetic oligonucleotide
  Antisense strand to SEQ ID NO: 1550370
uuaaacacagaguaugggu

SEQ ID NO: 1550372 - RNA, 19 nt, Artificial Sequence
  Description of Artificial Sequence: Synthetic oligonucleotide
  Sense strand starting at position 1666 of SEQ ID NO: 1245277
ucuauagaguugucucuau

SEQ ID NO: 1550373 - RNA, 19 nt, Artificial Sequence
  Description of Artificial Sequence: Synthetic oligonucleotide
  Antisense strand to SEQ ID NO: 1550372
auagagacaacucuauaga

SEQ ID NO: 1550374 - RNA, 19 nt, Artificial Sequence
  Description of Artificial Sequence: Synthetic oligonucleotide
  Sense strand starting at position 1670 of SEQ ID NO: 1245277
uagaguugucucuauagag

SEQ ID NO: 1550375 - RNA, 19 nt, Artificial Sequence
  Description of Artificial Sequence: Synthetic oligonucleotide
  Antisense strand to SEQ ID NO: 1550374
cucuauagagacaacucua

SEQ ID NO: 1550376 - RNA, 19 nt, Artificial Sequence
  Description of Artificial Sequence: Synthetic oligonucleotide
  Sense strand starting at position 2249 of SEQ ID NO: 1245277
gcuagaauggagugaaucu

SEQ ID NO: 1550377 - RNA, 19 nt, Artificial Sequence
  Description of Artificial Sequence: Synthetic oligonucleotide
  Antisense strand to SEQ ID NO: 1550376
agauucacuccauucuagc

SEQ ID NO: 1550378 - RNA, 19 nt, Artificial Sequence
  Description of Artificial Sequence: Synthetic oligonucleotide
  Sense strand starting at position 2298 of SEQ ID NO: 1245277
ggaugacuucuguagguac

SEQ ID NO: 1550379 - RNA, 19 nt, Artificial Sequence
  Description of Artificial Sequence: Synthetic oligonucleotide
  Antisense strand to SEQ ID NO: 1550378
guaccuacagaagucaucc

SEQ ID NO: 1550380 - RNA, 19 nt, Artificial Sequence
  Description of Artificial Sequence: Synthetic oligonucleotide
  Sense strand starting at position 2533 of SEQ ID NO: 1245277
uagacaguugcagguuuaa

SEQ ID NO: 1550381 - RNA, 19 nt, Artificial Sequence
  Description of Artificial Sequence: Synthetic oligonucleotide
  Antisense strand to SEQ ID NO: 1550380
uuaaaccugcaacugucua

SEQ ID NO: 1550382 - RNA, 19 nt, Artificial Sequence
  Description of Artificial Sequence: Synthetic oligonucleotide
  Sense strand starting at position 2566 of SEQ ID NO: 1245277
ugaauuagaucauugucau

SEQ ID NO: 1550383 - RNA, 19 nt, Artificial Sequence
  Description of Artificial Sequence: Synthetic oligonucleotide
  Antisense strand to SEQ ID NO: 1550382
augacaaugaucuaauuca

SEQ ID NO: 1550384 - RNA, 19 nt, Artificial Sequence
  Description of Artificial Sequence: Synthetic oligonucleotide
  Sense strand starting at position 2871 of SEQ ID NO: 1245277
acaugaugauguuuaacau

SEQ ID NO: 1550385 - RNA, 19 nt, Artificial Sequence
  Description of Artificial Sequence: Synthetic oligonucleotide
  Antisense strand to SEQ ID NO: 1550384
auguuaaacaucaucaugu

SEQ ID NO: 1550386 - RNA, 19 nt, Artificial Sequence
  Description of Artificial Sequence: Synthetic oligonucleotide
  Sense strand starting at position 2953 of SEQ ID NO: 1245277
agacuagacuugucuuucu

SEQ ID NO: 1550387 - RNA, 19 nt, Artificial Sequence
  Description of Artificial Sequence: Synthetic oligonucleotide
  Antisense strand to SEQ ID NO: 1550386
agaaagacaagucuagucu

SEQ ID NO: 1550388 - RNA, 19 nt, Artificial Sequence
  Description of Artificial Sequence: Synthetic oligonucleotide
  Sense strand starting at position 2956 of SEQ ID NO: 1245277
cuagacuugucuuucuauc

SEQ ID NO: 1550389 - RNA, 19 nt, Artificial Sequence
  Description of Artificial Sequence: Synthetic oligonucleotide
  Antisense strand to SEQ ID NO: 1550388
gauagaaagacaagucuag

SEQ ID NO: 1550390 - RNA, 19 nt, Artificial Sequence
  Description of Artificial Sequence: Synthetic oligonucleotide
  Sense strand starting at position 2958 of SEQ ID NO: 1245277
agacuugucuuucuaucua

SEQ ID NO: 1550391 - RNA, 19 nt, Artificial Sequence
  Description of Artificial Sequence: Synthetic oligonucleotide
  Antisense strand to SEQ ID NO: 1550390
uagauagaaagacaagucu

SEQ ID NO: 1550392 - RNA, 19 nt, Artificial Sequence
  Description of Artificial Sequence: Synthetic oligonucleotide
  Sense strand starting at position 2962 of SEQ ID NO: 1245277
uugucuuucuaucuagauu

SEQ ID NO: 1550393 - RNA, 19 nt, Artificial Sequence
  Description of Artificial Sequence: Synthetic oligonucleotide
  Antisense strand to SEQ ID NO: 1550392
aaucuagauagaaagacaa

SEQ ID NO: 1550394 - RNA, 19 nt, Artificial Sequence
  Description of Artificial Sequence: Synthetic oligonucleotide
  Sense strand starting at position 3032 of SEQ ID NO: 1245277
uaauaugugcacugaguag

SEQ ID NO: 1550395 - RNA, 19 nt, Artificial Sequence
  Description of Artificial Sequence: Synthetic oligonucleotide
  Antisense strand to SEQ ID NO: 1550394
cuacucagugcacauauua

SEQ ID NO: 1550396 - RNA, 19 nt, Artificial Sequence
  Description of Artificial Sequence: Synthetic oligonucleotide
  Sense strand starting at position 3242 of SEQ ID NO: 1245277
uuuguuaacucauuaagug

SEQ ID NO: 1550397 - RNA, 19 nt, Artificial Sequence
  Description of Artificial Sequence: Synthetic oligonucleotide
  Antisense strand to SEQ ID NO: 1550396
cacuuaaugaguuaacaaa

SEQ ID NO: 1550398 - RNA, 19 nt, Artificial Sequence
  Description of Artificial Sequence: Synthetic oligonucleotide
  Sense strand starting at position 3243 of SEQ ID NO: 1245277
uuguuaacucauuaaguga

SEQ ID NO: 1550399 - RNA, 19 nt, Artificial Sequence
  Description of Artificial Sequence: Synthetic oligonucleotide
  Antisense strand to SEQ ID NO: 1550398
ucacuuaaugaguuaacaa

SEQ ID NO: 1550400 - RNA, 19 nt, Artificial Sequence
  Description of Artificial Sequence: Synthetic oligonucleotide
  Sense strand starting at position 3250 of SEQ ID NO: 1245277
cucauuaagugagcuaaua

SEQ ID NO: 1550401 - RNA, 19 nt, Artificial Sequence
  Description of Artificial Sequence: Synthetic oligonucleotide
  Antisense strand to SEQ ID NO: 1550400
uauuagcucacuuaaugag

SEQ ID NO: 1550402 - RNA, 19 nt, Artificial Sequence
  Description of Artificial Sequence: Synthetic oligonucleotide
  Sense strand starting at position 3289 of SEQ ID NO: 1245277
gugucugacaagugauaag

SEQ ID NO: 1550403 - RNA, 19 nt, Artificial Sequence
  Description of Artificial Sequence: Synthetic oligonucleotide
  Antisense strand to SEQ ID NO: 1550402
cuuaucacuugucagacac

SEQ ID NO: 1550404 - RNA, 19 nt, Artificial Sequence
  Description of Artificial Sequence: Synthetic oligonucleotide
  Sense strand starting at position 3364 of SEQ ID NO: 1245277
ucagucuacuguuuacaaa

SEQ ID NO: 1550405 - RNA, 19 nt, Artificial Sequence
  Description of Artificial Sequence: Synthetic oligonucleotide
  Antisense strand to SEQ ID NO: 1550404
uuuguaaacaguagacuga

SEQ ID NO: 1550406 - RNA, 19 nt, Artificial Sequence
  Description of Artificial Sequence: Synthetic oligonucleotide
  Sense strand starting at position 3487 of SEQ ID NO: 1245277
agguguuuauuuccuuauu

SEQ ID NO: 1550407 - RNA, 19 nt, Artificial Sequence
  Description of Artificial Sequence: Synthetic oligonucleotide
  Antisense strand to SEQ ID NO: 1550406
aauaaggaaauaaacaccu

SEQ ID NO: 1550408 - RNA, 19 nt, Artificial Sequence
  Description of Artificial Sequence: Synthetic oligonucleotide
  Sense strand starting at position 3488 of SEQ ID NO: 1245277
gguguuuauuuccuuauug

SEQ ID NO: 1550409 - RNA, 19 nt, Artificial Sequence
  Description of Artificial Sequence: Synthetic oligonucleotide
  Antisense strand to SEQ ID NO: 1550408
caauaaggaaauaaacacc

SEQ ID NO: 1550410 - RNA, 19 nt, Artificial Sequence
  Description of Artificial Sequence: Synthetic oligonucleotide
  Sense strand starting at position 3500 of SEQ ID NO: 1245277
cuuauugcacuuugagaau

SEQ ID NO: 1550411 - RNA, 19 nt, Artificial Sequence
  Description of Artificial Sequence: Synthetic oligonucleotide
  Antisense strand to SEQ ID NO: 1550410
auucucaaagugcaauaag

SEQ ID NO: 1550412 - RNA, 19 nt, Artificial Sequence
  Description of Artificial Sequence: Synthetic oligonucleotide
  Sense strand starting at position 3730 of SEQ ID NO: 1245277
uuuacucuuugauugugaa

SEQ ID NO: 1550413 - RNA, 19 nt, Artificial Sequence
  Description of Artificial Sequence: Synthetic oligonucleotide
  Antisense strand to SEQ ID NO: 1550412
uucacaaucaaagaguaaa

SEQ ID NO: 1550414 - RNA, 19 nt, Artificial Sequence
  Description of Artificial Sequence: Synthetic oligonucleotide
  Sense strand starting at position 3731 of SEQ ID NO: 1245277
uuacucuuugauugugaau

SEQ ID NO: 1550415 - RNA, 19 nt, Artificial Sequence
  Description of Artificial Sequence: Synthetic oligonucleotide
  Antisense strand to SEQ ID NO: 1550414
auucacaaucaaagaguaa

SEQ ID NO: 1550416 - RNA, 19 nt, Artificial Sequence
  Description of Artificial Sequence: Synthetic oligonucleotide
  Sense strand starting at position 3757 of SEQ ID NO: 1245277
augucauagguccacuuau

SEQ ID NO: 1550417 - RNA, 19 nt, Artificial Sequence
  Description of Artificial Sequence: Synthetic oligonucleotide
  Antisense strand to SEQ ID NO: 1550416
auaaguggaccuaugacau

SEQ ID NO: 1550418 - RNA, 19 nt, Artificial Sequence
  Description of Artificial Sequence: Synthetic oligonucleotide
  Sense strand starting at position 3796 of SEQ ID NO: 1245277
ccaaguuuguaauucugga

SEQ ID NO: 1550419 - RNA, 19 nt, Artificial Sequence
  Description of Artificial Sequence: Synthetic oligonucleotide
  Antisense strand to SEQ ID NO: 1550418
uccagaauuacaaacuugg

SEQ ID NO: 1550420 - RNA, 19 nt, Artificial Sequence
  Description of Artificial Sequence: Synthetic oligonucleotide
  Sense strand starting at position 3824 of SEQ ID NO: 1245277
uucuuugagcugcagaaau

SEQ ID NO: 1550421 - RNA, 19 nt, Artificial Sequence
  Description of Artificial Sequence: Synthetic oligonucleotide
  Antisense strand to SEQ ID NO: 1550420
auuucugcagcucaaagaa

SEQ ID NO: 1550422 - RNA, 19 nt, Artificial Sequence
  Description of Artificial Sequence: Synthetic oligonucleotide
  Sense strand starting at position 3826 of SEQ ID NO: 1245277
cuuugagcugcagaaauga

SEQ ID NO: 1550423 - RNA, 19 nt, Artificial Sequence
  Description of Artificial Sequence: Synthetic oligonucleotide
  Antisense strand to SEQ ID NO: 1550422
ucauuucugcagcucaaag

SEQ ID NO: 1550424 - RNA, 19 nt, Artificial Sequence
  Description of Artificial Sequence: Synthetic oligonucleotide
  Sense strand starting at position 3857 of SEQ ID NO: 1245277
cuggguugucuccauccaa

SEQ ID NO: 1550425 - RNA, 19 nt, Artificial Sequence
  Description of Artificial Sequence: Synthetic oligonucleotide
  Antisense strand to SEQ ID NO: 1550424
uuggauggagacaacccag

SEQ ID NO: 1550426 - RNA, 19 nt, Artificial Sequence
  Description of Artificial Sequence: Synthetic oligonucleotide
  Sense strand starting at position 3896 of SEQ ID NO: 1245277
ucaguaggucuagaaguau

SEQ ID NO: 1550427 - RNA, 19 nt, Artificial Sequence
  Description of Artificial Sequence: Synthetic oligonucleotide
  Antisense strand to SEQ ID NO: 1550426
auacuucuagaccuacuga

SEQ ID NO: 1550428 - RNA, 19 nt, Artificial Sequence
  Description of Artificial Sequence: Synthetic oligonucleotide
  Sense strand starting at position 3902 of SEQ ID NO: 1245277
ggucuagaaguauaucauc

SEQ ID NO: 1550429 - RNA, 19 nt, Artificial Sequence
  Description of Artificial Sequence: Synthetic oligonucleotide
  Antisense strand to SEQ ID NO: 1550428
gaugauauacuucuagacc

SEQ ID NO: 1550430 - RNA, 19 nt, Artificial Sequence
  Description of Artificial Sequence: Synthetic oligonucleotide
  Sense strand starting at position 58 of SEQ ID NO: 1245278
guaggcuuccgcuccugau

SEQ ID NO: 1550431 - RNA, 19 nt, Artificial Sequence
  Description of Artificial Sequence: Synthetic oligonucleotide
  Antisense strand to SEQ ID NO: 1550430
aucaggagcggaagccuac

SEQ ID NO: 1550432 - RNA, 19 nt, Artificial Sequence
  Description of Artificial Sequence: Synthetic oligonucleotide
  Sense strand starting at position 72 of SEQ ID NO: 1245278
cugaucugugcagacacaa

SEQ ID NO: 1550433 - RNA, 19 nt, Artificial Sequence
  Description of Artificial Sequence: Synthetic oligonucleotide
  Antisense strand to SEQ ID NO: 1550432
uugugucugcacagaucag

SEQ ID NO: 1550434 - RNA, 19 nt, Artificial Sequence
  Description of Artificial Sequence: Synthetic oligonucleotide
  Sense strand starting at position 534 of SEQ ID NO: 1245278
cauuaaggaugugccaauu

SEQ ID NO: 1550435 - RNA, 19 nt, Artificial Sequence
  Description of Artificial Sequence: Synthetic oligonucleotide
  Antisense strand to SEQ ID NO: 1550434
aauuggcacauccuuaaug

SEQ ID NO: 1550436 - RNA, 19 nt, Artificial Sequence
  Description of Artificial Sequence: Synthetic oligonucleotide
  Sense strand starting at position 658 of SEQ ID NO: 1245278
ucuguaauuuccgccgguu

SEQ ID NO: 1550437 - RNA, 19 nt, Artificial Sequence
  Description of Artificial Sequence: Synthetic oligonucleotide
  Antisense strand to SEQ ID NO: 1550436
aaccggcggaaauuacaga

SEQ ID NO: 1550438 - RNA, 19 nt, Artificial Sequence
  Description of Artificial Sequence: Synthetic oligonucleotide
  Sense strand starting at position 781 of SEQ ID NO: 1245278
acccuagcagguuguuaaa

SEQ ID NO: 1550439 - RNA, 19 nt, Artificial Sequence
  Description of Artificial Sequence: Synthetic oligonucleotide
  Antisense strand to SEQ ID NO: 1550438
uuuaacaaccugcuagggu

SEQ ID NO: 1550440 - RNA, 19 nt, Artificial Sequence
  Description of Artificial Sequence: Synthetic oligonucleotide
  Sense strand starting at position 810 of SEQ ID NO: 1245278
uguggaaagucacucggaa

SEQ ID NO: 1550441 - RNA, 19 nt, Artificial Sequence
  Description of Artificial Sequence: Synthetic oligonucleotide
  Antisense strand to SEQ ID NO: 1550440
uuccgagugacuuuccaca

SEQ ID NO: 1550442 - RNA, 19 nt, Artificial Sequence
  Description of Artificial Sequence: Synthetic oligonucleotide
  Sense strand starting at position 859 of SEQ ID NO: 1245278
gggugucuguguugggaaa

SEQ ID NO: 1550443 - RNA, 19 nt, Artificial Sequence
  Description of Artificial Sequence: Synthetic oligonucleotide
  Antisense strand to SEQ ID NO: 1550442
uuucccaacacagacaccc

SEQ ID NO: 1550444 - RNA, 19 nt, Artificial Sequence
  Description of Artificial Sequence: Synthetic oligonucleotide
  Sense strand starting at position 912 of SEQ ID NO: 1245278
acagauccuuguuugcuua

SEQ ID NO: 1550445 - RNA, 19 nt, Artificial Sequence
  Description of Artificial Sequence: Synthetic oligonucleotide
  Antisense strand to SEQ ID NO: 1550444
uaagcaaacaaggaucugu

SEQ ID NO: 1550446 - RNA, 19 nt, Artificial Sequence
  Description of Artificial Sequence: Synthetic oligonucleotide
  Sense strand starting at position 915 of SEQ ID NO: 1245278
gauccuuguuugcuuaaga

SEQ ID NO: 1550447 - RNA, 19 nt, Artificial Sequence
  Description of Artificial Sequence: Synthetic oligonucleotide
  Antisense strand to SEQ ID NO: 1550446
ucuuaagcaaacaaggauc

SEQ ID NO: 1550448 - RNA, 19 nt, Artificial Sequence
  Description of Artificial Sequence: Synthetic oligonucleotide
  Sense strand starting at position 916 of SEQ ID NO: 1245278
auccuuguuugcuuaagac

SEQ ID NO: 1550449 - RNA, 19 nt, Artificial Sequence
  Description of Artificial Sequence: Synthetic oligonucleotide
  Antisense strand to SEQ ID NO: 1550448
gucuuaagcaaacaaggau

SEQ ID NO: 1550450 - RNA, 19 nt, Artificial Sequence
  Description of Artificial Sequence: Synthetic oligonucleotide
  Sense strand starting at position 1237 of SEQ ID NO: 1245278
acaggacccgcuuguuuau

SEQ ID NO: 1550451 - RNA, 19 nt, Artificial Sequence
  Description of Artificial Sequence: Synthetic oligonucleotide
  Antisense strand to SEQ ID NO: 1550450
auaaacaagcggguccugu

SEQ ID NO: 1550452 - RNA, 19 nt, Artificial Sequence
  Description of Artificial Sequence: Synthetic oligonucleotide
  Sense strand starting at position 1266 of SEQ ID NO: 1245278
cccgaaauccugugucacc

SEQ ID NO: 1550453 - RNA, 19 nt, Artificial Sequence
  Description of Artificial Sequence: Synthetic oligonucleotide
  Antisense strand to SEQ ID NO: 1550452
ggugacacaggauuucggg

SEQ ID NO: 1550454 - RNA, 19 nt, Artificial Sequence
  Description of Artificial Sequence: Synthetic oligonucleotide
  Sense strand starting at position 1267 of SEQ ID NO: 1245278
ccgaaauccugugucaccu

SEQ ID NO: 1550455 - RNA, 19 nt, Artificial Sequence
  Description of Artificial Sequence: Synthetic oligonucleotide
  Antisense strand to SEQ ID NO: 1550454
aggugacacaggauuucgg

SEQ ID NO: 1550456 - RNA, 19 nt, Artificial Sequence
  Description of Artificial Sequence: Synthetic oligonucleotide
  Sense strand starting at position 1327 of SEQ ID NO: 1245278
cagguuucucccugcagca

SEQ ID NO: 1550457 - RNA, 19 nt, Artificial Sequence
  Description of Artificial Sequence: Synthetic oligonucleotide
  Antisense strand to SEQ ID NO: 1550456
ugcugcagggagaaaccug

SEQ ID NO: 1550458 - RNA, 19 nt, Artificial Sequence
  Description of Artificial Sequence: Synthetic oligonucleotide
  Sense strand starting at position 1329 of SEQ ID NO: 1245278
gguuucucccugcagcaau

SEQ ID NO: 1550459 - RNA, 19 nt, Artificial Sequence
  Description of Artificial Sequence: Synthetic oligonucleotide
  Antisense strand to SEQ ID NO: 1550458
auugcugcagggagaaacc

SEQ ID NO: 1550460 - RNA, 19 nt, Artificial Sequence
  Description of Artificial Sequence: Synthetic oligonucleotide
  Sense strand starting at position 1340 of SEQ ID NO: 1245278
gcagcaauuuccuaagagg

SEQ ID NO: 1550461 - RNA, 19 nt, Artificial Sequence
  Description of Artificial Sequence: Synthetic oligonucleotide
  Antisense strand to SEQ ID NO: 1550460
ccucuuaggaaauugcugc

SEQ ID NO: 1550462 - RNA, 19 nt, Artificial Sequence
  Description of Artificial Sequence: Synthetic oligonucleotide
  Sense strand starting at position 2009 of SEQ ID NO: 1245278
gggcguggccaugcuuaau

SEQ ID NO: 1550463 - RNA, 19 nt, Artificial Sequence
  Description of Artificial Sequence: Synthetic oligonucleotide
  Antisense strand to SEQ ID NO: 1550462
auuaagcauggccacgccc

SEQ ID NO: 1550464 - RNA, 19 nt, Artificial Sequence
  Description of Artificial Sequence: Synthetic oligonucleotide
  Sense strand starting at position 2012 of SEQ ID NO: 1245278
cguggccaugcuuaaugau

SEQ ID NO: 1550465 - RNA, 19 nt, Artificial Sequence
  Description of Artificial Sequence: Synthetic oligonucleotide
  Antisense strand to SEQ ID NO: 1550464
aucauuaagcauggccacg

SEQ ID NO: 1550466 - RNA, 19 nt, Artificial Sequence
  Description of Artificial Sequence: Synthetic oligonucleotide
  Sense strand starting at position 2015 of SEQ ID NO: 1245278
ggccaugcuuaaugauaau

SEQ ID NO: 1550467 - RNA, 19 nt, Artificial Sequence
  Description of Artificial Sequence: Synthetic oligonucleotide
  Antisense strand to SEQ ID NO: 1550466
auuaucauuaagcauggcc

SEQ ID NO: 1550468 - RNA, 19 nt, Artificial Sequence
  Description of Artificial Sequence: Synthetic oligonucleotide
  Sense strand starting at position 2148 of SEQ ID NO: 1245278
ucgcuacucugucauccaa

SEQ ID NO: 1550469 - RNA, 19 nt, Artificial Sequence
  Description of Artificial Sequence: Synthetic oligonucleotide
  Antisense strand to SEQ ID NO: 1550468
uuggaugacagaguagcga

SEQ ID NO: 1550470 - RNA, 19 nt, Artificial Sequence
  Description of Artificial Sequence: Synthetic oligonucleotide
  Sense strand starting at position 2184 of SEQ ID NO: 1245278
gagagauagccuggguagu

SEQ ID NO: 1550471 - RNA, 19 nt, Artificial Sequence
  Description of Artificial Sequence: Synthetic oligonucleotide
  Antisense strand to SEQ ID NO: 1550470
acuacccaggcuaucucuc

SEQ ID NO: 1550472 - RNA, 19 nt, Artificial Sequence
  Description of Artificial Sequence: Synthetic oligonucleotide
  Sense strand starting at position 2217 of SEQ ID NO: 1245278
agauuaggauuccaaucuu

SEQ ID NO: 1550473 - RNA, 19 nt, Artificial Sequence
  Description of Artificial Sequence: Synthetic oligonucleotide
  Antisense strand to SEQ ID NO: 1550472
aagauuggaauccuaaucu

SEQ ID NO: 1550474 - RNA, 19 nt, Artificial Sequence
  Description of Artificial Sequence: Synthetic oligonucleotide
  Sense strand starting at position 2246 of SEQ ID NO: 1245278
cagagauucuagugcuaaa

SEQ ID NO: 1550475 - RNA, 19 nt, Artificial Sequence
  Description of Artificial Sequence: Synthetic oligonucleotide
  Antisense strand to SEQ ID NO: 1550474
uuuagcacuagaaucucug

SEQ ID NO: 1550476 - RNA, 19 nt, Artificial Sequence
  Description of Artificial Sequence: Synthetic oligonucleotide
  Sense strand starting at position 2402 of SEQ ID NO: 1245278
gcuugaaacuccugcuuga

SEQ ID NO: 1550477 - RNA, 19 nt, Artificial Sequence
  Description of Artificial Sequence: Synthetic oligonucleotide
  Antisense strand to SEQ ID NO: 1550476
ucaagcaggaguuucaagc

SEQ ID NO: 1550478 - RNA, 19 nt, Artificial Sequence
  Description of Artificial Sequence: Synthetic oligonucleotide
  Sense strand starting at position 2463 of SEQ ID NO: 1245278
cgucgcugcuaauaauaca

SEQ ID NO: 1550479 - RNA, 19 nt, Artificial Sequence
  Description of Artificial Sequence: Synthetic oligonucleotide
  Antisense strand to SEQ ID NO: 1550478
uguauuauuagcagcgacg

SEQ ID NO: 1550480 - RNA, 19 nt, Artificial Sequence
  Description of Artificial Sequence: Synthetic oligonucleotide
  Sense strand starting at position 2483 of SEQ ID NO: 1245278
aaauuagccgggcguuaau

SEQ ID NO: 1550481 - RNA, 19 nt, Artificial Sequence
  Description of Artificial Sequence: Synthetic oligonucleotide
  Antisense strand to SEQ ID NO: 1550480
auuaacgcccggcuaauuu

SEQ ID NO: 1550482 - RNA, 19 nt, Artificial Sequence
  Description of Artificial Sequence: Synthetic oligonucleotide
  Sense strand starting at position 2543 of SEQ ID NO: 1245278
cagacucgguucuagugau

SEQ ID NO: 1550483 - RNA, 19 nt, Artificial Sequence
  Description of Artificial Sequence: Synthetic oligonucleotide
  Antisense strand to SEQ ID NO: 1550482
aucacuagaaccgagucug

SEQ ID NO: 1550484 - RNA, 19 nt, Artificial Sequence
  Description of Artificial Sequence: Synthetic oligonucleotide
  Sense strand starting at position 2547 of SEQ ID NO: 1245278
cucgguucuagugaugaag

SEQ ID NO: 1550485 - RNA, 19 nt, Artificial Sequence
  Description of Artificial Sequence: Synthetic oligonucleotide
  Antisense strand to SEQ ID NO: 1550484
cuucaucacuagaaccgag

SEQ ID NO: 1550486 - RNA, 19 nt, Artificial Sequence
  Description of Artificial Sequence: Synthetic oligonucleotide
  Sense strand starting at position 2549 of SEQ ID NO: 1245278
cgguucuagugaugaagac

SEQ ID NO: 1550487 - RNA, 19 nt, Artificial Sequence
  Description of Artificial Sequence: Synthetic oligonucleotide
  Antisense strand to SEQ ID NO: 1550486
gucuucaucacuagaaccg

SEQ ID NO: 1550488 - RNA, 19 nt, Artificial Sequence
  Description of Artificial Sequence: Synthetic oligonucleotide
  Sense strand starting at position 2722 of SEQ ID NO: 1245278
gggauauaauaacgcauau

SEQ ID NO: 1550489 - RNA, 19 nt, Artificial Sequence
  Description of Artificial Sequence: Synthetic oligonucleotide
  Antisense strand to SEQ ID NO: 1550488
auaugcguuauuauauccc

SEQ ID NO: 1550490 - RNA, 19 nt, Artificial Sequence
  Description of Artificial Sequence: Synthetic oligonucleotide
  Sense strand starting at position 2750 of SEQ ID NO: 1245278
acguauuuagcaggccaua

SEQ ID NO: 1550491 - RNA, 19 nt, Artificial Sequence
  Description of Artificial Sequence: Synthetic oligonucleotide
  Antisense strand to SEQ ID NO: 1550490
uauggccugcuaaauacgu

SEQ ID NO: 1550492 - RNA, 19 nt, Artificial Sequence
  Description of Artificial Sequence: Synthetic oligonucleotide
  Sense strand starting at position 3654 of SEQ ID NO: 1245278
agaauaagcucagagaaga

SEQ ID NO: 1550493 - RNA, 19 nt, Artificial Sequence
  Description of Artificial Sequence: Synthetic oligonucleotide
  Antisense strand to SEQ ID NO: 1550492
ucuucucugagcuuauucu

SEQ ID NO: 1550494 - RNA, 19 nt, Artificial Sequence
  Description of Artificial Sequence: Synthetic oligonucleotide
  Sense strand starting at position 3859 of SEQ ID NO: 1245278
gguaguuauucccaucuuc

SEQ ID NO: 1550495 - RNA, 19 nt, Artificial Sequence
  Description of Artificial Sequence: Synthetic oligonucleotide
  Antisense strand to SEQ ID NO: 1550494
gaagaugggaauaacuacc

SEQ ID NO: 1550496 - RNA, 19 nt, Artificial Sequence
  Description of Artificial Sequence: Synthetic oligonucleotide
  Sense strand starting at position 3945 of SEQ ID NO: 1245278
ggccaaaucucuugaucug

SEQ ID NO: 1550497 - RNA, 19 nt, Artificial Sequence
  Description of Artificial Sequence: Synthetic oligonucleotide
  Antisense strand to SEQ ID NO: 1550496
cagaucaagagauuuggcc

SEQ ID NO: 1550498 - RNA, 19 nt, Artificial Sequence
  Description of Artificial Sequence: Synthetic oligonucleotide
  Sense strand starting at position 3946 of SEQ ID NO: 1245278
gccaaaucucuugaucuga

SEQ ID NO: 1550499 - RNA, 19 nt, Artificial Sequence
  Description of Artificial Sequence: Synthetic oligonucleotide
  Antisense strand to SEQ ID NO: 1550498
ucagaucaagagauuuggc

SEQ ID NO: 1550500 - RNA, 19 nt, Artificial Sequence
  Description of Artificial Sequence: Synthetic oligonucleotide
  Sense strand starting at position 32 of SEQ ID NO: 1245279
aagguuugaggauggcaua

SEQ ID NO: 1550501 - RNA, 19 nt, Artificial Sequence
  Description of Artificial Sequence: Synthetic oligonucleotide
  Antisense strand to SEQ ID NO: 1550500
uaugccauccucaaaccuu

SEQ ID NO: 1550502 - RNA, 19 nt, Artificial Sequence
  Description of Artificial Sequence: Synthetic oligonucleotide
  Sense strand starting at position 33 of SEQ ID NO: 1245279
agguuugaggauggcauau

SEQ ID NO: 1550503 - RNA, 19 nt, Artificial Sequence
  Description of Artificial Sequence: Synthetic oligonucleotide
  Antisense strand to SEQ ID NO: 1550502
auaugccauccucaaaccu

SEQ ID NO: 1550504 - RNA, 19 nt, Artificial Sequence
  Description of Artificial Sequence: Synthetic oligonucleotide
  Sense strand starting at position 183 of SEQ ID NO: 1245279
gcguaacuggcauaauuuc

SEQ ID NO: 1550505 - RNA, 19 nt, Artificial Sequence
  Description of Artificial Sequence: Synthetic oligonucleotide
  Antisense strand to SEQ ID NO: 1550504
gaaauuaugccaguuacgc

SEQ ID NO: 1550506 - RNA, 19 nt, Artificial Sequence
  Description of Artificial Sequence: Synthetic oligonucleotide
  Sense strand starting at position 190 of SEQ ID NO: 1245279
uggcauaauuucuaucaug

SEQ ID NO: 1550507 - RNA, 19 nt, Artificial Sequence
  Description of Artificial Sequence: Synthetic oligonucleotide
  Antisense strand to SEQ ID NO: 1550506
caugauagaaauuaugcca

SEQ ID NO: 1550508 - RNA, 19 nt, Artificial Sequence
  Description of Artificial Sequence: Synthetic oligonucleotide
  Sense strand starting at position 288 of SEQ ID NO: 1245279
augagaagaguugguauca

SEQ ID NO: 1550509 - RNA, 19 nt, Artificial Sequence
  Description of Artificial Sequence: Synthetic oligonucleotide
  Antisense strand to SEQ ID NO: 1550508
ugauaccaacucuucucau

SEQ ID NO: 1550510 - RNA, 19 nt, Artificial Sequence
  Description of Artificial Sequence: Synthetic oligonucleotide
  Sense strand starting at position 289 of SEQ ID NO: 1245279
ugagaagaguugguaucaa

SEQ ID NO: 1550511 - RNA, 19 nt, Artificial Sequence
  Description of Artificial Sequence: Synthetic oligonucleotide
  Antisense strand to SEQ ID NO: 1550510
uugauaccaacucuucuca

SEQ ID NO: 1550512 - RNA, 19 nt, Artificial Sequence
  Description of Artificial Sequence: Synthetic oligonucleotide
  Sense strand starting at position 421 of SEQ ID NO: 1245279
gaaauacauuuagaagguu

SEQ ID NO: 1550513 - RNA, 19 nt, Artificial Sequence
  Description of Artificial Sequence: Synthetic oligonucleotide
  Antisense strand to SEQ ID NO: 1550512
aaccuucuaaauguauuuc

SEQ ID NO: 1550514 - RNA, 19 nt, Artificial Sequence
  Description of Artificial Sequence: Synthetic oligonucleotide
  Sense strand starting at position 429 of SEQ ID NO: 1245279
uuuagaagguuggucaauu

SEQ ID NO: 1550515 - RNA, 19 nt, Artificial Sequence
  Description of Artificial Sequence: Synthetic oligonucleotide
  Antisense strand to SEQ ID NO: 1550514
aauugaccaaccuucuaaa

SEQ ID NO: 1550516 - RNA, 19 nt, Artificial Sequence
  Description of Artificial Sequence: Synthetic oligonucleotide
  Sense strand starting at position 430 of SEQ ID NO: 1245279
uuagaagguuggucaauuc

SEQ ID NO: 1550517 - RNA, 19 nt, Artificial Sequence
  Description of Artificial Sequence: Synthetic oligonucleotide
  Antisense strand to SEQ ID NO: 1550516
gaauugaccaaccuucuaa

SEQ ID NO: 1550518 - RNA, 19 nt, Artificial Sequence
  Description of Artificial Sequence: Synthetic oligonucleotide
  Sense strand starting at position 707 of SEQ ID NO: 1245279
ugaaauggagccugggaau

SEQ ID NO: 1550519 - RNA, 19 nt, Artificial Sequence
  Description of Artificial Sequence: Synthetic oligonucleotide
  Antisense strand to SEQ ID NO: 1550518
auucccaggcuccauuuca

SEQ ID NO: 1550520 - RNA, 19 nt, Artificial Sequence
  Description of Artificial Sequence: Synthetic oligonucleotide
  Sense strand starting at position 719 of SEQ ID NO: 1245279
ugggaauugguauguuuac

SEQ ID NO: 1550521 - RNA, 19 nt, Artificial Sequence
  Description of Artificial Sequence: Synthetic oligonucleotide
  Antisense strand to SEQ ID NO: 1550520
guaaacauaccaauuccca

SEQ ID NO: 1550522 - RNA, 19 nt, Artificial Sequence
  Description of Artificial Sequence: Synthetic oligonucleotide
  Sense strand starting at position 720 of SEQ ID NO: 1245279
gggaauugguauguuuacu

SEQ ID NO: 1550523 - RNA, 19 nt, Artificial Sequence
  Description of Artificial Sequence: Synthetic oligonucleotide
  Antisense strand to SEQ ID NO: 1550522
aguaaacauaccaauuccc

SEQ ID NO: 1550524 - RNA, 19 nt, Artificial Sequence
  Description of Artificial Sequence: Synthetic oligonucleotide
  Sense strand starting at position 754 of SEQ ID NO: 1245279
ggacucugaucaucaguca

SEQ ID NO: 1550525 - RNA, 19 nt, Artificial Sequence
  Description of Artificial Sequence: Synthetic oligonucleotide
  Antisense strand to SEQ ID NO: 1550524
ugacugaugaucagagucc

SEQ ID NO: 1550526 - RNA, 19 nt, Artificial Sequence
  Description of Artificial Sequence: Synthetic oligonucleotide
  Sense strand starting at position 765 of SEQ ID NO: 1245279
aucagucaggucugucaga

SEQ ID NO: 1550527 - RNA, 19 nt, Artificial Sequence
  Description of Artificial Sequence: Synthetic oligonucleotide
  Antisense strand to SEQ ID NO: 1550526
ucugacagaccugacugau

SEQ ID NO: 1550528 - RNA, 19 nt, Artificial Sequence
  Description of Artificial Sequence: Synthetic oligonucleotide
  Sense strand starting at position 766 of SEQ ID NO: 1245279
ucagucaggucugucagaa

SEQ ID NO: 1550529 - RNA, 19 nt, Artificial Sequence
  Description of Artificial Sequence: Synthetic oligonucleotide
  Antisense strand to SEQ ID NO: 1550528
uucugacagaccugacuga

SEQ ID NO: 1550530 - RNA, 19 nt, Artificial Sequence
  Description of Artificial Sequence: Synthetic oligonucleotide
  Sense strand starting at position 774 of SEQ ID NO: 1245279
gucugucagaagggcuaua

SEQ ID NO: 1550531 - RNA, 19 nt, Artificial Sequence
  Description of Artificial Sequence: Synthetic oligonucleotide
  Antisense strand to SEQ ID NO: 1550530
uauagcccuucugacagac

SEQ ID NO: 1550532 - RNA, 19 nt, Artificial Sequence
  Description of Artificial Sequence: Synthetic oligonucleotide
  Sense strand starting at position 940 of SEQ ID NO: 1245279
aucucaauuucggcucauu

SEQ ID NO: 1550533 - RNA, 19 nt, Artificial Sequence
  Description of Artificial Sequence: Synthetic oligonucleotide
  Antisense strand to SEQ ID NO: 1550532
aaugagccgaaauugagau

SEQ ID NO: 1550534 - RNA, 19 nt, Artificial Sequence
  Description of Artificial Sequence: Synthetic oligonucleotide
  Sense strand starting at position 950 of SEQ ID NO: 1245279
cggcucauuccucauaaca

SEQ ID NO: 1550535 - RNA, 19 nt, Artificial Sequence
  Description of Artificial Sequence: Synthetic oligonucleotide
  Antisense strand to SEQ ID NO: 1550534
uguuaugaggaaugagccg

SEQ ID NO: 1550536 - RNA, 19 nt, Artificial Sequence
  Description of Artificial Sequence: Synthetic oligonucleotide
  Sense strand starting at position 1007 of SEQ ID NO: 1245279
aguaauaaguaagcagaaa

SEQ ID NO: 1550537 - RNA, 19 nt, Artificial Sequence
  Description of Artificial Sequence: Synthetic oligonucleotide
  Antisense strand to SEQ ID NO: 1550536
uuucugcuuacuuauuacu

SEQ ID NO: 1550538 - RNA, 19 nt, Artificial Sequence
  Description of Artificial Sequence: Synthetic oligonucleotide
  Sense strand starting at position 1345 of SEQ ID NO: 1245279
gcuccaagaucccugcaau

SEQ ID NO: 1550539 - RNA, 19 nt, Artificial Sequence
  Description of Artificial Sequence: Synthetic oligonucleotide
  Antisense strand to SEQ ID NO: 1550538
auugcagggaucuuggagc

SEQ ID NO: 1550540 - RNA, 19 nt, Artificial Sequence
  Description of Artificial Sequence: Synthetic oligonucleotide
  Sense strand starting at position 2741 of SEQ ID NO: 1245279
gcggguugugacguaagca

SEQ ID NO: 1550541 - RNA, 19 nt, Artificial Sequence
  Description of Artificial Sequence: Synthetic oligonucleotide
  Antisense strand to SEQ ID NO: 1550540
ugcuuacgucacaacccgc

SEQ ID NO: 1550542 - RNA, 19 nt, Artificial Sequence
  Description of Artificial Sequence: Synthetic oligonucleotide
  Sense strand starting at position 2844 of SEQ ID NO: 1245279
ugggccuuucaggaaguuu

SEQ ID NO: 1550543 - RNA, 19 nt, Artificial Sequence
  Description of Artificial Sequence: Synthetic oligonucleotide
  Antisense strand to SEQ ID NO: 1550542
aaacuuccugaaaggccca

SEQ ID NO: 1550544 - RNA, 19 nt, Artificial Sequence
  Description of Artificial Sequence: Synthetic oligonucleotide
  Sense strand starting at position 2913 of SEQ ID NO: 1245279
ugaucuugucaagaugugu

SEQ ID NO: 1550545 - RNA, 19 nt, Artificial Sequence
  Description of Artificial Sequence: Synthetic oligonucleotide
  Antisense strand to SEQ ID NO: 1550544
acacaucuugacaagauca

SEQ ID NO: 1550546 - RNA, 19 nt, Artificial Sequence
  Description of Artificial Sequence: Synthetic oligonucleotide
  Sense strand starting at position 2917 of SEQ ID NO: 1245279
cuugucaagauguguuaua

SEQ ID NO: 1550547 - RNA, 19 nt, Artificial Sequence
  Description of Artificial Sequence: Synthetic oligonucleotide
  Antisense strand to SEQ ID NO: 1550546
uauaacacaucuugacaag

SEQ ID NO: 1550548 - RNA, 19 nt, Artificial Sequence
  Description of Artificial Sequence: Synthetic oligonucleotide
  Sense strand starting at position 2918 of SEQ ID NO: 1245279
uugucaagauguguuauaa

SEQ ID NO: 1550549 - RNA, 19 nt, Artificial Sequence
  Description of Artificial Sequence: Synthetic oligonucleotide
  Antisense strand to SEQ ID NO: 1550548
uuauaacacaucuugacaa

SEQ ID NO: 1550550 - RNA, 19 nt, Artificial Sequence
  Description of Artificial Sequence: Synthetic oligonucleotide
  Sense strand starting at position 2937 of SEQ ID NO: 1245279
acaaauauuuguuacggga

SEQ ID NO: 1550551 - RNA, 19 nt, Artificial Sequence
  Description of Artificial Sequence: Synthetic oligonucleotide
  Antisense strand to SEQ ID NO: 1550550
ucccguaacaaauauuugu

SEQ ID NO: 1550552 - RNA, 19 nt, Artificial Sequence
  Description of Artificial Sequence: Synthetic oligonucleotide
  Sense strand starting at position 2975 of SEQ ID NO: 1245279
ggauuaaaguuuccuugag

SEQ ID NO: 1550553 - RNA, 19 nt, Artificial Sequence
  Description of Artificial Sequence: Synthetic oligonucleotide
  Antisense strand to SEQ ID NO: 1550552
cucaaggaaacuuuaaucc

SEQ ID NO: 1550554 - RNA, 19 nt, Artificial Sequence
  Description of Artificial Sequence: Synthetic oligonucleotide
  Sense strand starting at position 2976 of SEQ ID NO: 1245279
gauuaaaguuuccuugaga

SEQ ID NO: 1550555 - RNA, 19 nt, Artificial Sequence
  Description of Artificial Sequence: Synthetic oligonucleotide
  Antisense strand to SEQ ID NO: 1550554
ucucaaggaaacuuuaauc

SEQ ID NO: 1550556 - RNA, 19 nt, Artificial Sequence
  Description of Artificial Sequence: Synthetic oligonucleotide
  Sense strand starting at position 2977 of SEQ ID NO: 1245279
auuaaaguuuccuugagag

SEQ ID NO: 1550557 - RNA, 19 nt, Artificial Sequence
  Description of Artificial Sequence: Synthetic oligonucleotide
  Antisense strand to SEQ ID NO: 1550556
cucucaaggaaacuuuaau

SEQ ID NO: 1550558 - RNA, 19 nt, Artificial Sequence
  Description of Artificial Sequence: Synthetic oligonucleotide
  Sense strand starting at position 3113 of SEQ ID NO: 1245279
agaaaugccguagaagcau

SEQ ID NO: 1550559 - RNA, 19 nt, Artificial Sequence
  Description of Artificial Sequence: Synthetic oligonucleotide
  Antisense strand to SEQ ID NO: 1550558
augcuucuacggcauuucu

SEQ ID NO: 1550560 - RNA, 19 nt, Artificial Sequence
  Description of Artificial Sequence: Synthetic oligonucleotide
  Sense strand starting at position 3239 of SEQ ID NO: 1245279
gagugcaauuaucuguaca

SEQ ID NO: 1550561 - RNA, 19 nt, Artificial Sequence
  Description of Artificial Sequence: Synthetic oligonucleotide
  Antisense strand to SEQ ID NO: 1550560
uguacagauaauugcacuc

SEQ ID NO: 1550562 - RNA, 19 nt, Artificial Sequence
  Description of Artificial Sequence: Synthetic oligonucleotide
  Sense strand starting at position 3662 of SEQ ID NO: 1245279
uccacaaugacgugaaaga

SEQ ID NO: 1550563 - RNA, 19 nt, Artificial Sequence
  Description of Artificial Sequence: Synthetic oligonucleotide
  Antisense strand to SEQ ID NO: 1550562
ucuuucacgucauugugga

SEQ ID NO: 1550564 - RNA, 19 nt, Artificial Sequence
  Description of Artificial Sequence: Synthetic oligonucleotide
  Sense strand starting at position 3826 of SEQ ID NO: 1245279
ugccauuuauugucuaugu

SEQ ID NO: 1550565 - RNA, 19 nt, Artificial Sequence
  Description of Artificial Sequence: Synthetic oligonucleotide
  Antisense strand to SEQ ID NO: 1550564
acauagacaauaaauggca

SEQ ID NO: 1550566 - RNA, 19 nt, Artificial Sequence
  Description of Artificial Sequence: Synthetic oligonucleotide
  Sense strand starting at position 3827 of SEQ ID NO: 1245279
gccauuuauugucuauguu

SEQ ID NO: 1550567 - RNA, 19 nt, Artificial Sequence
  Description of Artificial Sequence: Synthetic oligonucleotide
  Antisense strand to SEQ ID NO: 1550566
aacauagacaauaaauggc

SEQ ID NO: 1550568 - RNA, 19 nt, Artificial Sequence
  Description of Artificial Sequence: Synthetic oligonucleotide
  Sense strand starting at position 3831 of SEQ ID NO: 1245279
uuuauugucuauguugaca

SEQ ID NO: 1550569 - RNA, 19 nt, Artificial Sequence
  Description of Artificial Sequence: Synthetic oligonucleotide
  Antisense strand to SEQ ID NO: 1550568
ugucaacauagacaauaaa

SEQ ID NO: 1550570 - RNA, 19 nt, Artificial Sequence
  Description of Artificial Sequence: Synthetic oligonucleotide
  Sense strand starting at position 3839 of SEQ ID NO: 1245279
cuauguugacauuggcauu

SEQ ID NO: 1550571 - RNA, 19 nt, Artificial Sequence
  Description of Artificial Sequence: Synthetic oligonucleotide
  Antisense strand to SEQ ID NO: 1550570
aaugccaaugucaacauag

SEQ ID NO: 1550572 - RNA, 19 nt, Artificial Sequence
  Description of Artificial Sequence: Synthetic oligonucleotide
  Sense strand starting at position 3859 of SEQ ID NO: 1245279
uuagguguuaugcagaugu

SEQ ID NO: 1550573 - RNA, 19 nt, Artificial Sequence
  Description of Artificial Sequence: Synthetic oligonucleotide
  Antisense strand to SEQ ID NO: 1550572
acaucugcauaacaccuaa

SEQ ID NO: 1550574 - RNA, 19 nt, Artificial Sequence
  Description of Artificial Sequence: Synthetic oligonucleotide
  Sense strand starting at position 3869 of SEQ ID NO: 1245279
ugcagaugucaugaacuuu

SEQ ID NO: 1550575 - RNA, 19 nt, Artificial Sequence
  Description of Artificial Sequence: Synthetic oligonucleotide
  Antisense strand to SEQ ID NO: 1550574
aaaguucaugacaucugca

SEQ ID NO: 1550576 - RNA, 19 nt, Artificial Sequence
  Description of Artificial Sequence: Synthetic oligonucleotide
  Sense strand starting at position 3966 of SEQ ID NO: 1245279
gcauuaaacgauggcuaua

SEQ ID NO: 1550577 - RNA, 19 nt, Artificial Sequence
  Description of Artificial Sequence: Synthetic oligonucleotide
  Antisense strand to SEQ ID NO: 1550576
uauagccaucguuuaaugc

SEQ ID NO: 1550578 - RNA, 19 nt, Artificial Sequence
  Description of Artificial Sequence: Synthetic oligonucleotide
  Sense strand starting at position 3968 of SEQ ID NO: 1245279
auuaaacgauggcuauaau

SEQ ID NO: 1550579 - RNA, 19 nt, Artificial Sequence
  Description of Artificial Sequence: Synthetic oligonucleotide
  Antisense strand to SEQ ID NO: 1550578
auuauagccaucguuuaau

SEQ ID NO: 1550580 - RNA, 19 nt, Artificial Sequence
  Description of Artificial Sequence: Synthetic oligonucleotide
  Sense strand starting at position 3 of SEQ ID NO: 1245280
ggacucugaucaucaguca

SEQ ID NO: 1550581 - RNA, 19 nt, Artificial Sequence
  Description of Artificial Sequence: Synthetic oligonucleotide
  Antisense strand to SEQ ID NO: 1550580
ugacugaugaucagagucc

SEQ ID NO: 1550582 - RNA, 19 nt, Artificial Sequence
  Description of Artificial Sequence: Synthetic oligonucleotide
  Sense strand starting at position 14 of SEQ ID NO: 1245280
aucagucaggucugucaga

SEQ ID NO: 1550583 - RNA, 19 nt, Artificial Sequence
  Description of Artificial Sequence: Synthetic oligonucleotide
  Antisense strand to SEQ ID NO: 1550582
ucugacagaccugacugau

SEQ ID NO: 1550584 - RNA, 19 nt, Artificial Sequence
  Description of Artificial Sequence: Synthetic oligonucleotide
  Sense strand starting at position 15 of SEQ ID NO: 1245280
ucagucaggucugucagaa

SEQ ID NO: 1550585 - RNA, 19 nt, Artificial Sequence
  Description of Artificial Sequence: Synthetic oligonucleotide
  Antisense strand to SEQ ID NO: 1550584
uucugacagaccugacuga

SEQ ID NO: 1550586 - RNA, 19 nt, Artificial Sequence
  Description of Artificial Sequence: Synthetic oligonucleotide
  Sense strand starting at position 23 of SEQ ID NO: 1245280
gucugucagaagggcuaua

SEQ ID NO: 1550587 - RNA, 19 nt, Artificial Sequence
  Description of Artificial Sequence: Synthetic oligonucleotide
  Antisense strand to SEQ ID NO: 1550586
uauagcccuucugacagac

SEQ ID NO: 1550588 - RNA, 19 nt, Artificial Sequence
  Description of Artificial Sequence: Synthetic oligonucleotide
  Sense strand starting at position 113 of SEQ ID NO: 1245280
uuguaaauaugccugccaa

SEQ ID NO: 1550589 - RNA, 19 nt, Artificial Sequence
  Description of Artificial Sequence: Synthetic oligonucleotide
  Antisense strand to SEQ ID NO: 1550588
uuggcaggcauauuuacaa

SEQ ID NO: 1550590 - RNA, 19 nt, Artificial Sequence
  Description of Artificial Sequence: Synthetic oligonucleotide
  Sense strand starting at position 189 of SEQ ID NO: 1245280
aucucaauuucggcucauu

SEQ ID NO: 1550591 - RNA, 19 nt, Artificial Sequence
  Description of Artificial Sequence: Synthetic oligonucleotide
  Antisense strand to SEQ ID NO: 1550590
aaugagccgaaauugagau

SEQ ID NO: 1550592 - RNA, 19 nt, Artificial Sequence
  Description of Artificial Sequence: Synthetic oligonucleotide
  Sense strand starting at position 199 of SEQ ID NO: 1245280
cggcucauuccucauaaca

SEQ ID NO: 1550593 - RNA, 19 nt, Artificial Sequence
  Description of Artificial Sequence: Synthetic oligonucleotide
  Antisense strand to SEQ ID NO: 1550592
uguuaugaggaaugagccg

SEQ ID NO: 1550594 - RNA, 19 nt, Artificial Sequence
  Description of Artificial Sequence: Synthetic oligonucleotide
  Sense strand starting at position 256 of SEQ ID NO: 1245280
aguaauaaguaagcagaaa

SEQ ID NO: 1550595 - RNA, 19 nt, Artificial Sequence
  Description of Artificial Sequence: Synthetic oligonucleotide
  Antisense strand to SEQ ID NO: 1550594
uuucugcuuacuuauuacu

SEQ ID NO: 1550596 - RNA, 19 nt, Artificial Sequence
  Description of Artificial Sequence: Synthetic oligonucleotide
  Sense strand starting at position 401 of SEQ ID NO: 1245280
gaggguguucugugaagca

SEQ ID NO: 1550597 - RNA, 19 nt, Artificial Sequence
  Description of Artificial Sequence: Synthetic oligonucleotide
  Antisense strand to SEQ ID NO: 1550596
ugcuucacagaacacccuc

SEQ ID NO: 1550598 - RNA, 19 nt, Artificial Sequence
  Description of Artificial Sequence: Synthetic oligonucleotide
  Sense strand starting at position 594 of SEQ ID NO: 1245280
gcuccaagaucccugcaau

SEQ ID NO: 1550599 - RNA, 19 nt, Artificial Sequence
  Description of Artificial Sequence: Synthetic oligonucleotide
  Antisense strand to SEQ ID NO: 1550598
auugcagggaucuuggagc

SEQ ID NO: 1550600 - RNA, 19 nt, Artificial Sequence
  Description of Artificial Sequence: Synthetic oligonucleotide
  Sense strand starting at position 1990 of SEQ ID NO: 1245280
gcggguugugacguaagca

SEQ ID NO: 1550601 - RNA, 19 nt, Artificial Sequence
  Description of Artificial Sequence: Synthetic oligonucleotide
  Antisense strand to SEQ ID NO: 1550600
ugcuuacgucacaacccgc

SEQ ID NO: 1550602 - RNA, 19 nt, Artificial Sequence
  Description of Artificial Sequence: Synthetic oligonucleotide
  Sense strand starting at position 2067 of SEQ ID NO: 1245280
ccaguuaccucuccuguca

SEQ ID NO: 1550603 - RNA, 19 nt, Artificial Sequence
  Description of Artificial Sequence: Synthetic oligonucleotide
  Antisense strand to SEQ ID NO: 1550602
ugacaggagagguaacugg

SEQ ID NO: 1550604 - RNA, 19 nt, Artificial Sequence
  Description of Artificial Sequence: Synthetic oligonucleotide
  Sense strand starting at position 2093 of SEQ ID NO: 1245280
ugggccuuucaggaaguuu

SEQ ID NO: 1550605 - RNA, 19 nt, Artificial Sequence
  Description of Artificial Sequence: Synthetic oligonucleotide
  Antisense strand to SEQ ID NO: 1550604
aaacuuccugaaaggccca

SEQ ID NO: 1550606 - RNA, 19 nt, Artificial Sequence
  Description of Artificial Sequence: Synthetic oligonucleotide
  Sense strand starting at position 2162 of SEQ ID NO: 1245280
ugaucuugucaagaugugu

SEQ ID NO: 1550607 - RNA, 19 nt, Artificial Sequence
  Description of Artificial Sequence: Synthetic oligonucleotide
  Antisense strand to SEQ ID NO: 1550606
acacaucuugacaagauca

SEQ ID NO: 1550608 - RNA, 19 nt, Artificial Sequence
  Description of Artificial Sequence: Synthetic oligonucleotide
  Sense strand starting at position 2166 of SEQ ID NO: 1245280
cuugucaagauguguuaua

SEQ ID NO: 1550609 - RNA, 19 nt, Artificial Sequence
  Description of Artificial Sequence: Synthetic oligonucleotide
  Antisense strand to SEQ ID NO: 1550608
uauaacacaucuugacaag

SEQ ID NO: 1550610 - RNA, 19 nt, Artificial Sequence
  Description of Artificial Sequence: Synthetic oligonucleotide
  Sense strand starting at position 2167 of SEQ ID NO: 1245280
uugucaagauguguuauaa

SEQ ID NO: 1550611 - RNA, 19 nt, Artificial Sequence
  Description of Artificial Sequence: Synthetic oligonucleotide
  Antisense strand to SEQ ID NO: 1550610
uuauaacacaucuugacaa

SEQ ID NO: 1550612 - RNA, 19 nt, Artificial Sequence
  Description of Artificial Sequence: Synthetic oligonucleotide
  Sense strand starting at position 2186 of SEQ ID NO: 1245280
acaaauauuuguuacggga

SEQ ID NO: 1550613 - RNA, 19 nt, Artificial Sequence
  Description of Artificial Sequence: Synthetic oligonucleotide
  Antisense strand to SEQ ID NO: 1550612
ucccguaacaaauauuugu

SEQ ID NO: 1550614 - RNA, 19 nt, Artificial Sequence
  Description of Artificial Sequence: Synthetic oligonucleotide
  Sense strand starting at position 2224 of SEQ ID NO: 1245280
ggauuaaaguuuccuugag

SEQ ID NO: 1550615 - RNA, 19 nt, Artificial Sequence
  Description of Artificial Sequence: Synthetic oligonucleotide
  Antisense strand to SEQ ID NO: 1550614
cucaaggaaacuuuaaucc

SEQ ID NO: 1550616 - RNA, 19 nt, Artificial Sequence
  Description of Artificial Sequence: Synthetic oligonucleotide
  Sense strand starting at position 2225 of SEQ ID NO: 1245280
gauuaaaguuuccuugaga

SEQ ID NO: 1550617 - RNA, 19 nt, Artificial Sequence
  Description of Artificial Sequence: Synthetic oligonucleotide
  Antisense strand to SEQ ID NO: 1550616
ucucaaggaaacuuuaauc

SEQ ID NO: 1550618 - RNA, 19 nt, Artificial Sequence
  Description of Artificial Sequence: Synthetic oligonucleotide
  Sense strand starting at position 2226 of SEQ ID NO: 1245280
auuaaaguuuccuugagag

SEQ ID NO: 1550619 - RNA, 19 nt, Artificial Sequence
  Description of Artificial Sequence: Synthetic oligonucleotide
  Antisense strand to SEQ ID NO: 1550618
cucucaaggaaacuuuaau

SEQ ID NO: 1550620 - RNA, 19 nt, Artificial Sequence
  Description of Artificial Sequence: Synthetic oligonucleotide
  Sense strand starting at position 2266 of SEQ ID NO: 1245280
cagcaugaccgaugcuuaa

SEQ ID NO: 1550621 - RNA, 19 nt, Artificial Sequence
  Description of Artificial Sequence: Synthetic oligonucleotide
  Antisense strand to SEQ ID NO: 1550620
uuaagcaucggucaugcug

SEQ ID NO: 1550622 - RNA, 19 nt, Artificial Sequence
  Description of Artificial Sequence: Synthetic oligonucleotide
  Sense strand starting at position 2362 of SEQ ID NO: 1245280
agaaaugccguagaagcau

SEQ ID NO: 1550623 - RNA, 19 nt, Artificial Sequence
  Description of Artificial Sequence: Synthetic oligonucleotide
  Antisense strand to SEQ ID NO: 1550622
augcuucuacggcauuucu

SEQ ID NO: 1550624 - RNA, 19 nt, Artificial Sequence
  Description of Artificial Sequence: Synthetic oligonucleotide
  Sense strand starting at position 2488 of SEQ ID NO: 1245280
gagugcaauuaucuguaca

SEQ ID NO: 1550625 - RNA, 19 nt, Artificial Sequence
  Description of Artificial Sequence: Synthetic oligonucleotide
  Antisense strand to SEQ ID NO: 1550624
uguacagauaauugcacuc

SEQ ID NO: 1550626 - RNA, 19 nt, Artificial Sequence
  Description of Artificial Sequence: Synthetic oligonucleotide
  Sense strand starting at position 2490 of SEQ ID NO: 1245280
gugcaauuaucuguacaau

SEQ ID NO: 1550627 - RNA, 19 nt, Artificial Sequence
  Description of Artificial Sequence: Synthetic oligonucleotide
  Antisense strand to SEQ ID NO: 1550626
auuguacagauaauugcac

SEQ ID NO: 1550628 - RNA, 19 nt, Artificial Sequence
  Description of Artificial Sequence: Synthetic oligonucleotide
  Sense strand starting at position 2911 of SEQ ID NO: 1245280
uccacaaugacgugaaaga

SEQ ID NO: 1550629 - RNA, 19 nt, Artificial Sequence
  Description of Artificial Sequence: Synthetic oligonucleotide
  Antisense strand to SEQ ID NO: 1550628
ucuuucacgucauugugga

SEQ ID NO: 1550630 - RNA, 19 nt, Artificial Sequence
  Description of Artificial Sequence: Synthetic oligonucleotide
  Sense strand starting at position 3075 of SEQ ID NO: 1245280
ugccauuuauugucuaugu

SEQ ID NO: 1550631 - RNA, 19 nt, Artificial Sequence
  Description of Artificial Sequence: Synthetic oligonucleotide
  Antisense strand to SEQ ID NO: 1550630
acauagacaauaaauggca

SEQ ID NO: 1550632 - RNA, 19 nt, Artificial Sequence
  Description of Artificial Sequence: Synthetic oligonucleotide
  Sense strand starting at position 3076 of SEQ ID NO: 1245280
gccauuuauugucuauguu

SEQ ID NO: 1550633 - RNA, 19 nt, Artificial Sequence
  Description of Artificial Sequence: Synthetic oligonucleotide
  Antisense strand to SEQ ID NO: 1550632
aacauagacaauaaauggc

SEQ ID NO: 1550634 - RNA, 19 nt, Artificial Sequence
  Description of Artificial Sequence: Synthetic oligonucleotide
  Sense strand starting at position 3080 of SEQ ID NO: 1245280
uuuauugucuauguugaca

SEQ ID NO: 1550635 - RNA, 19 nt, Artificial Sequence
  Description of Artificial Sequence: Synthetic oligonucleotide
  Antisense strand to SEQ ID NO: 1550634
ugucaacauagacaauaaa

SEQ ID NO: 1550636 - RNA, 19 nt, Artificial Sequence
  Description of Artificial Sequence: Synthetic oligonucleotide
  Sense strand starting at position 3088 of SEQ ID NO: 1245280
cuauguugacauuggcauu

SEQ ID NO: 1550637 - RNA, 19 nt, Artificial Sequence
  Description of Artificial Sequence: Synthetic oligonucleotide
  Antisense strand to SEQ ID NO: 1550636
aaugccaaugucaacauag

SEQ ID NO: 1550638 - RNA, 19 nt, Artificial Sequence
  Description of Artificial Sequence: Synthetic oligonucleotide
  Sense strand starting at position 3108 of SEQ ID NO: 1245280
uuagguguuaugcagaugu

SEQ ID NO: 1550639 - RNA, 19 nt, Artificial Sequence
  Description of Artificial Sequence: Synthetic oligonucleotide
  Antisense strand to SEQ ID NO: 1550638
acaucugcauaacaccuaa

SEQ ID NO: 1550640 - RNA, 19 nt, Artificial Sequence
  Description of Artificial Sequence: Synthetic oligonucleotide
  Sense strand starting at position 3118 of SEQ ID NO: 1245280
ugcagaugucaugaacuuu

SEQ ID NO: 1550641 - RNA, 19 nt, Artificial Sequence
  Description of Artificial Sequence: Synthetic oligonucleotide
  Antisense strand to SEQ ID NO: 1550640
aaaguucaugacaucugca

SEQ ID NO: 1550642 - RNA, 19 nt, Artificial Sequence
  Description of Artificial Sequence: Synthetic oligonucleotide
  Sense strand starting at position 3160 of SEQ ID NO: 1245280
acauaucuaucagaaugag

SEQ ID NO: 1550643 - RNA, 19 nt, Artificial Sequence
  Description of Artificial Sequence: Synthetic oligonucleotide
  Antisense strand to SEQ ID NO: 1550642
cucauucugauagauaugu

SEQ ID NO: 1550644 - RNA, 19 nt, Artificial Sequence
  Description of Artificial Sequence: Synthetic oligonucleotide
  Sense strand starting at position 3187 of SEQ ID NO: 1245280
aaugguauuugccaaagua

SEQ ID NO: 1550645 - RNA, 19 nt, Artificial Sequence
  Description of Artificial Sequence: Synthetic oligonucleotide
  Antisense strand to SEQ ID NO: 1550644
uacuuuggcaaauaccauu

SEQ ID NO: 1550646 - RNA, 19 nt, Artificial Sequence
  Description of Artificial Sequence: Synthetic oligonucleotide
  Sense strand starting at position 3214 of SEQ ID NO: 1245280
ugcauuaaacgauggcuau

SEQ ID NO: 1550647 - RNA, 19 nt, Artificial Sequence
  Description of Artificial Sequence: Synthetic oligonucleotide
  Antisense strand to SEQ ID NO: 1550646
auagccaucguuuaaugca

SEQ ID NO: 1550648 - RNA, 19 nt, Artificial Sequence
  Description of Artificial Sequence: Synthetic oligonucleotide
  Sense strand starting at position 3215 of SEQ ID NO: 1245280
gcauuaaacgauggcuaua

SEQ ID NO: 1550649 - RNA, 19 nt, Artificial Sequence
  Description of Artificial Sequence: Synthetic oligonucleotide
  Antisense strand to SEQ ID NO: 1550648
uauagccaucguuuaaugc

SEQ ID NO: 1550650 - RNA, 19 nt, Artificial Sequence
  Description of Artificial Sequence: Synthetic oligonucleotide
  Sense strand starting at position 3217 of SEQ ID NO: 1245280
auuaaacgauggcuauaau

SEQ ID NO: 1550651 - RNA, 19 nt, Artificial Sequence
  Description of Artificial Sequence: Synthetic oligonucleotide
  Antisense strand to SEQ ID NO: 1550650
auuauagccaucguuuaau

SEQ ID NO: 1550652 - RNA, 19 nt, Artificial Sequence
  Description of Artificial Sequence: Synthetic oligonucleotide
  Sense strand starting at position 3508 of SEQ ID NO: 1245280
gcaguaguucaggugcuuu

SEQ ID NO: 1550653 - RNA, 19 nt, Artificial Sequence
  Description of Artificial Sequence: Synthetic oligonucleotide
  Antisense strand to SEQ ID NO: 1550652
aaagcaccugaacuacugc

SEQ ID NO: 1550654 - RNA, 19 nt, Artificial Sequence
  Description of Artificial Sequence: Synthetic oligonucleotide
  Sense strand starting at position 3934 of SEQ ID NO: 1245280
cugaccauuuaggaaguaa

SEQ ID NO: 1550655 - RNA, 19 nt, Artificial Sequence
  Description of Artificial Sequence: Synthetic oligonucleotide
  Antisense strand to SEQ ID NO: 1550654
uuacuuccuaaauggucag

SEQ ID NO: 1550656 - RNA, 19 nt, Artificial Sequence
  Description of Artificial Sequence: Synthetic oligonucleotide
  Sense strand starting at position 3965 of SEQ ID NO: 1245280
guauaauaguguuucccau

SEQ ID NO: 1550657 - RNA, 19 nt, Artificial Sequence
  Description of Artificial Sequence: Synthetic oligonucleotide
  Antisense strand to SEQ ID NO: 1550656
augggaaacacuauuauac

SEQ ID NO: 1550658 - RNA, 19 nt, Artificial Sequence
  Description of Artificial Sequence: Synthetic oligonucleotide
  Sense strand starting at position 3967 of SEQ ID NO: 1245280
auaauaguguuucccauua

SEQ ID NO: 1550659 - RNA, 19 nt, Artificial Sequence
  Description of Artificial Sequence: Synthetic oligonucleotide
  Antisense strand to SEQ ID NO: 1550658
uaaugggaaacacuauuau

SEQ ID NO: 1550660 - RNA, 19 nt, Artificial Sequence
  Description of Artificial Sequence: Synthetic oligonucleotide
  Sense strand starting at position 2 of SEQ ID NO: 1245281
ccuugaguccauuaucuau

SEQ ID NO: 1550661 - RNA, 19 nt, Artificial Sequence
  Description of Artificial Sequence: Synthetic oligonucleotide
  Antisense strand to SEQ ID NO: 1550660
auagauaauggacucaagg

SEQ ID NO: 1550662 - RNA, 19 nt, Artificial Sequence
  Description of Artificial Sequence: Synthetic oligonucleotide
  Sense strand starting at position 4 of SEQ ID NO: 1245281
uugaguccauuaucuauca

SEQ ID NO: 1550663 - RNA, 19 nt, Artificial Sequence
  Description of Artificial Sequence: Synthetic oligonucleotide
  Antisense strand to SEQ ID NO: 1550662
ugauagauaauggacucaa

SEQ ID NO: 1550664 - RNA, 19 nt, Artificial Sequence
  Description of Artificial Sequence: Synthetic oligonucleotide
  Sense strand starting at position 68 of SEQ ID NO: 1245281
auaaaugagcauuguagaa

SEQ ID NO: 1550665 - RNA, 19 nt, Artificial Sequence
  Description of Artificial Sequence: Synthetic oligonucleotide
  Antisense strand to SEQ ID NO: 1550664
uucuacaaugcucauuuau

SEQ ID NO: 1550666 - RNA, 19 nt, Artificial Sequence
  Description of Artificial Sequence: Synthetic oligonucleotide
  Sense strand starting at position 70 of SEQ ID NO: 1245281
aaaugagcauuguagaaag

SEQ ID NO: 1550667 - RNA, 19 nt, Artificial Sequence
  Description of Artificial Sequence: Synthetic oligonucleotide
  Antisense strand to SEQ ID NO: 1550666
cuuucuacaaugcucauuu

SEQ ID NO: 1550668 - RNA, 19 nt, Artificial Sequence
  Description of Artificial Sequence: Synthetic oligonucleotide
  Sense strand starting at position 116 of SEQ ID NO: 1245281
ccuaauagccucuagggau

SEQ ID NO: 1550669 - RNA, 19 nt, Artificial Sequence
  Description of Artificial Sequence: Synthetic oligonucleotide
  Antisense strand to SEQ ID NO: 1550668
aucccuagaggcuauuagg

SEQ ID NO: 1550670 - RNA, 19 nt, Artificial Sequence
  Description of Artificial Sequence: Synthetic oligonucleotide
  Sense strand starting at position 169 of SEQ ID NO: 1245281
ggagccuccuucuuauaua

SEQ ID NO: 1550671 - RNA, 19 nt, Artificial Sequence
  Description of Artificial Sequence: Synthetic oligonucleotide
  Antisense strand to SEQ ID NO: 1550670
uauauaagaaggaggcucc

SEQ ID NO: 1550672 - RNA, 19 nt, Artificial Sequence
  Description of Artificial Sequence: Synthetic oligonucleotide
  Sense strand starting at position 219 of SEQ ID NO: 1245281
augauuuauuacuguacac

SEQ ID NO: 1550673 - RNA, 19 nt, Artificial Sequence
  Description of Artificial Sequence: Synthetic oligonucleotide
  Antisense strand to SEQ ID NO: 1550672
guguacaguaauaaaucau

SEQ ID NO: 1550674 - RNA, 19 nt, Artificial Sequence
  Description of Artificial Sequence: Synthetic oligonucleotide
  Sense strand starting at position 274 of SEQ ID NO: 1245281
ggcuaucuuuguucuugga

SEQ ID NO: 1550675 - RNA, 19 nt, Artificial Sequence
  Description of Artificial Sequence: Synthetic oligonucleotide
  Antisense strand to SEQ ID NO: 1550674
uccaagaacaaagauagcc

SEQ ID NO: 1550676 - RNA, 19 nt, Artificial Sequence
  Description of Artificial Sequence: Synthetic oligonucleotide
  Sense strand starting at position 340 of SEQ ID NO: 1245281
gugcgaaguguuuauucuu

SEQ ID NO: 1550677 - RNA, 19 nt, Artificial Sequence
  Description of Artificial Sequence: Synthetic oligonucleotide
  Antisense strand to SEQ ID NO: 1550676
aagaauaaacacuucgcac

SEQ ID NO: 1550678 - RNA, 19 nt, Artificial Sequence
  Description of Artificial Sequence: Synthetic oligonucleotide
  Sense strand starting at position 343 of SEQ ID NO: 1245281
cgaaguguuuauucuuucu

SEQ ID NO: 1550679 - RNA, 19 nt, Artificial Sequence
  Description of Artificial Sequence: Synthetic oligonucleotide
  Antisense strand to SEQ ID NO: 1550678
agaaagaauaaacacuucg

SEQ ID NO: 1550680 - RNA, 19 nt, Artificial Sequence
  Description of Artificial Sequence: Synthetic oligonucleotide
  Sense strand starting at position 450 of SEQ ID NO: 1245281
guacacacccuguacuauu

SEQ ID NO: 1550681 - RNA, 19 nt, Artificial Sequence
  Description of Artificial Sequence: Synthetic oligonucleotide
  Antisense strand to SEQ ID NO: 1550680
aauaguacaggguguguac

SEQ ID NO: 1550682 - RNA, 19 nt, Artificial Sequence
  Description of Artificial Sequence: Synthetic oligonucleotide
  Sense strand starting at position 460 of SEQ ID NO: 1245281
uguacuauugcugacauaa

SEQ ID NO: 1550683 - RNA, 19 nt, Artificial Sequence
  Description of Artificial Sequence: Synthetic oligonucleotide
  Antisense strand to SEQ ID NO: 1550682
uuaugucagcaauaguaca

SEQ ID NO: 1550684 - RNA, 19 nt, Artificial Sequence
  Description of Artificial Sequence: Synthetic oligonucleotide
  Sense strand starting at position 600 of SEQ ID NO: 1245281
augcuuguaguagaaggau

SEQ ID NO: 1550685 - RNA, 19 nt, Artificial Sequence
  Description of Artificial Sequence: Synthetic oligonucleotide
  Antisense strand to SEQ ID NO: 1550684
auccuucuacuacaagcau

SEQ ID NO: 1550686 - RNA, 19 nt, Artificial Sequence
  Description of Artificial Sequence: Synthetic oligonucleotide
  Sense strand starting at position 603 of SEQ ID NO: 1245281
cuuguaguagaaggauaaa

SEQ ID NO: 1550687 - RNA, 19 nt, Artificial Sequence
  Description of Artificial Sequence: Synthetic oligonucleotide
  Antisense strand to SEQ ID NO: 1550686
uuuauccuucuacuacaag

SEQ ID NO: 1550688 - RNA, 19 nt, Artificial Sequence
  Description of Artificial Sequence: Synthetic oligonucleotide
  Sense strand starting at position 623 of SEQ ID NO: 1245281
gcuagugucaccuauguuu

SEQ ID NO: 1550689 - RNA, 19 nt, Artificial Sequence
  Description of Artificial Sequence: Synthetic oligonucleotide
  Antisense strand to SEQ ID NO: 1550688
aaacauaggugacacuagc

SEQ ID NO: 1550690 - RNA, 19 nt, Artificial Sequence
  Description of Artificial Sequence: Synthetic oligonucleotide
  Sense strand starting at position 673 of SEQ ID NO: 1245281
ggaggugaauaauaaaucu

SEQ ID NO: 1550691 - RNA, 19 nt, Artificial Sequence
  Description of Artificial Sequence: Synthetic oligonucleotide
  Antisense strand to SEQ ID NO: 1550690
agauuuauuauucaccucc

SEQ ID NO: 1550692 - RNA, 19 nt, Artificial Sequence
  Description of Artificial Sequence: Synthetic oligonucleotide
  Sense strand starting at position 743 of SEQ ID NO: 1245281
gagaaucugucacagauac

SEQ ID NO: 1550693 - RNA, 19 nt, Artificial Sequence
  Description of Artificial Sequence: Synthetic oligonucleotide
  Antisense strand to SEQ ID NO: 1550692
guaucugugacagauucuc

SEQ ID NO: 1550694 - RNA, 19 nt, Artificial Sequence
  Description of Artificial Sequence: Synthetic oligonucleotide
  Sense strand starting at position 753 of SEQ ID NO: 1245281
cacagauaccaagguguua

SEQ ID NO: 1550695 - RNA, 19 nt, Artificial Sequence
  Description of Artificial Sequence: Synthetic oligonucleotide
  Antisense strand to SEQ ID NO: 1550694
uaacaccuugguaucugug

SEQ ID NO: 1550696 - RNA, 19 nt, Artificial Sequence
  Description of Artificial Sequence: Synthetic oligonucleotide
  Sense strand starting at position 800 of SEQ ID NO: 1245281
gccuuuggcccucagcaau

SEQ ID NO: 1550697 - RNA, 19 nt, Artificial Sequence
  Description of Artificial Sequence: Synthetic oligonucleotide
  Antisense strand to SEQ ID NO: 1550696
auugcugagggccaaaggc

SEQ ID NO: 1550698 - RNA, 19 nt, Artificial Sequence
  Description of Artificial Sequence: Synthetic oligonucleotide
  Sense strand starting at position 896 of SEQ ID NO: 1245281
gacucugcccucuagcaga

SEQ ID NO: 1550699 - RNA, 19 nt, Artificial Sequence
  Description of Artificial Sequence: Synthetic oligonucleotide
  Antisense strand to SEQ ID NO: 1550698
ucugcuagagggcagaguc

SEQ ID NO: 1550700 - RNA, 19 nt, Artificial Sequence
  Description of Artificial Sequence: Synthetic oligonucleotide
  Sense strand starting at position 1202 of SEQ ID NO: 1245281
gcuagcaugucucucuuaa

SEQ ID NO: 1550701 - RNA, 19 nt, Artificial Sequence
  Description of Artificial Sequence: Synthetic oligonucleotide
  Antisense strand to SEQ ID NO: 1550700
uuaagagagacaugcuagc

SEQ ID NO: 1550702 - RNA, 19 nt, Artificial Sequence
  Description of Artificial Sequence: Synthetic oligonucleotide
  Sense strand starting at position 1283 of SEQ ID NO: 1245281
gcauuugaccggugcucaa

SEQ ID NO: 1550703 - RNA, 19 nt, Artificial Sequence
  Description of Artificial Sequence: Synthetic oligonucleotide
  Antisense strand to SEQ ID NO: 1550702
uugagcaccggucaaaugc

SEQ ID NO: 1550704 - RNA, 19 nt, Artificial Sequence
  Description of Artificial Sequence: Synthetic oligonucleotide
  Sense strand starting at position 1286 of SEQ ID NO: 1245281
uuugaccggugcucaauua

SEQ ID NO: 1550705 - RNA, 19 nt, Artificial Sequence
  Description of Artificial Sequence: Synthetic oligonucleotide
  Antisense strand to SEQ ID NO: 1550704
uaauugagcaccggucaaa

SEQ ID NO: 1550706 - RNA, 19 nt, Artificial Sequence
  Description of Artificial Sequence: Synthetic oligonucleotide
  Sense strand starting at position 1299 of SEQ ID NO: 1245281
caauuagagcacugggcaa

SEQ ID NO: 1550707 - RNA, 19 nt, Artificial Sequence
  Description of Artificial Sequence: Synthetic oligonucleotide
  Antisense strand to SEQ ID NO: 1550706
uugcccagugcucuaauug

SEQ ID NO: 1550708 - RNA, 19 nt, Artificial Sequence
  Description of Artificial Sequence: Synthetic oligonucleotide
  Sense strand starting at position 1435 of SEQ ID NO: 1245281
gauacaacugccuguguau

SEQ ID NO: 1550709 - RNA, 19 nt, Artificial Sequence
  Description of Artificial Sequence: Synthetic oligonucleotide
  Antisense strand to SEQ ID NO: 1550708
auacacaggcaguuguauc

SEQ ID NO: 1550710 - RNA, 19 nt, Artificial Sequence
  Description of Artificial Sequence: Synthetic oligonucleotide
  Sense strand starting at position 1437 of SEQ ID NO: 1245281
uacaacugccuguguauga

SEQ ID NO: 1550711 - RNA, 19 nt, Artificial Sequence
  Description of Artificial Sequence: Synthetic oligonucleotide
  Antisense strand to SEQ ID NO: 1550710
ucauacacaggcaguugua

SEQ ID NO: 1550712 - RNA, 19 nt, Artificial Sequence
  Description of Artificial Sequence: Synthetic oligonucleotide
  Sense strand starting at position 1438 of SEQ ID NO: 1245281
acaacugccuguguaugaa

SEQ ID NO: 1550713 - RNA, 19 nt, Artificial Sequence
  Description of Artificial Sequence: Synthetic oligonucleotide
  Antisense strand to SEQ ID NO: 1550712
uucauacacaggcaguugu

SEQ ID NO: 1550714 - RNA, 19 nt, Artificial Sequence
  Description of Artificial Sequence: Synthetic oligonucleotide
  Sense strand starting at position 1441 of SEQ ID NO: 1245281
acugccuguguaugaauua

SEQ ID NO: 1550715 - RNA, 19 nt, Artificial Sequence
  Description of Artificial Sequence: Synthetic oligonucleotide
  Antisense strand to SEQ ID NO: 1550714
uaauucauacacaggcagu

SEQ ID NO: 1550716 - RNA, 19 nt, Artificial Sequence
  Description of Artificial Sequence: Synthetic oligonucleotide
  Sense strand starting at position 1773 of SEQ ID NO: 1245281
guggaaaugguacacguuu

SEQ ID NO: 1550717 - RNA, 19 nt, Artificial Sequence
  Description of Artificial Sequence: Synthetic oligonucleotide
  Antisense strand to SEQ ID NO: 1550716
aaacguguaccauuuccac

SEQ ID NO: 1550718 - RNA, 19 nt, Artificial Sequence
  Description of Artificial Sequence: Synthetic oligonucleotide
  Sense strand starting at position 1993 of SEQ ID NO: 1245281
gggcgucacggcuccuaau

SEQ ID NO: 1550719 - RNA, 19 nt, Artificial Sequence
  Description of Artificial Sequence: Synthetic oligonucleotide
  Antisense strand to SEQ ID NO: 1550718
auuaggagccgugacgccc

SEQ ID NO: 1550720 - RNA, 19 nt, Artificial Sequence
  Description of Artificial Sequence: Synthetic oligonucleotide
  Sense strand starting at position 1994 of SEQ ID NO: 1245281
ggcgucacggcuccuaauu

SEQ ID NO: 1550721 - RNA, 19 nt, Artificial Sequence
  Description of Artificial Sequence: Synthetic oligonucleotide
  Antisense strand to SEQ ID NO: 1550720
aauuaggagccgugacgcc

SEQ ID NO: 1550722 - RNA, 19 nt, Artificial Sequence
  Description of Artificial Sequence: Synthetic oligonucleotide
  Sense strand starting at position 2006 of SEQ ID NO: 1245281
ccuaauugucucuacagga

SEQ ID NO: 1550723 - RNA, 19 nt, Artificial Sequence
  Description of Artificial Sequence: Synthetic oligonucleotide
  Antisense strand to SEQ ID NO: 1550722
uccuguagagacaauuagg

SEQ ID NO: 1550724 - RNA, 19 nt, Artificial Sequence
  Description of Artificial Sequence: Synthetic oligonucleotide
  Sense strand starting at position 2103 of SEQ ID NO: 1245281
caguaagcccuaggaaaga

SEQ ID NO: 1550725 - RNA, 19 nt, Artificial Sequence
  Description of Artificial Sequence: Synthetic oligonucleotide
  Antisense strand to SEQ ID NO: 1550724
ucuuuccuagggcuuacug

SEQ ID NO: 1550726 - RNA, 19 nt, Artificial Sequence
  Description of Artificial Sequence: Synthetic oligonucleotide
  Sense strand starting at position 3487 of SEQ ID NO: 1245281
gggacuucucuccgucagu

SEQ ID NO: 1550727 - RNA, 19 nt, Artificial Sequence
  Description of Artificial Sequence: Synthetic oligonucleotide
  Antisense strand to SEQ ID NO: 1550726
acugacggagagaaguccc

SEQ ID NO: 1550728 - RNA, 19 nt, Artificial Sequence
  Description of Artificial Sequence: Synthetic oligonucleotide
  Sense strand starting at position 3608 of SEQ ID NO: 1245281
cgucucucuaccgugcaaa

SEQ ID NO: 1550729 - RNA, 19 nt, Artificial Sequence
  Description of Artificial Sequence: Synthetic oligonucleotide
  Antisense strand to SEQ ID NO: 1550728
uuugcacgguagagagacg

SEQ ID NO: 1550730 - RNA, 19 nt, Artificial Sequence
  Description of Artificial Sequence: Synthetic oligonucleotide
  Sense strand starting at position 3770 of SEQ ID NO: 1245281
agcugagaucaucagguuu

SEQ ID NO: 1550731 - RNA, 19 nt, Artificial Sequence
  Description of Artificial Sequence: Synthetic oligonucleotide
  Antisense strand to SEQ ID NO: 1550730
aaaccugaugaucucagcu

SEQ ID NO: 1550732 - RNA, 19 nt, Artificial Sequence
  Description of Artificial Sequence: Synthetic oligonucleotide
  Sense strand starting at position 3803 of SEQ ID NO: 1245281
gcauccucgucaccggaua

SEQ ID NO: 1550733 - RNA, 19 nt, Artificial Sequence
  Description of Artificial Sequence: Synthetic oligonucleotide
  Antisense strand to SEQ ID NO: 1550732
uauccggugacgaggaugc

SEQ ID NO: 1550734 - RNA, 19 nt, Artificial Sequence
  Description of Artificial Sequence: Synthetic oligonucleotide
  Sense strand starting at position 3903 of SEQ ID NO: 1245281
cuacuugaaucccucgaau

SEQ ID NO: 1550735 - RNA, 19 nt, Artificial Sequence
  Description of Artificial Sequence: Synthetic oligonucleotide
  Antisense strand to SEQ ID NO: 1550734
auucgagggauucaaguag

SEQ ID NO: 1550736 - RNA, 19 nt, Artificial Sequence
  Description of Artificial Sequence: Synthetic oligonucleotide
  Sense strand starting at position 3939 of SEQ ID NO: 1245281
ggaguaaagagaugcaagu

SEQ ID NO: 1550737 - RNA, 19 nt, Artificial Sequence
  Description of Artificial Sequence: Synthetic oligonucleotide
  Antisense strand to SEQ ID NO: 1550736
acuugcaucucuuuacucc

SEQ ID NO: 1550738 - RNA, 19 nt, Artificial Sequence
  Description of Artificial Sequence: Synthetic oligonucleotide
  Sense strand starting at position 3963 of SEQ ID NO: 1245281
ggguuauauggaagcgcga

SEQ ID NO: 1550739 - RNA, 19 nt, Artificial Sequence
  Description of Artificial Sequence: Synthetic oligonucleotide
  Antisense strand to SEQ ID NO: 1550738
ucgcgcuuccauauaaccc

SEQ ID NO: 1550740 - RNA, 19 nt, Artificial Sequence
  Description of Artificial Sequence: Synthetic oligonucleotide
  Sense strand starting at position 371 of SEQ ID NO: 1245282
ugcagaaugucaucauucu

SEQ ID NO: 1550741 - RNA, 19 nt, Artificial Sequence
  Description of Artificial Sequence: Synthetic oligonucleotide
  Antisense strand to SEQ ID NO: 1550740
agaaugaugacauucugca

SEQ ID NO: 1550742 - RNA, 19 nt, Artificial Sequence
  Description of Artificial Sequence: Synthetic oligonucleotide
  Sense strand starting at position 372 of SEQ ID NO: 1245282
gcagaaugucaucauucua

SEQ ID NO: 1550743 - RNA, 19 nt, Artificial Sequence
  Description of Artificial Sequence: Synthetic oligonucleotide
  Antisense strand to SEQ ID NO: 1550742
uagaaugaugacauucugc

SEQ ID NO: 1550744 - RNA, 19 nt, Artificial Sequence
  Description of Artificial Sequence: Synthetic oligonucleotide
  Sense strand starting at position 611 of SEQ ID NO: 1245282
agacaucauucuguguaug

SEQ ID NO: 1550745 - RNA, 19 nt, Artificial Sequence
  Description of Artificial Sequence: Synthetic oligonucleotide
  Antisense strand to SEQ ID NO: 1550744
cauacacagaaugaugucu

SEQ ID NO: 1550746 - RNA, 19 nt, Artificial Sequence
  Description of Artificial Sequence: Synthetic oligonucleotide
  Sense strand starting at position 612 of SEQ ID NO: 1245282
gacaucauucuguguauga

SEQ ID NO: 1550747 - RNA, 19 nt, Artificial Sequence
  Description of Artificial Sequence: Synthetic oligonucleotide
  Antisense strand to SEQ ID NO: 1550746
ucauacacagaaugauguc

SEQ ID NO: 1550748 - RNA, 19 nt, Artificial Sequence
  Description of Artificial Sequence: Synthetic oligonucleotide
  Sense strand starting at position 613 of SEQ ID NO: 1245282
acaucauucuguguaugag

SEQ ID NO: 1550749 - RNA, 19 nt, Artificial Sequence
  Description of Artificial Sequence: Synthetic oligonucleotide
  Antisense strand to SEQ ID NO: 1550748
cucauacacagaaugaugu

SEQ ID NO: 1550750 - RNA, 19 nt, Artificial Sequence
  Description of Artificial Sequence: Synthetic oligonucleotide
  Sense strand starting at position 616 of SEQ ID NO: 1245282
ucauucuguguaugaggga

SEQ ID NO: 1550751 - RNA, 19 nt, Artificial Sequence
  Description of Artificial Sequence: Synthetic oligonucleotide
  Antisense strand to SEQ ID NO: 1550750
ucccucauacacagaauga

SEQ ID NO: 1550752 - RNA, 19 nt, Artificial Sequence
  Description of Artificial Sequence: Synthetic oligonucleotide
  Sense strand starting at position 719 of SEQ ID NO: 1245282
cgagaaaugugaguccaga

SEQ ID NO: 1550753 - RNA, 19 nt, Artificial Sequence
  Description of Artificial Sequence: Synthetic oligonucleotide
  Antisense strand to SEQ ID NO: 1550752
ucuggacucacauuucucg

SEQ ID NO: 1550754 - RNA, 19 nt, Artificial Sequence
  Description of Artificial Sequence: Synthetic oligonucleotide
  Sense strand starting at position 864 of SEQ ID NO: 1245282
aagcuauuguuguagcaga

SEQ ID NO: 1550755 - RNA, 19 nt, Artificial Sequence
  Description of Artificial Sequence: Synthetic oligonucleotide
  Antisense strand to SEQ ID NO: 1550754
ucugcuacaacaauagcuu

SEQ ID NO: 1550756 - RNA, 19 nt, Artificial Sequence
  Description of Artificial Sequence: Synthetic oligonucleotide
  Sense strand starting at position 1188 of SEQ ID NO: 1245282
gcaucuugaacccguguau

SEQ ID NO: 1550757 - RNA, 19 nt, Artificial Sequence
  Description of Artificial Sequence: Synthetic oligonucleotide
  Antisense strand to SEQ ID NO: 1550756
auacacggguucaagaugc

SEQ ID NO: 1550758 - RNA, 19 nt, Artificial Sequence
  Description of Artificial Sequence: Synthetic oligonucleotide
  Sense strand starting at position 1199 of SEQ ID NO: 1245282
ccguguaugcaacugucau

SEQ ID NO: 1550759 - RNA, 19 nt, Artificial Sequence
  Description of Artificial Sequence: Synthetic oligonucleotide
  Antisense strand to SEQ ID NO: 1550758
augacaguugcauacacgg

SEQ ID NO: 1550760 - RNA, 19 nt, Artificial Sequence
  Description of Artificial Sequence: Synthetic oligonucleotide
  Sense strand starting at position 1200 of SEQ ID NO: 1245282
cguguaugcaacugucaua

SEQ ID NO: 1550761 - RNA, 19 nt, Artificial Sequence
  Description of Artificial Sequence: Synthetic oligonucleotide
  Antisense strand to SEQ ID NO: 1550760
uaugacaguugcauacacg

SEQ ID NO: 1550762 - RNA, 19 nt, Artificial Sequence
  Description of Artificial Sequence: Synthetic oligonucleotide
  Sense strand starting at position 1203 of SEQ ID NO: 1245282
guaugcaacugucauacaa

SEQ ID NO: 1550763 - RNA, 19 nt, Artificial Sequence
  Description of Artificial Sequence: Synthetic oligonucleotide
  Antisense strand to SEQ ID NO: 1550762
uuguaugacaguugcauac

SEQ ID NO: 1550764 - RNA, 19 nt, Artificial Sequence
  Description of Artificial Sequence: Synthetic oligonucleotide
  Sense strand starting at position 1205 of SEQ ID NO: 1245282
augcaacugucauacaaag

SEQ ID NO: 1550765 - RNA, 19 nt, Artificial Sequence
  Description of Artificial Sequence: Synthetic oligonucleotide
  Antisense strand to SEQ ID NO: 1550764
cuuuguaugacaguugcau

SEQ ID NO: 1550766 - RNA, 19 nt, Artificial Sequence
  Description of Artificial Sequence: Synthetic oligonucleotide
  Sense strand starting at position 1380 of SEQ ID NO: 1245282
gccagccaucgguacuaau

SEQ ID NO: 1550767 - RNA, 19 nt, Artificial Sequence
  Description of Artificial Sequence: Synthetic oligonucleotide
  Antisense strand to SEQ ID NO: 1550766
auuaguaccgauggcuggc

SEQ ID NO: 1550768 - RNA, 19 nt, Artificial Sequence
  Description of Artificial Sequence: Synthetic oligonucleotide
  Sense strand starting at position 1383 of SEQ ID NO: 1245282
agccaucgguacuaaugaa

SEQ ID NO: 1550769 - RNA, 19 nt, Artificial Sequence
  Description of Artificial Sequence: Synthetic oligonucleotide
  Antisense strand to SEQ ID NO: 1550768
uucauuaguaccgauggcu

SEQ ID NO: 1550770 - RNA, 19 nt, Artificial Sequence
  Description of Artificial Sequence: Synthetic oligonucleotide
  Sense strand starting at position 1560 of SEQ ID NO: 1245282
guaucuuucuccuuucgau

SEQ ID NO: 1550771 - RNA, 19 nt, Artificial Sequence
  Description of Artificial Sequence: Synthetic oligonucleotide
  Antisense strand to SEQ ID NO: 1550770
aucgaaaggagaaagauac

SEQ ID NO: 1550772 - RNA, 19 nt, Artificial Sequence
  Description of Artificial Sequence: Synthetic oligonucleotide
  Sense strand starting at position 1883 of SEQ ID NO: 1245282
gcgauaccucuguuucgca

SEQ ID NO: 1550773 - RNA, 19 nt, Artificial Sequence
  Description of Artificial Sequence: Synthetic oligonucleotide
  Antisense strand to SEQ ID NO: 1550772
ugcgaaacagagguaucgc

SEQ ID NO: 1550774 - RNA, 19 nt, Artificial Sequence
  Description of Artificial Sequence: Synthetic oligonucleotide
  Sense strand starting at position 2502 of SEQ ID NO: 1245282
uguggaggugcguuccuua

SEQ ID NO: 1550775 - RNA, 19 nt, Artificial Sequence
  Description of Artificial Sequence: Synthetic oligonucleotide
  Antisense strand to SEQ ID NO: 1550774
uaaggaacgcaccuccaca

SEQ ID NO: 1550776 - RNA, 19 nt, Artificial Sequence
  Description of Artificial Sequence: Synthetic oligonucleotide
  Sense strand starting at position 2509 of SEQ ID NO: 1245282
gugcguuccuuagugcaga

SEQ ID NO: 1550777 - RNA, 19 nt, Artificial Sequence
  Description of Artificial Sequence: Synthetic oligonucleotide
  Antisense strand to SEQ ID NO: 1550776
ucugcacuaaggaacgcac

SEQ ID NO: 1550778 - RNA, 19 nt, Artificial Sequence
  Description of Artificial Sequence: Synthetic oligonucleotide
  Sense strand starting at position 2746 of SEQ ID NO: 1245282
aagaacgcauucucagaga

SEQ ID NO: 1550779 - RNA, 19 nt, Artificial Sequence
  Description of Artificial Sequence: Synthetic oligonucleotide
  Antisense strand to SEQ ID NO: 1550778
ucucugagaaugcguucuu

SEQ ID NO: 1550780 - RNA, 19 nt, Artificial Sequence
  Description of Artificial Sequence: Synthetic oligonucleotide
  Sense strand starting at position 2837 of SEQ ID NO: 1245282
gcgucguugcucuuggaga

SEQ ID NO: 1550781 - RNA, 19 nt, Artificial Sequence
  Description of Artificial Sequence: Synthetic oligonucleotide
  Antisense strand to SEQ ID NO: 1550780
ucuccaagagcaacgacgc

SEQ ID NO: 1550782 - RNA, 19 nt, Artificial Sequence
  Description of Artificial Sequence: Synthetic oligonucleotide
  Sense strand starting at position 2902 of SEQ ID NO: 1245282
cacugaggucuuugccaac

SEQ ID NO: 1550783 - RNA, 19 nt, Artificial Sequence
  Description of Artificial Sequence: Synthetic oligonucleotide
  Antisense strand to SEQ ID NO: 1550782
guuggcaaagaccucagug

SEQ ID NO: 1550784 - RNA, 19 nt, Artificial Sequence
  Description of Artificial Sequence: Synthetic oligonucleotide
  Sense strand starting at position 2905 of SEQ ID NO: 1245282
ugaggucuuugccaacagu

SEQ ID NO: 1550785 - RNA, 19 nt, Artificial Sequence
  Description of Artificial Sequence: Synthetic oligonucleotide
  Antisense strand to SEQ ID NO: 1550784
acuguuggcaaagaccuca

SEQ ID NO: 1550786 - RNA, 19 nt, Artificial Sequence
  Description of Artificial Sequence: Synthetic oligonucleotide
  Sense strand starting at position 2908 of SEQ ID NO: 1245282
ggucuuugccaacagucua

SEQ ID NO: 1550787 - RNA, 19 nt, Artificial Sequence
  Description of Artificial Sequence: Synthetic oligonucleotide
  Antisense strand to SEQ ID NO: 1550786
uagacuguuggcaaagacc

SEQ ID NO: 1550788 - RNA, 19 nt, Artificial Sequence
  Description of Artificial Sequence: Synthetic oligonucleotide
  Sense strand starting at position 3058 of SEQ ID NO: 1245282
cucugaggcuccugcaaau

SEQ ID NO: 1550789 - RNA, 19 nt, Artificial Sequence
  Description of Artificial Sequence: Synthetic oligonucleotide
  Antisense strand to SEQ ID NO: 1550788
auuugcaggagccucagag

SEQ ID NO: 1550790 - RNA, 19 nt, Artificial Sequence
  Description of Artificial Sequence: Synthetic oligonucleotide
  Sense strand starting at position 3103 of SEQ ID NO: 1245282
ucacaugugcccugugaca

SEQ ID NO: 1550791 - RNA, 19 nt, Artificial Sequence
  Description of Artificial Sequence: Synthetic oligonucleotide
  Antisense strand to SEQ ID NO: 1550790
ugucacagggcacauguga

SEQ ID NO: 1550792 - RNA, 19 nt, Artificial Sequence
  Description of Artificial Sequence: Synthetic oligonucleotide
  Sense strand starting at position 3105 of SEQ ID NO: 1245282
acaugugcccugugacagu

SEQ ID NO: 1550793 - RNA, 19 nt, Artificial Sequence
  Description of Artificial Sequence: Synthetic oligonucleotide
  Antisense strand to SEQ ID NO: 1550792
acugucacagggcacaugu

SEQ ID NO: 1550794 - RNA, 19 nt, Artificial Sequence
  Description of Artificial Sequence: Synthetic oligonucleotide
  Sense strand starting at position 3364 of SEQ ID NO: 1245282
agugguuucuuucuuuaau

SEQ ID NO: 1550795 - RNA, 19 nt, Artificial Sequence
  Description of Artificial Sequence: Synthetic oligonucleotide
  Antisense strand to SEQ ID NO: 1550794
auuaaagaaagaaaccacu

SEQ ID NO: 1550796 - RNA, 19 nt, Artificial Sequence
  Description of Artificial Sequence: Synthetic oligonucleotide
  Sense strand starting at position 3365 of SEQ ID NO: 1245282
gugguuucuuucuuuaaug

SEQ ID NO: 1550797 - RNA, 19 nt, Artificial Sequence
  Description of Artificial Sequence: Synthetic oligonucleotide
  Antisense strand to SEQ ID NO: 1550796
cauuaaagaaagaaaccac

SEQ ID NO: 1550798 - RNA, 19 nt, Artificial Sequence
  Description of Artificial Sequence: Synthetic oligonucleotide
  Sense strand starting at position 3366 of SEQ ID NO: 1245282
ugguuucuuucuuuaauga

SEQ ID NO: 1550799 - RNA, 19 nt, Artificial Sequence
  Description of Artificial Sequence: Synthetic oligonucleotide
  Antisense strand to SEQ ID NO: 1550798
ucauuaaagaaagaaacca

SEQ ID NO: 1550800 - RNA, 19 nt, Artificial Sequence
  Description of Artificial Sequence: Synthetic oligonucleotide
  Sense strand starting at position 3367 of SEQ ID NO: 1245282
gguuucuuucuuuaaugag

SEQ ID NO: 1550801 - RNA, 19 nt, Artificial Sequence
  Description of Artificial Sequence: Synthetic oligonucleotide
  Antisense strand to SEQ ID NO: 1550800
cucauuaaagaaagaaacc

SEQ ID NO: 1550802 - RNA, 19 nt, Artificial Sequence
  Description of Artificial Sequence: Synthetic oligonucleotide
  Sense strand starting at position 3376 of SEQ ID NO: 1245282
cuuuaaugagucugauaaa

SEQ ID NO: 1550803 - RNA, 19 nt, Artificial Sequence
  Description of Artificial Sequence: Synthetic oligonucleotide
  Antisense strand to SEQ ID NO: 1550802
uuuaucagacucauuaaag

SEQ ID NO: 1550804 - RNA, 19 nt, Artificial Sequence
  Description of Artificial Sequence: Synthetic oligonucleotide
  Sense strand starting at position 3379 of SEQ ID NO: 1245282
uaaugagucugauaaauag

SEQ ID NO: 1550805 - RNA, 19 nt, Artificial Sequence
  Description of Artificial Sequence: Synthetic oligonucleotide
  Antisense strand to SEQ ID NO: 1550804
cuauuuaucagacucauua

SEQ ID NO: 1550806 - RNA, 19 nt, Artificial Sequence
  Description of Artificial Sequence: Synthetic oligonucleotide
  Sense strand starting at position 3544 of SEQ ID NO: 1245282
ccaauucuuggaggccaga

SEQ ID NO: 1550807 - RNA, 19 nt, Artificial Sequence
  Description of Artificial Sequence: Synthetic oligonucleotide
  Antisense strand to SEQ ID NO: 1550806
ucuggccuccaagaauugg

SEQ ID NO: 1550808 - RNA, 19 nt, Artificial Sequence
  Description of Artificial Sequence: Synthetic oligonucleotide
  Sense strand starting at position 3584 of SEQ ID NO: 1245282
gggcaaucaccauagagcu

SEQ ID NO: 1550809 - RNA, 19 nt, Artificial Sequence
  Description of Artificial Sequence: Synthetic oligonucleotide
  Antisense strand to SEQ ID NO: 1550808
agcucuauggugauugccc

SEQ ID NO: 1550810 - RNA, 19 nt, Artificial Sequence
  Description of Artificial Sequence: Synthetic oligonucleotide
  Sense strand starting at position 3598 of SEQ ID NO: 1245282
gagcuuguuccaugcagaa

SEQ ID NO: 1550811 - RNA, 19 nt, Artificial Sequence
  Description of Artificial Sequence: Synthetic oligonucleotide
  Antisense strand to SEQ ID NO: 1550810
uucugcauggaacaagcuc

SEQ ID NO: 1550812 - RNA, 19 nt, Artificial Sequence
  Description of Artificial Sequence: Synthetic oligonucleotide
  Sense strand starting at position 3704 of SEQ ID NO: 1245282
ccgggaaagugacuucuaa

SEQ ID NO: 1550813 - RNA, 19 nt, Artificial Sequence
  Description of Artificial Sequence: Synthetic oligonucleotide
  Antisense strand to SEQ ID NO: 1550812
uuagaagucacuuucccgg

SEQ ID NO: 1550814 - RNA, 19 nt, Artificial Sequence
  Description of Artificial Sequence: Synthetic oligonucleotide
  Sense strand starting at position 3708 of SEQ ID NO: 1245282
gaaagugacuucuaaggcu

SEQ ID NO: 1550815 - RNA, 19 nt, Artificial Sequence
  Description of Artificial Sequence: Synthetic oligonucleotide
  Antisense strand to SEQ ID NO: 1550814
agccuuagaagucacuuuc

SEQ ID NO: 1550816 - RNA, 19 nt, Artificial Sequence
  Description of Artificial Sequence: Synthetic oligonucleotide
  Sense strand starting at position 3823 of SEQ ID NO: 1245282
ccauauucccaguggcaag

SEQ ID NO: 1550817 - RNA, 19 nt, Artificial Sequence
  Description of Artificial Sequence: Synthetic oligonucleotide
  Antisense strand to SEQ ID NO: 1550816
cuugccacugggaauaugg

SEQ ID NO: 1550818 - RNA, 19 nt, Artificial Sequence
  Description of Artificial Sequence: Synthetic oligonucleotide
  Sense strand starting at position 13 of SEQ ID NO: 1245283
ccaucucaucucgguuaaa

SEQ ID NO: 1550819 - RNA, 19 nt, Artificial Sequence
  Description of Artificial Sequence: Synthetic oligonucleotide
  Antisense strand to SEQ ID NO: 1550818
uuuaaccgagaugagaugg

SEQ ID NO: 1550820 - RNA, 19 nt, Artificial Sequence
  Description of Artificial Sequence: Synthetic oligonucleotide
  Sense strand starting at position 451 of SEQ ID NO: 1245283
cacuguuagggagaacgua

SEQ ID NO: 1550821 - RNA, 19 nt, Artificial Sequence
  Description of Artificial Sequence: Synthetic oligonucleotide
  Antisense strand to SEQ ID NO: 1550820
uacguucucccuaacagug

SEQ ID NO: 1550822 - RNA, 19 nt, Artificial Sequence
  Description of Artificial Sequence: Synthetic oligonucleotide
  Sense strand starting at position 540 of SEQ ID NO: 1245283
acuagugcuauugagauga

SEQ ID NO: 1550823 - RNA, 19 nt, Artificial Sequence
  Description of Artificial Sequence: Synthetic oligonucleotide
  Antisense strand to SEQ ID NO: 1550822
ucaucucaauagcacuagu

SEQ ID NO: 1550824 - RNA, 19 nt, Artificial Sequence
  Description of Artificial Sequence: Synthetic oligonucleotide
  Sense strand starting at position 605 of SEQ ID NO: 1245283
uugcaaaucuggguacaga

SEQ ID NO: 1550825 - RNA, 19 nt, Artificial Sequence
  Description of Artificial Sequence: Synthetic oligonucleotide
  Antisense strand to SEQ ID NO: 1550824
ucuguacccagauuugcaa

SEQ ID NO: 1550826 - RNA, 19 nt, Artificial Sequence
  Description of Artificial Sequence: Synthetic oligonucleotide
  Sense strand starting at position 606 of SEQ ID NO: 1245283
ugcaaaucuggguacagau

SEQ ID NO: 1550827 - RNA, 19 nt, Artificial Sequence
  Description of Artificial Sequence: Synthetic oligonucleotide
  Antisense strand to SEQ ID NO: 1550826
aucuguacccagauuugca

SEQ ID NO: 1550828 - RNA, 19 nt, Artificial Sequence
  Description of Artificial Sequence: Synthetic oligonucleotide
  Sense strand starting at position 806 of SEQ ID NO: 1245283
gaugaaaccggaugucauu

SEQ ID NO: 1550829 - RNA, 19 nt, Artificial Sequence
  Description of Artificial Sequence: Synthetic oligonucleotide
  Antisense strand to SEQ ID NO: 1550828
aaugacauccgguuucauc

SEQ ID NO: 1550830 - RNA, 19 nt, Artificial Sequence
  Description of Artificial Sequence: Synthetic oligonucleotide
  Sense strand starting at position 812 of SEQ ID NO: 1245283
accggaugucauuauguua

SEQ ID NO: 1550831 - RNA, 19 nt, Artificial Sequence
  Description of Artificial Sequence: Synthetic oligonucleotide
  Antisense strand to SEQ ID NO: 1550830
uaacauaaugacauccggu

SEQ ID NO: 1550832 - RNA, 19 nt, Artificial Sequence
  Description of Artificial Sequence: Synthetic oligonucleotide
  Sense strand starting at position 815 of SEQ ID NO: 1245283
ggaugucauuauguuaacu

SEQ ID NO: 1550833 - RNA, 19 nt, Artificial Sequence
  Description of Artificial Sequence: Synthetic oligonucleotide
  Antisense strand to SEQ ID NO: 1550832
aguuaacauaaugacaucc

SEQ ID NO: 1550834 - RNA, 19 nt, Artificial Sequence
  Description of Artificial Sequence: Synthetic oligonucleotide
  Sense strand starting at position 916 of SEQ ID NO: 1245283
uggauuggugguuaccaca

SEQ ID NO: 1550835 - RNA, 19 nt, Artificial Sequence
  Description of Artificial Sequence: Synthetic oligonucleotide
  Antisense strand to SEQ ID NO: 1550834
ugugguaaccaccaaucca

SEQ ID NO: 1550836 - RNA, 19 nt, Artificial Sequence
  Description of Artificial Sequence: Synthetic oligonucleotide
  Sense strand starting at position 1015 of SEQ ID NO: 1245283
aaaucuagugccugauagu

SEQ ID NO: 1550837 - RNA, 19 nt, Artificial Sequence
  Description of Artificial Sequence: Synthetic oligonucleotide
  Antisense strand to SEQ ID NO: 1550836
acuaucaggcacuagauuu

SEQ ID NO: 1550838 - RNA, 19 nt, Artificial Sequence
  Description of Artificial Sequence: Synthetic oligonucleotide
  Sense strand starting at position 1016 of SEQ ID NO: 1245283
aaucuagugccugauagua

SEQ ID NO: 1550839 - RNA, 19 nt, Artificial Sequence
  Description of Artificial Sequence: Synthetic oligonucleotide
  Antisense strand to SEQ ID NO: 1550838
uacuaucaggcacuagauu

SEQ ID NO: 1550840 - RNA, 19 nt, Artificial Sequence
  Description of Artificial Sequence: Synthetic oligonucleotide
  Sense strand starting at position 1148 of SEQ ID NO: 1245283
ugcccugauuuagucguua

SEQ ID NO: 1550841 - RNA, 19 nt, Artificial Sequence
  Description of Artificial Sequence: Synthetic oligonucleotide
  Antisense strand to SEQ ID NO: 1550840
uaacgacuaaaucagggca

SEQ ID NO: 1550842 - RNA, 19 nt, Artificial Sequence
  Description of Artificial Sequence: Synthetic oligonucleotide
  Sense strand starting at position 1152 of SEQ ID NO: 1245283
cugauuuagucguuacaca

SEQ ID NO: 1550843 - RNA, 19 nt, Artificial Sequence
  Description of Artificial Sequence: Synthetic oligonucleotide
  Antisense strand to SEQ ID NO: 1550842
uguguaacgacuaaaucag

SEQ ID NO: 1550844 - RNA, 19 nt, Artificial Sequence
  Description of Artificial Sequence: Synthetic oligonucleotide
  Sense strand starting at position 1157 of SEQ ID NO: 1245283
uuagucguuacacauugua

SEQ ID NO: 1550845 - RNA, 19 nt, Artificial Sequence
  Description of Artificial Sequence: Synthetic oligonucleotide
  Antisense strand to SEQ ID NO: 1550844
uacaauguguaacgacuaa

SEQ ID NO: 1550846 - RNA, 19 nt, Artificial Sequence
  Description of Artificial Sequence: Synthetic oligonucleotide
  Sense strand starting at position 1303 of SEQ ID NO: 1245283
agagcugucccucagaauc

SEQ ID NO: 1550847 - RNA, 19 nt, Artificial Sequence
  Description of Artificial Sequence: Synthetic oligonucleotide
  Antisense strand to SEQ ID NO: 1550846
gauucugagggacagcucu

SEQ ID NO: 1550848 - RNA, 19 nt, Artificial Sequence
  Description of Artificial Sequence: Synthetic oligonucleotide
  Sense strand starting at position 1343 of SEQ ID NO: 1245283
ggucgacugacauggagau

SEQ ID NO: 1550849 - RNA, 19 nt, Artificial Sequence
  Description of Artificial Sequence: Synthetic oligonucleotide
  Antisense strand to SEQ ID NO: 1550848
aucuccaugucagucgacc

SEQ ID NO: 1550850 - RNA, 19 nt, Artificial Sequence
  Description of Artificial Sequence: Synthetic oligonucleotide
  Sense strand starting at position 1360 of SEQ ID NO: 1245283
auggacacgcgauaaauaa

SEQ ID NO: 1550851 - RNA, 19 nt, Artificial Sequence
  Description of Artificial Sequence: Synthetic oligonucleotide
  Antisense strand to SEQ ID NO: 1550850
uuauuuaucgcguguccau

SEQ ID NO: 1550852 - RNA, 19 nt, Artificial Sequence
  Description of Artificial Sequence: Synthetic oligonucleotide
  Sense strand starting at position 1427 of SEQ ID NO: 1245283
cuaugucucugcgucauuu

SEQ ID NO: 1550853 - RNA, 19 nt, Artificial Sequence
  Description of Artificial Sequence: Synthetic oligonucleotide
  Antisense strand to SEQ ID NO: 1550852
aaaugacgcagagacauag

SEQ ID NO: 1550854 - RNA, 19 nt, Artificial Sequence
  Description of Artificial Sequence: Synthetic oligonucleotide
  Sense strand starting at position 1984 of SEQ ID NO: 1245283
gccaaacgcgauucuguuu

SEQ ID NO: 1550855 - RNA, 19 nt, Artificial Sequence
  Description of Artificial Sequence: Synthetic oligonucleotide
  Antisense strand to SEQ ID NO: 1550854
aaacagaaucgcguuuggc

SEQ ID NO: 1550856 - RNA, 19 nt, Artificial Sequence
  Description of Artificial Sequence: Synthetic oligonucleotide
  Sense strand starting at position 2613 of SEQ ID NO: 1245283
ggcaaaucuugcuuuggga

SEQ ID NO: 1550857 - RNA, 19 nt, Artificial Sequence
  Description of Artificial Sequence: Synthetic oligonucleotide
  Antisense strand to SEQ ID NO: 1550856
ucccaaagcaagauuugcc

SEQ ID NO: 1550858 - RNA, 19 nt, Artificial Sequence
  Description of Artificial Sequence: Synthetic oligonucleotide
  Sense strand starting at position 2744 of SEQ ID NO: 1245283
gcaauuucuuauuagggac

SEQ ID NO: 1550859 - RNA, 19 nt, Artificial Sequence
  Description of Artificial Sequence: Synthetic oligonucleotide
  Antisense strand to SEQ ID NO: 1550858
gucccuaauaagaaauugc

SEQ ID NO: 1550860 - RNA, 19 nt, Artificial Sequence
  Description of Artificial Sequence: Synthetic oligonucleotide
  Sense strand starting at position 2804 of SEQ ID NO: 1245283
aggccauucuuaccuguua

SEQ ID NO: 1550861 - RNA, 19 nt, Artificial Sequence
  Description of Artificial Sequence: Synthetic oligonucleotide
  Antisense strand to SEQ ID NO: 1550860
uaacagguaagaauggccu

SEQ ID NO: 1550862 - RNA, 19 nt, Artificial Sequence
  Description of Artificial Sequence: Synthetic oligonucleotide
  Sense strand starting at position 2871 of SEQ ID NO: 1245283
ggaugcauuagucugcguu

SEQ ID NO: 1550863 - RNA, 19 nt, Artificial Sequence
  Description of Artificial Sequence: Synthetic oligonucleotide
  Antisense strand to SEQ ID NO: 1550862
aacgcagacuaaugcaucc

SEQ ID NO: 1550864 - RNA, 19 nt, Artificial Sequence
  Description of Artificial Sequence: Synthetic oligonucleotide
  Sense strand starting at position 2989 of SEQ ID NO: 1245283
acucgaaagcuccauaguu

SEQ ID NO: 1550865 - RNA, 19 nt, Artificial Sequence
  Description of Artificial Sequence: Synthetic oligonucleotide
  Antisense strand to SEQ ID NO: 1550864
aacuauggagcuuucgagu

SEQ ID NO: 1550866 - RNA, 19 nt, Artificial Sequence
  Description of Artificial Sequence: Synthetic oligonucleotide
  Sense strand starting at position 2991 of SEQ ID NO: 1245283
ucgaaagcuccauaguuga

SEQ ID NO: 1550867 - RNA, 19 nt, Artificial Sequence
  Description of Artificial Sequence: Synthetic oligonucleotide
  Antisense strand to SEQ ID NO: 1550866
ucaacuauggagcuuucga

SEQ ID NO: 1550868 - RNA, 19 nt, Artificial Sequence
  Description of Artificial Sequence: Synthetic oligonucleotide
  Sense strand starting at position 3133 of SEQ ID NO: 1245283
cgucuugaauuacucuuua

SEQ ID NO: 1550869 - RNA, 19 nt, Artificial Sequence
  Description of Artificial Sequence: Synthetic oligonucleotide
  Antisense strand to SEQ ID NO: 1550868
uaaagaguaauucaagacg

SEQ ID NO: 1550870 - RNA, 19 nt, Artificial Sequence
  Description of Artificial Sequence: Synthetic oligonucleotide
  Sense strand starting at position 3210 of SEQ ID NO: 1245283
ucaguaggcacagguauau

SEQ ID NO: 1550871 - RNA, 19 nt, Artificial Sequence
  Description of Artificial Sequence: Synthetic oligonucleotide
  Antisense strand to SEQ ID NO: 1550870
auauaccugugccuacuga

SEQ ID NO: 1550872 - RNA, 19 nt, Artificial Sequence
  Description of Artificial Sequence: Synthetic oligonucleotide
  Sense strand starting at position 3214 of SEQ ID NO: 1245283
uaggcacagguauauuaau

SEQ ID NO: 1550873 - RNA, 19 nt, Artificial Sequence
  Description of Artificial Sequence: Synthetic oligonucleotide
  Antisense strand to SEQ ID NO: 1550872
auuaauauaccugugccua

SEQ ID NO: 1550874 - RNA, 19 nt, Artificial Sequence
  Description of Artificial Sequence: Synthetic oligonucleotide
  Sense strand starting at position 3266 of SEQ ID NO: 1245283
cagcguugugcuuuccaau

SEQ ID NO: 1550875 - RNA, 19 nt, Artificial Sequence
  Description of Artificial Sequence: Synthetic oligonucleotide
  Antisense strand to SEQ ID NO: 1550874
auuggaaagcacaacgcug

SEQ ID NO: 1550876 - RNA, 19 nt, Artificial Sequence
  Description of Artificial Sequence: Synthetic oligonucleotide
  Sense strand starting at position 3267 of SEQ ID NO: 1245283
agcguugugcuuuccaauc

SEQ ID NO: 1550877 - RNA, 19 nt, Artificial Sequence
  Description of Artificial Sequence: Synthetic oligonucleotide
  Antisense strand to SEQ ID NO: 1550876
gauuggaaagcacaacgcu

SEQ ID NO: 1550878 - RNA, 19 nt, Artificial Sequence
  Description of Artificial Sequence: Synthetic oligonucleotide
  Sense strand starting at position 3293 of SEQ ID NO: 1245283
uucuaaauugugggcauua

SEQ ID NO: 1550879 - RNA, 19 nt, Artificial Sequence
  Description of Artificial Sequence: Synthetic oligonucleotide
  Antisense strand to SEQ ID NO: 1550878
uaaugcccacaauuuagaa

SEQ ID NO: 1550880 - RNA, 19 nt, Artificial Sequence
  Description of Artificial Sequence: Synthetic oligonucleotide
  Sense strand starting at position 3390 of SEQ ID NO: 1245283
gacugcuuguauuuguuau

SEQ ID NO: 1550881 - RNA, 19 nt, Artificial Sequence
  Description of Artificial Sequence: Synthetic oligonucleotide
  Antisense strand to SEQ ID NO: 1550880
auaacaaauacaagcaguc

SEQ ID NO: 1550882 - RNA, 19 nt, Artificial Sequence
  Description of Artificial Sequence: Synthetic oligonucleotide
  Sense strand starting at position 3392 of SEQ ID NO: 1245283
cugcuuguauuuguuauua

SEQ ID NO: 1550883 - RNA, 19 nt, Artificial Sequence
  Description of Artificial Sequence: Synthetic oligonucleotide
  Antisense strand to SEQ ID NO: 1550882
uaauaacaaauacaagcag

SEQ ID NO: 1550884 - RNA, 19 nt, Artificial Sequence
  Description of Artificial Sequence: Synthetic oligonucleotide
  Sense strand starting at position 3471 of SEQ ID NO: 1245283
guaggucuuacagaucgaa

SEQ ID NO: 1550885 - RNA, 19 nt, Artificial Sequence
  Description of Artificial Sequence: Synthetic oligonucleotide
  Antisense strand to SEQ ID NO: 1550884
uucgaucuguaagaccuac

SEQ ID NO: 1550886 - RNA, 19 nt, Artificial Sequence
  Description of Artificial Sequence: Synthetic oligonucleotide
  Sense strand starting at position 3475 of SEQ ID NO: 1245283
gucuuacagaucgaaugca

SEQ ID NO: 1550887 - RNA, 19 nt, Artificial Sequence
  Description of Artificial Sequence: Synthetic oligonucleotide
  Antisense strand to SEQ ID NO: 1550886
ugcauucgaucuguaagac

SEQ ID NO: 1550888 - RNA, 19 nt, Artificial Sequence
  Description of Artificial Sequence: Synthetic oligonucleotide
  Sense strand starting at position 3491 of SEQ ID NO: 1245283
gcauuauaggcauauacaa

SEQ ID NO: 1550889 - RNA, 19 nt, Artificial Sequence
  Description of Artificial Sequence: Synthetic oligonucleotide
  Antisense strand to SEQ ID NO: 1550888
uuguauaugccuauaaugc

SEQ ID NO: 1550890 - RNA, 19 nt, Artificial Sequence
  Description of Artificial Sequence: Synthetic oligonucleotide
  Sense strand starting at position 3510 of SEQ ID NO: 1245283
gcauuagaaccaggcaauu

SEQ ID NO: 1550891 - RNA, 19 nt, Artificial Sequence
  Description of Artificial Sequence: Synthetic oligonucleotide
  Antisense strand to SEQ ID NO: 1550890
aauugccugguucuaaugc

SEQ ID NO: 1550892 - RNA, 19 nt, Artificial Sequence
  Description of Artificial Sequence: Synthetic oligonucleotide
  Sense strand starting at position 3538 of SEQ ID NO: 1245283
guuccugaugcuuaaguuu

SEQ ID NO: 1550893 - RNA, 19 nt, Artificial Sequence
  Description of Artificial Sequence: Synthetic oligonucleotide
  Antisense strand to SEQ ID NO: 1550892
aaacuuaagcaucaggaac

SEQ ID NO: 1550894 - RNA, 19 nt, Artificial Sequence
  Description of Artificial Sequence: Synthetic oligonucleotide
  Sense strand starting at position 3545 of SEQ ID NO: 1245283
augcuuaaguuucuugaga

SEQ ID NO: 1550895 - RNA, 19 nt, Artificial Sequence
  Description of Artificial Sequence: Synthetic oligonucleotide
  Antisense strand to SEQ ID NO: 1550894
ucucaagaaacuuaagcau

SEQ ID NO: 1550896 - RNA, 19 nt, Artificial Sequence
  Description of Artificial Sequence: Synthetic oligonucleotide
  Sense strand starting at position 3546 of SEQ ID NO: 1245283
ugcuuaaguuucuugagau

SEQ ID NO: 1550897 - RNA, 19 nt, Artificial Sequence
  Description of Artificial Sequence: Synthetic oligonucleotide
  Antisense strand to SEQ ID NO: 1550896
aucucaagaaacuuaagca

SEQ ID NO: 1550898 - RNA, 19 nt, Artificial Sequence
  Description of Artificial Sequence: Synthetic oligonucleotide
  Sense strand starting at position 27 of SEQ ID NO: 1245284
caccgaagacauugugaaa

SEQ ID NO: 1550899 - RNA, 19 nt, Artificial Sequence
  Description of Artificial Sequence: Synthetic oligonucleotide
  Antisense strand to SEQ ID NO: 1550898
uuucacaaugucuucggug

SEQ ID NO: 1550900 - RNA, 19 nt, Artificial Sequence
  Description of Artificial Sequence: Synthetic oligonucleotide
  Sense strand starting at position 40 of SEQ ID NO: 1245284
gugaaauccuguccauaua

SEQ ID NO: 1550901 - RNA, 19 nt, Artificial Sequence
  Description of Artificial Sequence: Synthetic oligonucleotide
  Antisense strand to SEQ ID NO: 1550900
uauauggacaggauuucac

SEQ ID NO: 1550902 - RNA, 19 nt, Artificial Sequence
  Description of Artificial Sequence: Synthetic oligonucleotide
  Sense strand starting at position 79 of SEQ ID NO: 1245284
uuuagagauuaugugguuu

SEQ ID NO: 1550903 - RNA, 19 nt, Artificial Sequence
  Description of Artificial Sequence: Synthetic oligonucleotide
  Antisense strand to SEQ ID NO: 1550902
aaaccacauaaucucuaaa

SEQ ID NO: 1550904 - RNA, 19 nt, Artificial Sequence
  Description of Artificial Sequence: Synthetic oligonucleotide
  Sense strand starting at position 116 of SEQ ID NO: 1245284
uuauauaacccuuaguugu

SEQ ID NO: 1550905 - RNA, 19 nt, Artificial Sequence
  Description of Artificial Sequence: Synthetic oligonucleotide
  Antisense strand to SEQ ID NO: 1550904
acaacuaaggguuauauaa

SEQ ID NO: 1550906 - RNA, 19 nt, Artificial Sequence
  Description of Artificial Sequence: Synthetic oligonucleotide
  Sense strand starting at position 168 of SEQ ID NO: 1245284
gaggaaauguaucaaaccu

SEQ ID NO: 1550907 - RNA, 19 nt, Artificial Sequence
  Description of Artificial Sequence: Synthetic oligonucleotide
  Antisense strand to SEQ ID NO: 1550906
agguuugauacauuuccuc

SEQ ID NO: 1550908 - RNA, 19 nt, Artificial Sequence
  Description of Artificial Sequence: Synthetic oligonucleotide
  Sense strand starting at position 330 of SEQ ID NO: 1245284
uuacaauaacuguauggua

SEQ ID NO: 1550909 - RNA, 19 nt, Artificial Sequence
  Description of Artificial Sequence: Synthetic oligonucleotide
  Antisense strand to SEQ ID NO: 1550908
uaccauacaguuauuguaa

SEQ ID NO: 1550910 - RNA, 19 nt, Artificial Sequence
  Description of Artificial Sequence: Synthetic oligonucleotide
  Sense strand starting at position 499 of SEQ ID NO: 1245284
gcaauucuccguuaucauu

SEQ ID NO: 1550911 - RNA, 19 nt, Artificial Sequence
  Description of Artificial Sequence: Synthetic oligonucleotide
  Antisense strand to SEQ ID NO: 1550910
aaugauaacggagaauugc

SEQ ID NO: 1550912 - RNA, 19 nt, Artificial Sequence
  Description of Artificial Sequence: Synthetic oligonucleotide
  Sense strand starting at position 598 of SEQ ID NO: 1245284
ucaaacggaucagaaagau

SEQ ID NO: 1550913 - RNA, 19 nt, Artificial Sequence
  Description of Artificial Sequence: Synthetic oligonucleotide
  Antisense strand to SEQ ID NO: 1550912
aucuuucugauccguuuga

SEQ ID NO: 1550914 - RNA, 19 nt, Artificial Sequence
  Description of Artificial Sequence: Synthetic oligonucleotide
  Sense strand starting at position 664 of SEQ ID NO: 1245284
guaacucugacgugauaac

SEQ ID NO: 1550915 - RNA, 19 nt, Artificial Sequence
  Description of Artificial Sequence: Synthetic oligonucleotide
  Antisense strand to SEQ ID NO: 1550914
guuaucacgucagaguuac

SEQ ID NO: 1550916 - RNA, 19 nt, Artificial Sequence
  Description of Artificial Sequence: Synthetic oligonucleotide
  Sense strand starting at position 665 of SEQ ID NO: 1245284
uaacucugacgugauaacu

SEQ ID NO: 1550917 - RNA, 19 nt, Artificial Sequence
  Description of Artificial Sequence: Synthetic oligonucleotide
  Antisense strand to SEQ ID NO: 1550916
aguuaucacgucagaguua

SEQ ID NO: 1550918 - RNA, 19 nt, Artificial Sequence
  Description of Artificial Sequence: Synthetic oligonucleotide
  Sense strand starting at position 705 of SEQ ID NO: 1245284
gcaguuuguaaguaucuuu

SEQ ID NO: 1550919 - RNA, 19 nt, Artificial Sequence
  Description of Artificial Sequence: Synthetic oligonucleotide
  Antisense strand to SEQ ID NO: 1550918
aaagauacuuacaaacugc

SEQ ID NO: 1550920 - RNA, 19 nt, Artificial Sequence
  Description of Artificial Sequence: Synthetic oligonucleotide
  Sense strand starting at position 716 of SEQ ID NO: 1245284
guaucuuucggguacucau

SEQ ID NO: 1550921 - RNA, 19 nt, Artificial Sequence
  Description of Artificial Sequence: Synthetic oligonucleotide
  Antisense strand to SEQ ID NO: 1550920
augaguacccgaaagauac

SEQ ID NO: 1550922 - RNA, 19 nt, Artificial Sequence
  Description of Artificial Sequence: Synthetic oligonucleotide
  Sense strand starting at position 723 of SEQ ID NO: 1245284
ucggguacucaugaacuga

SEQ ID NO: 1550923 - RNA, 19 nt, Artificial Sequence
  Description of Artificial Sequence: Synthetic oligonucleotide
  Antisense strand to SEQ ID NO: 1550922
ucaguucaugaguacccga

SEQ ID NO: 1550924 - RNA, 19 nt, Artificial Sequence
  Description of Artificial Sequence: Synthetic oligonucleotide
  Sense strand starting at position 734 of SEQ ID NO: 1245284
ugaacugagucagaauuaa

SEQ ID NO: 1550925 - RNA, 19 nt, Artificial Sequence
  Description of Artificial Sequence: Synthetic oligonucleotide
  Antisense strand to SEQ ID NO: 1550924
uuaauucugacucaguuca

SEQ ID NO: 1550926 - RNA, 19 nt, Artificial Sequence
  Description of Artificial Sequence: Synthetic oligonucleotide
  Sense strand starting at position 811 of SEQ ID NO: 1245284
uguuaaugguacuccaaga

SEQ ID NO: 1550927 - RNA, 19 nt, Artificial Sequence
  Description of Artificial Sequence: Synthetic oligonucleotide
  Antisense strand to SEQ ID NO: 1550926
ucuuggaguaccauuaaca

SEQ ID NO: 1550928 - RNA, 19 nt, Artificial Sequence
  Description of Artificial Sequence: Synthetic oligonucleotide
  Sense strand starting at position 816 of SEQ ID NO: 1245284
augguacuccaagauucuu

SEQ ID NO: 1550929 - RNA, 19 nt, Artificial Sequence
  Description of Artificial Sequence: Synthetic oligonucleotide
  Antisense strand to SEQ ID NO: 1550928
aagaaucuuggaguaccau

SEQ ID NO: 1550930 - RNA, 19 nt, Artificial Sequence
  Description of Artificial Sequence: Synthetic oligonucleotide
  Sense strand starting at position 863 of SEQ ID NO: 1245284
gacgauuaugcacaccuga

SEQ ID NO: 1550931 - RNA, 19 nt, Artificial Sequence
  Description of Artificial Sequence: Synthetic oligonucleotide
  Antisense strand to SEQ ID NO: 1550930
ucaggugugcauaaucguc

SEQ ID NO: 1550932 - RNA, 19 nt, Artificial Sequence
  Description of Artificial Sequence: Synthetic oligonucleotide
  Sense strand starting at position 1070 of SEQ ID NO: 1245284
cugugacaaugcccucuua

SEQ ID NO: 1550933 - RNA, 19 nt, Artificial Sequence
  Description of Artificial Sequence: Synthetic oligonucleotide
  Antisense strand to SEQ ID NO: 1550932
uaagagggcauugucacag

SEQ ID NO: 1550934 - RNA, 19 nt, Artificial Sequence
  Description of Artificial Sequence: Synthetic oligonucleotide
  Sense strand starting at position 1909 of SEQ ID NO: 1245284
ggacuaauauguccgccuu

SEQ ID NO: 1550935 - RNA, 19 nt, Artificial Sequence
  Description of Artificial Sequence: Synthetic oligonucleotide
  Antisense strand to SEQ ID NO: 1550934
aaggcggacauauuagucc

SEQ ID NO: 1550936 - RNA, 19 nt, Artificial Sequence
  Description of Artificial Sequence: Synthetic oligonucleotide
  Sense strand starting at position 2641 of SEQ ID NO: 1245284
uaagucguucguguuaguu

SEQ ID NO: 1550937 - RNA, 19 nt, Artificial Sequence
  Description of Artificial Sequence: Synthetic oligonucleotide
  Antisense strand to SEQ ID NO: 1550936
aacuaacacgaacgacuua

SEQ ID NO: 1550938 - RNA, 19 nt, Artificial Sequence
  Description of Artificial Sequence: Synthetic oligonucleotide
  Sense strand starting at position 2647 of SEQ ID NO: 1245284
guucguguuaguucucaua

SEQ ID NO: 1550939 - RNA, 19 nt, Artificial Sequence
  Description of Artificial Sequence: Synthetic oligonucleotide
  Antisense strand to SEQ ID NO: 1550938
uaugagaacuaacacgaac

SEQ ID NO: 1550940 - RNA, 19 nt, Artificial Sequence
  Description of Artificial Sequence: Synthetic oligonucleotide
  Sense strand starting at position 2692 of SEQ ID NO: 1245284
acguguaaugcugccguuu

SEQ ID NO: 1550941 - RNA, 19 nt, Artificial Sequence
  Description of Artificial Sequence: Synthetic oligonucleotide
  Antisense strand to SEQ ID NO: 1550940
aaacggcagcauuacacgu

SEQ ID NO: 1550942 - RNA, 19 nt, Artificial Sequence
  Description of Artificial Sequence: Synthetic oligonucleotide
  Sense strand starting at position 2727 of SEQ ID NO: 1245284
agugaaacuuaauugugau

SEQ ID NO: 1550943 - RNA, 19 nt, Artificial Sequence
  Description of Artificial Sequence: Synthetic oligonucleotide
  Antisense strand to SEQ ID NO: 1550942
aucacaauuaaguuucacu

SEQ ID NO: 1550944 - RNA, 19 nt, Artificial Sequence
  Description of Artificial Sequence: Synthetic oligonucleotide
  Sense strand starting at position 2754 of SEQ ID NO: 1245284
gaacuaauguaggacauga

SEQ ID NO: 1550945 - RNA, 19 nt, Artificial Sequence
  Description of Artificial Sequence: Synthetic oligonucleotide
  Antisense strand to SEQ ID NO: 1550944
ucauguccuacauuaguuc

SEQ ID NO: 1550946 - RNA, 19 nt, Artificial Sequence
  Description of Artificial Sequence: Synthetic oligonucleotide
  Sense strand starting at position 2778 of SEQ ID NO: 1245284
augggcauuucuccuaguu

SEQ ID NO: 1550947 - RNA, 19 nt, Artificial Sequence
  Description of Artificial Sequence: Synthetic oligonucleotide
  Antisense strand to SEQ ID NO: 1550946
aacuaggagaaaugcccau

SEQ ID NO: 1550948 - RNA, 19 nt, Artificial Sequence
  Description of Artificial Sequence: Synthetic oligonucleotide
  Sense strand starting at position 2808 of SEQ ID NO: 1245284
uugacuguggugugaggaa

SEQ ID NO: 1550949 - RNA, 19 nt, Artificial Sequence
  Description of Artificial Sequence: Synthetic oligonucleotide
  Antisense strand to SEQ ID NO: 1550948
uuccucacaccacagucaa

SEQ ID NO: 1550950 - RNA, 19 nt, Artificial Sequence
  Description of Artificial Sequence: Synthetic oligonucleotide
  Sense strand starting at position 2827 of SEQ ID NO: 1245284
aggugaaagacuugucacu

SEQ ID NO: 1550951 - RNA, 19 nt, Artificial Sequence
  Description of Artificial Sequence: Synthetic oligonucleotide
  Antisense strand to SEQ ID NO: 1550950
agugacaagucuuucaccu

SEQ ID NO: 1550952 - RNA, 19 nt, Artificial Sequence
  Description of Artificial Sequence: Synthetic oligonucleotide
  Sense strand starting at position 2852 of SEQ ID NO: 1245284
cgcugauaaaguuauguuc

SEQ ID NO: 1550953 - RNA, 19 nt, Artificial Sequence
  Description of Artificial Sequence: Synthetic oligonucleotide
  Antisense strand to SEQ ID NO: 1550952
gaacauaacuuuaucagcg

SEQ ID NO: 1550954 - RNA, 19 nt, Artificial Sequence
  Description of Artificial Sequence: Synthetic oligonucleotide
  Sense strand starting at position 3057 of SEQ ID NO: 1245284
agccuuacgaugugaguca

SEQ ID NO: 1550955 - RNA, 19 nt, Artificial Sequence
  Description of Artificial Sequence: Synthetic oligonucleotide
  Antisense strand to SEQ ID NO: 1550954
ugacucacaucguaaggcu

SEQ ID NO: 1550956 - RNA, 19 nt, Artificial Sequence
  Description of Artificial Sequence: Synthetic oligonucleotide
  Sense strand starting at position 3182 of SEQ ID NO: 1245284
ggacguucuugguuuauac

SEQ ID NO: 1550957 - RNA, 19 nt, Artificial Sequence
  Description of Artificial Sequence: Synthetic oligonucleotide
  Antisense strand to SEQ ID NO: 1550956
guauaaaccaagaacgucc

SEQ ID NO: 1550958 - RNA, 19 nt, Artificial Sequence
  Description of Artificial Sequence: Synthetic oligonucleotide
  Sense strand starting at position 3184 of SEQ ID NO: 1245284
acguucuugguuuauacaa

SEQ ID NO: 1550959 - RNA, 19 nt, Artificial Sequence
  Description of Artificial Sequence: Synthetic oligonucleotide
  Antisense strand to SEQ ID NO: 1550958
uuguauaaaccaagaacgu

SEQ ID NO: 1550960 - RNA, 19 nt, Artificial Sequence
  Description of Artificial Sequence: Synthetic oligonucleotide
  Sense strand starting at position 3416 of SEQ ID NO: 1245284
uuguuucucagagaaccgu

SEQ ID NO: 1550961 - RNA, 19 nt, Artificial Sequence
  Description of Artificial Sequence: Synthetic oligonucleotide
  Antisense strand to SEQ ID NO: 1550960
acgguucucugagaaacaa

SEQ ID NO: 1550962 - RNA, 19 nt, Artificial Sequence
  Description of Artificial Sequence: Synthetic oligonucleotide
  Sense strand starting at position 3422 of SEQ ID NO: 1245284
cucagagaaccgugaacau

SEQ ID NO: 1550963 - RNA, 19 nt, Artificial Sequence
  Description of Artificial Sequence: Synthetic oligonucleotide
  Antisense strand to SEQ ID NO: 1550962
auguucacgguucucugag

SEQ ID NO: 1550964 - RNA, 19 nt, Artificial Sequence
  Description of Artificial Sequence: Synthetic oligonucleotide
  Sense strand starting at position 3437 of SEQ ID NO: 1245284
acauuauguugcuuuccau

SEQ ID NO: 1550965 - RNA, 19 nt, Artificial Sequence
  Description of Artificial Sequence: Synthetic oligonucleotide
  Antisense strand to SEQ ID NO: 1550964
auggaaagcaacauaaugu

SEQ ID NO: 1550966 - RNA, 19 nt, Artificial Sequence
  Description of Artificial Sequence: Synthetic oligonucleotide
  Sense strand starting at position 3440 of SEQ ID NO: 1245284
uuauguugcuuuccauuua

SEQ ID NO: 1550967 - RNA, 19 nt, Artificial Sequence
  Description of Artificial Sequence: Synthetic oligonucleotide
  Antisense strand to SEQ ID NO: 1550966
uaaauggaaagcaacauaa

SEQ ID NO: 1550968 - RNA, 19 nt, Artificial Sequence
  Description of Artificial Sequence: Synthetic oligonucleotide
  Sense strand starting at position 3498 of SEQ ID NO: 1245284
gagugacacugauaaauau

SEQ ID NO: 1550969 - RNA, 19 nt, Artificial Sequence
  Description of Artificial Sequence: Synthetic oligonucleotide
  Antisense strand to SEQ ID NO: 1550968
auauuuaucagugucacuc

SEQ ID NO: 1550970 - RNA, 19 nt, Artificial Sequence
  Description of Artificial Sequence: Synthetic oligonucleotide
  Sense strand starting at position 3629 of SEQ ID NO: 1245284
cuacaaggcucuucugauu

SEQ ID NO: 1550971 - RNA, 19 nt, Artificial Sequence
  Description of Artificial Sequence: Synthetic oligonucleotide
  Antisense strand to SEQ ID NO: 1550970
aaucagaagagccuuguag

SEQ ID NO: 1550972 - RNA, 19 nt, Artificial Sequence
  Description of Artificial Sequence: Synthetic oligonucleotide
  Sense strand starting at position 3634 of SEQ ID NO: 1245284
aggcucuucugauuauugu

SEQ ID NO: 1550973 - RNA, 19 nt, Artificial Sequence
  Description of Artificial Sequence: Synthetic oligonucleotide
  Antisense strand to SEQ ID NO: 1550972
acaauaaucagaagagccu

SEQ ID NO: 1550974 - RNA, 19 nt, Artificial Sequence
  Description of Artificial Sequence: Synthetic oligonucleotide
  Sense strand starting at position 3650 of SEQ ID NO: 1245284
ugugacacaucacuaguua

SEQ ID NO: 1550975 - RNA, 19 nt, Artificial Sequence
  Description of Artificial Sequence: Synthetic oligonucleotide
  Antisense strand to SEQ ID NO: 1550974
uaacuagugaugugucaca

SEQ ID NO: 1550976 - RNA, 19 nt, Artificial Sequence
  Description of Artificial Sequence: Synthetic oligonucleotide
  Sense strand starting at position 3651 of SEQ ID NO: 1245284
gugacacaucacuaguuau

SEQ ID NO: 1550977 - RNA, 19 nt, Artificial Sequence
  Description of Artificial Sequence: Synthetic oligonucleotide
  Antisense strand to SEQ ID NO: 1550976
auaacuagugaugugucac

SEQ ID NO: 1550978 - RNA, 19 nt, Artificial Sequence
  Description of Artificial Sequence: Synthetic oligonucleotide
  Sense strand starting at position 68 of SEQ ID NO: 1245285
gguuucuuaggauaugguu

SEQ ID NO: 1550979 - RNA, 19 nt, Artificial Sequence
  Description of Artificial Sequence: Synthetic oligonucleotide
  Antisense strand to SEQ ID NO: 1550978
aaccauauccuaagaaacc

SEQ ID NO: 1550980 - RNA, 19 nt, Artificial Sequence
  Description of Artificial Sequence: Synthetic oligonucleotide
  Sense strand starting at position 356 of SEQ ID NO: 1245285
gaguguucuaaguaugaag

SEQ ID NO: 1550981 - RNA, 19 nt, Artificial Sequence
  Description of Artificial Sequence: Synthetic oligonucleotide
  Antisense strand to SEQ ID NO: 1550980
cuucauacuuagaacacuc

SEQ ID NO: 1550982 - RNA, 19 nt, Artificial Sequence
  Description of Artificial Sequence: Synthetic oligonucleotide
  Sense strand starting at position 358 of SEQ ID NO: 1245285
guguucuaaguaugaagaa

SEQ ID NO: 1550983 - RNA, 19 nt, Artificial Sequence
  Description of Artificial Sequence: Synthetic oligonucleotide
  Antisense strand to SEQ ID NO: 1550982
uucuucauacuuagaacac

SEQ ID NO: 1550984 - RNA, 19 nt, Artificial Sequence
  Description of Artificial Sequence: Synthetic oligonucleotide
  Sense strand starting at position 370 of SEQ ID NO: 1245285
ugaagaauaaaguguuggu

SEQ ID NO: 1550985 - RNA, 19 nt, Artificial Sequence
  Description of Artificial Sequence: Synthetic oligonucleotide
  Antisense strand to SEQ ID NO: 1550984
accaacacuuuauucuuca

SEQ ID NO: 1550986 - RNA, 19 nt, Artificial Sequence
  Description of Artificial Sequence: Synthetic oligonucleotide
  Sense strand starting at position 374 of SEQ ID NO: 1245285
gaauaaaguguugguuaac

SEQ ID NO: 1550987 - RNA, 19 nt, Artificial Sequence
  Description of Artificial Sequence: Synthetic oligonucleotide
  Antisense strand to SEQ ID NO: 1550986
guuaaccaacacuuuauuc

SEQ ID NO: 1550988 - RNA, 19 nt, Artificial Sequence
  Description of Artificial Sequence: Synthetic oligonucleotide
  Sense strand starting at position 375 of SEQ ID NO: 1245285
aauaaaguguugguuaacu

SEQ ID NO: 1550989 - RNA, 19 nt, Artificial Sequence
  Description of Artificial Sequence: Synthetic oligonucleotide
  Antisense strand to SEQ ID NO: 1550988
aguuaaccaacacuuuauu

SEQ ID NO: 1550990 - RNA, 19 nt, Artificial Sequence
  Description of Artificial Sequence: Synthetic oligonucleotide
  Sense strand starting at position 377 of SEQ ID NO: 1245285
uaaaguguugguuaacuag

SEQ ID NO: 1550991 - RNA, 19 nt, Artificial Sequence
  Description of Artificial Sequence: Synthetic oligonucleotide
  Antisense strand to SEQ ID NO: 1550990
cuaguuaaccaacacuuua

SEQ ID NO: 1550992 - RNA, 19 nt, Artificial Sequence
  Description of Artificial Sequence: Synthetic oligonucleotide
  Sense strand starting at position 386 of SEQ ID NO: 1245285
gguuaacuagaucaaagcu

SEQ ID NO: 1550993 - RNA, 19 nt, Artificial Sequence
  Description of Artificial Sequence: Synthetic oligonucleotide
  Antisense strand to SEQ ID NO: 1550992
agcuuugaucuaguuaacc

SEQ ID NO: 1550994 - RNA, 19 nt, Artificial Sequence
  Description of Artificial Sequence: Synthetic oligonucleotide
  Sense strand starting at position 451 of SEQ ID NO: 1245285
aaugucgaguuauuucuau

SEQ ID NO: 1550995 - RNA, 19 nt, Artificial Sequence
  Description of Artificial Sequence: Synthetic oligonucleotide
  Antisense strand to SEQ ID NO: 1550994
auagaaauaacucgacauu

SEQ ID NO: 1550996 - RNA, 19 nt, Artificial Sequence
  Description of Artificial Sequence: Synthetic oligonucleotide
  Sense strand starting at position 511 of SEQ ID NO: 1245285
ccagguaaacuucguugaa

SEQ ID NO: 1550997 - RNA, 19 nt, Artificial Sequence
  Description of Artificial Sequence: Synthetic oligonucleotide
  Antisense strand to SEQ ID NO: 1550996
uucaacgaaguuuaccugg

SEQ ID NO: 1550998 - RNA, 19 nt, Artificial Sequence
  Description of Artificial Sequence: Synthetic oligonucleotide
  Sense strand starting at position 512 of SEQ ID NO: 1245285
cagguaaacuucguugaag

SEQ ID NO: 1550999 - RNA, 19 nt, Artificial Sequence
  Description of Artificial Sequence: Synthetic oligonucleotide
  Antisense strand to SEQ ID NO: 1550998
cuucaacgaaguuuaccug

SEQ ID NO: 1551000 - RNA, 19 nt, Artificial Sequence
  Description of Artificial Sequence: Synthetic oligonucleotide
  Sense strand starting at position 515 of SEQ ID NO: 1245285
guaaacuucguugaagcua

SEQ ID NO: 1551001 - RNA, 19 nt, Artificial Sequence
  Description of Artificial Sequence: Synthetic oligonucleotide
  Antisense strand to SEQ ID NO: 1551000
uagcuucaacgaaguuuac

SEQ ID NO: 1551002 - RNA, 19 nt, Artificial Sequence
  Description of Artificial Sequence: Synthetic oligonucleotide
  Sense strand starting at position 520 of SEQ ID NO: 1245285
cuucguugaagcuagagaa

SEQ ID NO: 1551003 - RNA, 19 nt, Artificial Sequence
  Description of Artificial Sequence: Synthetic oligonucleotide
  Antisense strand to SEQ ID NO: 1551002
uucucuagcuucaacgaag

SEQ ID NO: 1551004 - RNA, 19 nt, Artificial Sequence
  Description of Artificial Sequence: Synthetic oligonucleotide
  Sense strand starting at position 825 of SEQ ID NO: 1245285
cuaugaaucgcauaccuua

SEQ ID NO: 1551005 - RNA, 19 nt, Artificial Sequence
  Description of Artificial Sequence: Synthetic oligonucleotide
  Antisense strand to SEQ ID NO: 1551004
uaagguaugcgauucauag

SEQ ID NO: 1551006 - RNA, 19 nt, Artificial Sequence
  Description of Artificial Sequence: Synthetic oligonucleotide
  Sense strand starting at position 867 of SEQ ID NO: 1245285
ucuugauuugcaugcuaga

SEQ ID NO: 1551007 - RNA, 19 nt, Artificial Sequence
  Description of Artificial Sequence: Synthetic oligonucleotide
  Antisense strand to SEQ ID NO: 1551006
ucuagcaugcaaaucaaga

SEQ ID NO: 1551008 - RNA, 19 nt, Artificial Sequence
  Description of Artificial Sequence: Synthetic oligonucleotide
  Sense strand starting at position 1024 of SEQ ID NO: 1245285
aggaaaguacaguguaauu

SEQ ID NO: 1551009 - RNA, 19 nt, Artificial Sequence
  Description of Artificial Sequence: Synthetic oligonucleotide
  Antisense strand to SEQ ID NO: 1551008
aauuacacuguacuuuccu

SEQ ID NO: 1551010 - RNA, 19 nt, Artificial Sequence
  Description of Artificial Sequence: Synthetic oligonucleotide
  Sense strand starting at position 1026 of SEQ ID NO: 1245285
gaaaguacaguguaauucu

SEQ ID NO: 1551011 - RNA, 19 nt, Artificial Sequence
  Description of Artificial Sequence: Synthetic oligonucleotide
  Antisense strand to SEQ ID NO: 1551010
agaauuacacuguacuuuc

SEQ ID NO: 1551012 - RNA, 19 nt, Artificial Sequence
  Description of Artificial Sequence: Synthetic oligonucleotide
  Sense strand starting at position 1130 of SEQ ID NO: 1245285
auccaaagguguccuaaga

SEQ ID NO: 1551013 - RNA, 19 nt, Artificial Sequence
  Description of Artificial Sequence: Synthetic oligonucleotide
  Antisense strand to SEQ ID NO: 1551012
ucuuaggacaccuuuggau

SEQ ID NO: 1551014 - RNA, 19 nt, Artificial Sequence
  Description of Artificial Sequence: Synthetic oligonucleotide
  Sense strand starting at position 1260 of SEQ ID NO: 1245285
cagucaacccuuuggaaga

SEQ ID NO: 1551015 - RNA, 19 nt, Artificial Sequence
  Description of Artificial Sequence: Synthetic oligonucleotide
  Antisense strand to SEQ ID NO: 1551014
ucuuccaaaggguugacug

SEQ ID NO: 1551016 - RNA, 19 nt, Artificial Sequence
  Description of Artificial Sequence: Synthetic oligonucleotide
  Sense strand starting at position 1448 of SEQ ID NO: 1245285
cgggcuaugacccacuuua

SEQ ID NO: 1551017 - RNA, 19 nt, Artificial Sequence
  Description of Artificial Sequence: Synthetic oligonucleotide
  Antisense strand to SEQ ID NO: 1551016
uaaagugggucauagcccg

SEQ ID NO: 1551018 - RNA, 19 nt, Artificial Sequence
  Description of Artificial Sequence: Synthetic oligonucleotide
  Sense strand starting at position 1963 of SEQ ID NO: 1245285
agauucguagccgaagaaa

SEQ ID NO: 1551019 - RNA, 19 nt, Artificial Sequence
  Description of Artificial Sequence: Synthetic oligonucleotide
  Antisense strand to SEQ ID NO: 1551018
uuucuucggcuacgaaucu

SEQ ID NO: 1551020 - RNA, 19 nt, Artificial Sequence
  Description of Artificial Sequence: Synthetic oligonucleotide
  Sense strand starting at position 2051 of SEQ ID NO: 1245285
cgaauugccuacuuaggga

SEQ ID NO: 1551021 - RNA, 19 nt, Artificial Sequence
  Description of Artificial Sequence: Synthetic oligonucleotide
  Antisense strand to SEQ ID NO: 1551020
ucccuaaguaggcaauucg

SEQ ID NO: 1551022 - RNA, 19 nt, Artificial Sequence
  Description of Artificial Sequence: Synthetic oligonucleotide
  Sense strand starting at position 2155 of SEQ ID NO: 1245285
aggacaggcuacguauuau

SEQ ID NO: 1551023 - RNA, 19 nt, Artificial Sequence
  Description of Artificial Sequence: Synthetic oligonucleotide
  Antisense strand to SEQ ID NO: 1551022
auaauacguagccuguccu

SEQ ID NO: 1551024 - RNA, 19 nt, Artificial Sequence
  Description of Artificial Sequence: Synthetic oligonucleotide
  Sense strand starting at position 2196 of SEQ ID NO: 1245285
uuuauucgucaacauuagu

SEQ ID NO: 1551025 - RNA, 19 nt, Artificial Sequence
  Description of Artificial Sequence: Synthetic oligonucleotide
  Antisense strand to SEQ ID NO: 1551024
acuaauguugacgaauaaa

SEQ ID NO: 1551026 - RNA, 19 nt, Artificial Sequence
  Description of Artificial Sequence: Synthetic oligonucleotide
  Sense strand starting at position 2203 of SEQ ID NO: 1245285
gucaacauuaguuagguuu

SEQ ID NO: 1551027 - RNA, 19 nt, Artificial Sequence
  Description of Artificial Sequence: Synthetic oligonucleotide
  Antisense strand to SEQ ID NO: 1551026
aaaccuaacuaauguugac

SEQ ID NO: 1551028 - RNA, 19 nt, Artificial Sequence
  Description of Artificial Sequence: Synthetic oligonucleotide
  Sense strand starting at position 2206 of SEQ ID NO: 1245285
aacauuaguuagguuugau

SEQ ID NO: 1551029 - RNA, 19 nt, Artificial Sequence
  Description of Artificial Sequence: Synthetic oligonucleotide
  Antisense strand to SEQ ID NO: 1551028
aucaaaccuaacuaauguu

SEQ ID NO: 1551030 - RNA, 19 nt, Artificial Sequence
  Description of Artificial Sequence: Synthetic oligonucleotide
  Sense strand starting at position 2232 of SEQ ID NO: 1245285
cccuguacuccugaaagug

SEQ ID NO: 1551031 - RNA, 19 nt, Artificial Sequence
  Description of Artificial Sequence: Synthetic oligonucleotide
  Antisense strand to SEQ ID NO: 1551030
cacuuucaggaguacaggg

SEQ ID NO: 1551032 - RNA, 19 nt, Artificial Sequence
  Description of Artificial Sequence: Synthetic oligonucleotide
  Sense strand starting at position 2240 of SEQ ID NO: 1245285
uccugaaagugguuuguaa

SEQ ID NO: 1551033 - RNA, 19 nt, Artificial Sequence
  Description of Artificial Sequence: Synthetic oligonucleotide
  Antisense strand to SEQ ID NO: 1551032
uuacaaaccacuuucagga

SEQ ID NO: 1551034 - RNA, 19 nt, Artificial Sequence
  Description of Artificial Sequence: Synthetic oligonucleotide
  Sense strand starting at position 2242 of SEQ ID NO: 1245285
cugaaagugguuuguaaau

SEQ ID NO: 1551035 - RNA, 19 nt, Artificial Sequence
  Description of Artificial Sequence: Synthetic oligonucleotide
  Antisense strand to SEQ ID NO: 1551034
auuuacaaaccacuuucag

SEQ ID NO: 1551036 - RNA, 19 nt, Artificial Sequence
  Description of Artificial Sequence: Synthetic oligonucleotide
  Sense strand starting at position 2252 of SEQ ID NO: 1245285
uuuguaaauggccaauuaa

SEQ ID NO: 1551037 - RNA, 19 nt, Artificial Sequence
  Description of Artificial Sequence: Synthetic oligonucleotide
  Antisense strand to SEQ ID NO: 1551036
uuaauuggccauuuacaaa

SEQ ID NO: 1551038 - RNA, 19 nt, Artificial Sequence
  Description of Artificial Sequence: Synthetic oligonucleotide
  Sense strand starting at position 2283 of SEQ ID NO: 1245285
augagacguaauuauggua

SEQ ID NO: 1551039 - RNA, 19 nt, Artificial Sequence
  Description of Artificial Sequence: Synthetic oligonucleotide
  Antisense strand to SEQ ID NO: 1551038
uaccauaauuacgucucau

SEQ ID NO: 1551040 - RNA, 19 nt, Artificial Sequence
  Description of Artificial Sequence: Synthetic oligonucleotide
  Sense strand starting at position 2319 of SEQ ID NO: 1245285
augggaaugucauccaauc

SEQ ID NO: 1551041 - RNA, 19 nt, Artificial Sequence
  Description of Artificial Sequence: Synthetic oligonucleotide
  Antisense strand to SEQ ID NO: 1551040
gauuggaugacauucccau

SEQ ID NO: 1551042 - RNA, 19 nt, Artificial Sequence
  Description of Artificial Sequence: Synthetic oligonucleotide
  Sense strand starting at position 2484 of SEQ ID NO: 1245285
ugguuauucccucauaguc

SEQ ID NO: 1551043 - RNA, 19 nt, Artificial Sequence
  Description of Artificial Sequence: Synthetic oligonucleotide
  Antisense strand to SEQ ID NO: 1551042
gacuaugagggaauaacca

SEQ ID NO: 1551044 - RNA, 19 nt, Artificial Sequence
  Description of Artificial Sequence: Synthetic oligonucleotide
  Sense strand starting at position 2560 of SEQ ID NO: 1245285
gcucaaacucuaggagagu

SEQ ID NO: 1551045 - RNA, 19 nt, Artificial Sequence
  Description of Artificial Sequence: Synthetic oligonucleotide
  Antisense strand to SEQ ID NO: 1551044
acucuccuagaguuugagc

SEQ ID NO: 1551046 - RNA, 19 nt, Artificial Sequence
  Description of Artificial Sequence: Synthetic oligonucleotide
  Sense strand starting at position 2605 of SEQ ID NO: 1245285
ccuugaccucaguguagga

SEQ ID NO: 1551047 - RNA, 19 nt, Artificial Sequence
  Description of Artificial Sequence: Synthetic oligonucleotide
  Antisense strand to SEQ ID NO: 1551046
uccuacacugaggucaagg

SEQ ID NO: 1551048 - RNA, 19 nt, Artificial Sequence
  Description of Artificial Sequence: Synthetic oligonucleotide
  Sense strand starting at position 2773 of SEQ ID NO: 1245285
gagcuagacccugauagca

SEQ ID NO: 1551049 - RNA, 19 nt, Artificial Sequence
  Description of Artificial Sequence: Synthetic oligonucleotide
  Antisense strand to SEQ ID NO: 1551048
ugcuaucagggucuagcuc

SEQ ID NO: 1551050 - RNA, 19 nt, Artificial Sequence
  Description of Artificial Sequence: Synthetic oligonucleotide
  Sense strand starting at position 2789 of SEQ ID NO: 1245285
gcaaacuacucccuggaca

SEQ ID NO: 1551051 - RNA, 19 nt, Artificial Sequence
  Description of Artificial Sequence: Synthetic oligonucleotide
  Antisense strand to SEQ ID NO: 1551050
uguccagggaguaguuugc

SEQ ID NO: 1551052 - RNA, 19 nt, Artificial Sequence
  Description of Artificial Sequence: Synthetic oligonucleotide
  Sense strand starting at position 3269 of SEQ ID NO: 1245285
acuagauucuaggcaguau

SEQ ID NO: 1551053 - RNA, 19 nt, Artificial Sequence
  Description of Artificial Sequence: Synthetic oligonucleotide
  Antisense strand to SEQ ID NO: 1551052
auacugccuagaaucuagu

SEQ ID NO: 1551054 - RNA, 19 nt, Artificial Sequence
  Description of Artificial Sequence: Synthetic oligonucleotide
  Sense strand starting at position 3360 of SEQ ID NO: 1245285
gcugcuacaaugugaagaa

SEQ ID NO: 1551055 - RNA, 19 nt, Artificial Sequence
  Description of Artificial Sequence: Synthetic oligonucleotide
  Antisense strand to SEQ ID NO: 1551054
uucuucacauuguagcagc

SEQ ID NO: 1551056 - RNA, 19 nt, Artificial Sequence
  Description of Artificial Sequence: Synthetic oligonucleotide
  Sense strand starting at position 3445 of SEQ ID NO: 1245285
ggcagccuucuguaaccaa

SEQ ID NO: 1551057 - RNA, 19 nt, Artificial Sequence
  Description of Artificial Sequence: Synthetic oligonucleotide
  Antisense strand to SEQ ID NO: 1551056
uugguuacagaaggcugcc

SEQ ID NO: 1551058 - RNA, 19 nt, Artificial Sequence
  Description of Artificial Sequence: Synthetic oligonucleotide
  Sense strand starting at position 78 of SEQ ID NO: 1245286
cauugcuuggccugaaaga

SEQ ID NO: 1551059 - RNA, 19 nt, Artificial Sequence
  Description of Artificial Sequence: Synthetic oligonucleotide
  Antisense strand to SEQ ID NO: 1551058
ucuuucaggccaagcaaug

SEQ ID NO: 1551060 - RNA, 19 nt, Artificial Sequence
  Description of Artificial Sequence: Synthetic oligonucleotide
  Sense strand starting at position 79 of SEQ ID NO: 1245286
auugcuuggccugaaagaa

SEQ ID NO: 1551061 - RNA, 19 nt, Artificial Sequence
  Description of Artificial Sequence: Synthetic oligonucleotide
  Antisense strand to SEQ ID NO: 1551060
uucuuucaggccaagcaau

SEQ ID NO: 1551062 - RNA, 19 nt, Artificial Sequence
  Description of Artificial Sequence: Synthetic oligonucleotide
  Sense strand starting at position 169 of SEQ ID NO: 1245286
gguuucuuaggauaugguu

SEQ ID NO: 1551063 - RNA, 19 nt, Artificial Sequence
  Description of Artificial Sequence: Synthetic oligonucleotide
  Antisense strand to SEQ ID NO: 1551062
aaccauauccuaagaaacc

SEQ ID NO: 1551064 - RNA, 19 nt, Artificial Sequence
  Description of Artificial Sequence: Synthetic oligonucleotide
  Sense strand starting at position 457 of SEQ ID NO: 1245286
gaguguucuaaguaugaag

SEQ ID NO: 1551065 - RNA, 19 nt, Artificial Sequence
  Description of Artificial Sequence: Synthetic oligonucleotide
  Antisense strand to SEQ ID NO: 1551064
cuucauacuuagaacacuc

SEQ ID NO: 1551066 - RNA, 19 nt, Artificial Sequence
  Description of Artificial Sequence: Synthetic oligonucleotide
  Sense strand starting at position 459 of SEQ ID NO: 1245286
guguucuaaguaugaagaa

SEQ ID NO: 1551067 - RNA, 19 nt, Artificial Sequence
  Description of Artificial Sequence: Synthetic oligonucleotide
  Antisense strand to SEQ ID NO: 1551066
uucuucauacuuagaacac

SEQ ID NO: 1551068 - RNA, 19 nt, Artificial Sequence
  Description of Artificial Sequence: Synthetic oligonucleotide
  Sense strand starting at position 471 of SEQ ID NO: 1245286
ugaagaauaaaguguuggu

SEQ ID NO: 1551069 - RNA, 19 nt, Artificial Sequence
  Description of Artificial Sequence: Synthetic oligonucleotide
  Antisense strand to SEQ ID NO: 1551068
accaacacuuuauucuuca

SEQ ID NO: 1551070 - RNA, 19 nt, Artificial Sequence
  Description of Artificial Sequence: Synthetic oligonucleotide
  Sense strand starting at position 475 of SEQ ID NO: 1245286
gaauaaaguguugguuaac

SEQ ID NO: 1551071 - RNA, 19 nt, Artificial Sequence
  Description of Artificial Sequence: Synthetic oligonucleotide
  Antisense strand to SEQ ID NO: 1551070
guuaaccaacacuuuauuc

SEQ ID NO: 1551072 - RNA, 19 nt, Artificial Sequence
  Description of Artificial Sequence: Synthetic oligonucleotide
  Sense strand starting at position 476 of SEQ ID NO: 1245286
aauaaaguguugguuaacu

SEQ ID NO: 1551073 - RNA, 19 nt, Artificial Sequence
  Description of Artificial Sequence: Synthetic oligonucleotide
  Antisense strand to SEQ ID NO: 1551072
aguuaaccaacacuuuauu

SEQ ID NO: 1551074 - RNA, 19 nt, Artificial Sequence
  Description of Artificial Sequence: Synthetic oligonucleotide
  Sense strand starting at position 478 of SEQ ID NO: 1245286
uaaaguguugguuaacuag

SEQ ID NO: 1551075 - RNA, 19 nt, Artificial Sequence
  Description of Artificial Sequence: Synthetic oligonucleotide
  Antisense strand to SEQ ID NO: 1551074
cuaguuaaccaacacuuua

SEQ ID NO: 1551076 - RNA, 19 nt, Artificial Sequence
  Description of Artificial Sequence: Synthetic oligonucleotide
  Sense strand starting at position 487 of SEQ ID NO: 1245286
gguuaacuagaucaaagcu

SEQ ID NO: 1551077 - RNA, 19 nt, Artificial Sequence
  Description of Artificial Sequence: Synthetic oligonucleotide
  Antisense strand to SEQ ID NO: 1551076
agcuuugaucuaguuaacc

SEQ ID NO: 1551078 - RNA, 19 nt, Artificial Sequence
  Description of Artificial Sequence: Synthetic oligonucleotide
  Sense strand starting at position 552 of SEQ ID NO: 1245286
aaugucgaguuauuucuau

SEQ ID NO: 1551079 - RNA, 19 nt, Artificial Sequence
  Description of Artificial Sequence: Synthetic oligonucleotide
  Antisense strand to SEQ ID NO: 1551078
auagaaauaacucgacauu

SEQ ID NO: 1551080 - RNA, 19 nt, Artificial Sequence
  Description of Artificial Sequence: Synthetic oligonucleotide
  Sense strand starting at position 612 of SEQ ID NO: 1245286
ccagguaaacuucguugaa

SEQ ID NO: 1551081 - RNA, 19 nt, Artificial Sequence
  Description of Artificial Sequence: Synthetic oligonucleotide
  Antisense strand to SEQ ID NO: 1551080
uucaacgaaguuuaccugg

SEQ ID NO: 1551082 - RNA, 19 nt, Artificial Sequence
  Description of Artificial Sequence: Synthetic oligonucleotide
  Sense strand starting at position 613 of SEQ ID NO: 1245286
cagguaaacuucguugaag

SEQ ID NO: 1551083 - RNA, 19 nt, Artificial Sequence
  Description of Artificial Sequence: Synthetic oligonucleotide
  Antisense strand to SEQ ID NO: 1551082
cuucaacgaaguuuaccug

SEQ ID NO: 1551084 - RNA, 19 nt, Artificial Sequence
  Description of Artificial Sequence: Synthetic oligonucleotide
  Sense strand starting at position 621 of SEQ ID NO: 1245286
cuucguugaagcuagagaa

SEQ ID NO: 1551085 - RNA, 19 nt, Artificial Sequence
  Description of Artificial Sequence: Synthetic oligonucleotide
  Antisense strand to SEQ ID NO: 1551084
uucucuagcuucaacgaag

SEQ ID NO: 1551086 - RNA, 19 nt, Artificial Sequence
  Description of Artificial Sequence: Synthetic oligonucleotide
  Sense strand starting at position 926 of SEQ ID NO: 1245286
cuaugaaucgcauaccuua

SEQ ID NO: 1551087 - RNA, 19 nt, Artificial Sequence
  Description of Artificial Sequence: Synthetic oligonucleotide
  Antisense strand to SEQ ID NO: 1551086
uaagguaugcgauucauag

SEQ ID NO: 1551088 - RNA, 19 nt, Artificial Sequence
  Description of Artificial Sequence: Synthetic oligonucleotide
  Sense strand starting at position 968 of SEQ ID NO: 1245286
ucuugauuugcaugcuaga

SEQ ID NO: 1551089 - RNA, 19 nt, Artificial Sequence
  Description of Artificial Sequence: Synthetic oligonucleotide
  Antisense strand to SEQ ID NO: 1551088
ucuagcaugcaaaucaaga

SEQ ID NO: 1551090 - RNA, 19 nt, Artificial Sequence
  Description of Artificial Sequence: Synthetic oligonucleotide
  Sense strand starting at position 1125 of SEQ ID NO: 1245286
aggaaaguacaguguaauu

SEQ ID NO: 1551091 - RNA, 19 nt, Artificial Sequence
  Description of Artificial Sequence: Synthetic oligonucleotide
  Antisense strand to SEQ ID NO: 1551090
aauuacacuguacuuuccu

SEQ ID NO: 1551092 - RNA, 19 nt, Artificial Sequence
  Description of Artificial Sequence: Synthetic oligonucleotide
  Sense strand starting at position 1127 of SEQ ID NO: 1245286
gaaaguacaguguaauucu

SEQ ID NO: 1551093 - RNA, 19 nt, Artificial Sequence
  Description of Artificial Sequence: Synthetic oligonucleotide
  Antisense strand to SEQ ID NO: 1551092
agaauuacacuguacuuuc

SEQ ID NO: 1551094 - RNA, 19 nt, Artificial Sequence
  Description of Artificial Sequence: Synthetic oligonucleotide
  Sense strand starting at position 1231 of SEQ ID NO: 1245286
auccaaagguguccuaaga

SEQ ID NO: 1551095 - RNA, 19 nt, Artificial Sequence
  Description of Artificial Sequence: Synthetic oligonucleotide
  Antisense strand to SEQ ID NO: 1551094
ucuuaggacaccuuuggau

SEQ ID NO: 1551096 - RNA, 19 nt, Artificial Sequence
  Description of Artificial Sequence: Synthetic oligonucleotide
  Sense strand starting at position 1361 of SEQ ID NO: 1245286
cagucaacccuuuggaaga

SEQ ID NO: 1551097 - RNA, 19 nt, Artificial Sequence
  Description of Artificial Sequence: Synthetic oligonucleotide
  Antisense strand to SEQ ID NO: 1551096
ucuuccaaaggguugacug

SEQ ID NO: 1551098 - RNA, 19 nt, Artificial Sequence
  Description of Artificial Sequence: Synthetic oligonucleotide
  Sense strand starting at position 1549 of SEQ ID NO: 1245286
cgggcuaugacccacuuua

SEQ ID NO: 1551099 - RNA, 19 nt, Artificial Sequence
  Description of Artificial Sequence: Synthetic oligonucleotide
  Antisense strand to SEQ ID NO: 1551098
uaaagugggucauagcccg

SEQ ID NO: 1551100 - RNA, 19 nt, Artificial Sequence
  Description of Artificial Sequence: Synthetic oligonucleotide
  Sense strand starting at position 2064 of SEQ ID NO: 1245286
agauucguagccgaagaaa

SEQ ID NO: 1551101 - RNA, 19 nt, Artificial Sequence
  Description of Artificial Sequence: Synthetic oligonucleotide
  Antisense strand to SEQ ID NO: 1551100
uuucuucggcuacgaaucu

SEQ ID NO: 1551102 - RNA, 19 nt, Artificial Sequence
  Description of Artificial Sequence: Synthetic oligonucleotide
  Sense strand starting at position 2152 of SEQ ID NO: 1245286
cgaauugccuacuuaggga

SEQ ID NO: 1551103 - RNA, 19 nt, Artificial Sequence
  Description of Artificial Sequence: Synthetic oligonucleotide
  Antisense strand to SEQ ID NO: 1551102
ucccuaaguaggcaauucg

SEQ ID NO: 1551104 - RNA, 19 nt, Artificial Sequence
  Description of Artificial Sequence: Synthetic oligonucleotide
  Sense strand starting at position 2256 of SEQ ID NO: 1245286
aggacaggcuacguauuau

SEQ ID NO: 1551105 - RNA, 19 nt, Artificial Sequence
  Description of Artificial Sequence: Synthetic oligonucleotide
  Antisense strand to SEQ ID NO: 1551104
auaauacguagccuguccu

SEQ ID NO: 1551106 - RNA, 19 nt, Artificial Sequence
  Description of Artificial Sequence: Synthetic oligonucleotide
  Sense strand starting at position 2297 of SEQ ID NO: 1245286
uuuauucgucaacauuagu

SEQ ID NO: 1551107 - RNA, 19 nt, Artificial Sequence
  Description of Artificial Sequence: Synthetic oligonucleotide
  Antisense strand to SEQ ID NO: 1551106
acuaauguugacgaauaaa

SEQ ID NO: 1551108 - RNA, 19 nt, Artificial Sequence
  Description of Artificial Sequence: Synthetic oligonucleotide
  Sense strand starting at position 2304 of SEQ ID NO: 1245286
gucaacauuaguuagguuu

SEQ ID NO: 1551109 - RNA, 19 nt, Artificial Sequence
  Description of Artificial Sequence: Synthetic oligonucleotide
  Antisense strand to SEQ ID NO: 1551108
aaaccuaacuaauguugac

SEQ ID NO: 1551110 - RNA, 19 nt, Artificial Sequence
  Description of Artificial Sequence: Synthetic oligonucleotide
  Sense strand starting at position 2307 of SEQ ID NO: 1245286
aacauuaguuagguuugau

SEQ ID NO: 1551111 - RNA, 19 nt, Artificial Sequence
  Description of Artificial Sequence: Synthetic oligonucleotide
  Antisense strand to SEQ ID NO: 1551110
aucaaaccuaacuaauguu

SEQ ID NO: 1551112 - RNA, 19 nt, Artificial Sequence
  Description of Artificial Sequence: Synthetic oligonucleotide
  Sense strand starting at position 2333 of SEQ ID NO: 1245286
cccuguacuccugaaagug

SEQ ID NO: 1551113 - RNA, 19 nt, Artificial Sequence
  Description of Artificial Sequence: Synthetic oligonucleotide
  Antisense strand to SEQ ID NO: 1551112
cacuuucaggaguacaggg

SEQ ID NO: 1551114 - RNA, 19 nt, Artificial Sequence
  Description of Artificial Sequence: Synthetic oligonucleotide
  Sense strand starting at position 2343 of SEQ ID NO: 1245286
cugaaagugguuuguaaau

SEQ ID NO: 1551115 - RNA, 19 nt, Artificial Sequence
  Description of Artificial Sequence: Synthetic oligonucleotide
  Antisense strand to SEQ ID NO: 1551114
auuuacaaaccacuuucag

SEQ ID NO: 1551116 - RNA, 19 nt, Artificial Sequence
  Description of Artificial Sequence: Synthetic oligonucleotide
  Sense strand starting at position 2353 of SEQ ID NO: 1245286
uuuguaaauggccaauuaa

SEQ ID NO: 1551117 - RNA, 19 nt, Artificial Sequence
  Description of Artificial Sequence: Synthetic oligonucleotide
  Antisense strand to SEQ ID NO: 1551116
uuaauuggccauuuacaaa

SEQ ID NO: 1551118 - RNA, 19 nt, Artificial Sequence
  Description of Artificial Sequence: Synthetic oligonucleotide
  Sense strand starting at position 2384 of SEQ ID NO: 1245286
augagacguaauuauggua

SEQ ID NO: 1551119 - RNA, 19 nt, Artificial Sequence
  Description of Artificial Sequence: Synthetic oligonucleotide
  Antisense strand to SEQ ID NO: 1551118
uaccauaauuacgucucau

SEQ ID NO: 1551120 - RNA, 19 nt, Artificial Sequence
  Description of Artificial Sequence: Synthetic oligonucleotide
  Sense strand starting at position 2420 of SEQ ID NO: 1245286
augggaaugucauccaauc

SEQ ID NO: 1551121 - RNA, 19 nt, Artificial Sequence
  Description of Artificial Sequence: Synthetic oligonucleotide
  Antisense strand to SEQ ID NO: 1551120
gauuggaugacauucccau

SEQ ID NO: 1551122 - RNA, 19 nt, Artificial Sequence
  Description of Artificial Sequence: Synthetic oligonucleotide
  Sense strand starting at position 2585 of SEQ ID NO: 1245286
ugguuauucccucauaguc

SEQ ID NO: 1551123 - RNA, 19 nt, Artificial Sequence
  Description of Artificial Sequence: Synthetic oligonucleotide
  Antisense strand to SEQ ID NO: 1551122
gacuaugagggaauaacca

SEQ ID NO: 1551124 - RNA, 19 nt, Artificial Sequence
  Description of Artificial Sequence: Synthetic oligonucleotide
  Sense strand starting at position 2661 of SEQ ID NO: 1245286
gcucaaacucuaggagagu

SEQ ID NO: 1551125 - RNA, 19 nt, Artificial Sequence
  Description of Artificial Sequence: Synthetic oligonucleotide
  Antisense strand to SEQ ID NO: 1551124
acucuccuagaguuugagc

SEQ ID NO: 1551126 - RNA, 19 nt, Artificial Sequence
  Description of Artificial Sequence: Synthetic oligonucleotide
  Sense strand starting at position 2706 of SEQ ID NO: 1245286
ccuugaccucaguguagga

SEQ ID NO: 1551127 - RNA, 19 nt, Artificial Sequence
  Description of Artificial Sequence: Synthetic oligonucleotide
  Antisense strand to SEQ ID NO: 1551126
uccuacacugaggucaagg

SEQ ID NO: 1551128 - RNA, 19 nt, Artificial Sequence
  Description of Artificial Sequence: Synthetic oligonucleotide
  Sense strand starting at position 2874 of SEQ ID NO: 1245286
gagcuagacccugauagca

SEQ ID NO: 1551129 - RNA, 19 nt, Artificial Sequence
  Description of Artificial Sequence: Synthetic oligonucleotide
  Antisense strand to SEQ ID NO: 1551128
ugcuaucagggucuagcuc

SEQ ID NO: 1551130 - RNA, 19 nt, Artificial Sequence
  Description of Artificial Sequence: Synthetic oligonucleotide
  Sense strand starting at position 2890 of SEQ ID NO: 1245286
gcaaacuacucccuggaca

SEQ ID NO: 1551131 - RNA, 19 nt, Artificial Sequence
  Description of Artificial Sequence: Synthetic oligonucleotide
  Antisense strand to SEQ ID NO: 1551130
uguccagggaguaguuugc

SEQ ID NO: 1551132 - RNA, 19 nt, Artificial Sequence
  Description of Artificial Sequence: Synthetic oligonucleotide
  Sense strand starting at position 3370 of SEQ ID NO: 1245286
acuagauucuaggcaguau

SEQ ID NO: 1551133 - RNA, 19 nt, Artificial Sequence
  Description of Artificial Sequence: Synthetic oligonucleotide
  Antisense strand to SEQ ID NO: 1551132
auacugccuagaaucuagu

SEQ ID NO: 1551134 - RNA, 19 nt, Artificial Sequence
  Description of Artificial Sequence: Synthetic oligonucleotide
  Sense strand starting at position 3461 of SEQ ID NO: 1245286
gcugcuacaaugugaagaa

SEQ ID NO: 1551135 - RNA, 19 nt, Artificial Sequence
  Description of Artificial Sequence: Synthetic oligonucleotide
  Antisense strand to SEQ ID NO: 1551134
uucuucacauuguagcagc

SEQ ID NO: 1551136 - RNA, 19 nt, Artificial Sequence
  Description of Artificial Sequence: Synthetic oligonucleotide
  Sense strand starting at position 3546 of SEQ ID NO: 1245286
ggcagccuucuguaaccaa

SEQ ID NO: 1551137 - RNA, 19 nt, Artificial Sequence
  Description of Artificial Sequence: Synthetic oligonucleotide
  Antisense strand to SEQ ID NO: 1551136
uugguuacagaaggcugcc

SEQ ID NO: 1551138 - RNA, 19 nt, Artificial Sequence
  Description of Artificial Sequence: Synthetic oligonucleotide
  Sense strand starting at position 64 of SEQ ID NO: 1245287
agaguccugccucaaugaa

SEQ ID NO: 1551139 - RNA, 19 nt, Artificial Sequence
  Description of Artificial Sequence: Synthetic oligonucleotide
  Antisense strand to SEQ ID NO: 1551138
uucauugaggcaggacucu

SEQ ID NO: 1551140 - RNA, 19 nt, Artificial Sequence
  Description of Artificial Sequence: Synthetic oligonucleotide
  Sense strand starting at position 261 of SEQ ID NO: 1245287
auucgaagucuugaugaua

SEQ ID NO: 1551141 - RNA, 19 nt, Artificial Sequence
  Description of Artificial Sequence: Synthetic oligonucleotide
  Antisense strand to SEQ ID NO: 1551140
uaucaucaagacuucgaau

SEQ ID NO: 1551142 - RNA, 19 nt, Artificial Sequence
  Description of Artificial Sequence: Synthetic oligonucleotide
  Sense strand starting at position 361 of SEQ ID NO: 1245287
aaaggcuaauggguaauau

SEQ ID NO: 1551143 - RNA, 19 nt, Artificial Sequence
  Description of Artificial Sequence: Synthetic oligonucleotide
  Antisense strand to SEQ ID NO: 1551142
auauuacccauuagccuuu

SEQ ID NO: 1551144 - RNA, 19 nt, Artificial Sequence
  Description of Artificial Sequence: Synthetic oligonucleotide
  Sense strand starting at position 405 of SEQ ID NO: 1245287
ucaacacaaguuugucauu

SEQ ID NO: 1551145 - RNA, 19 nt, Artificial Sequence
  Description of Artificial Sequence: Synthetic oligonucleotide
  Antisense strand to SEQ ID NO: 1551144
aaugacaaacuuguguuga

SEQ ID NO: 1551146 - RNA, 19 nt, Artificial Sequence
  Description of Artificial Sequence: Synthetic oligonucleotide
  Sense strand starting at position 546 of SEQ ID NO: 1245287
cuaccaaagguguauguca

SEQ ID NO: 1551147 - RNA, 19 nt, Artificial Sequence
  Description of Artificial Sequence: Synthetic oligonucleotide
  Antisense strand to SEQ ID NO: 1551146
ugacauacaccuuugguag

SEQ ID NO: 1551148 - RNA, 19 nt, Artificial Sequence
  Description of Artificial Sequence: Synthetic oligonucleotide
  Sense strand starting at position 548 of SEQ ID NO: 1245287
accaaagguguaugucaca

SEQ ID NO: 1551149 - RNA, 19 nt, Artificial Sequence
  Description of Artificial Sequence: Synthetic oligonucleotide
  Antisense strand to SEQ ID NO: 1551148
ugugacauacaccuuuggu

SEQ ID NO: 1551150 - RNA, 19 nt, Artificial Sequence
  Description of Artificial Sequence: Synthetic oligonucleotide
  Sense strand starting at position 633 of SEQ ID NO: 1245287
aaguguuaggcuuaaagag

SEQ ID NO: 1551151 - RNA, 19 nt, Artificial Sequence
  Description of Artificial Sequence: Synthetic oligonucleotide
  Antisense strand to SEQ ID NO: 1551150
cucuuuaagccuaacacuu

SEQ ID NO: 1551152 - RNA, 19 nt, Artificial Sequence
  Description of Artificial Sequence: Synthetic oligonucleotide
  Sense strand starting at position 959 of SEQ ID NO: 1245287
auugcuuggccugaaagaa

SEQ ID NO: 1551153 - RNA, 19 nt, Artificial Sequence
  Description of Artificial Sequence: Synthetic oligonucleotide
  Antisense strand to SEQ ID NO: 1551152
uucuuucaggccaagcaau

SEQ ID NO: 1551154 - RNA, 19 nt, Artificial Sequence
  Description of Artificial Sequence: Synthetic oligonucleotide
  Sense strand starting at position 1049 of SEQ ID NO: 1245287
gguuucuuaggauaugguu

SEQ ID NO: 1551155 - RNA, 19 nt, Artificial Sequence
  Description of Artificial Sequence: Synthetic oligonucleotide
  Antisense strand to SEQ ID NO: 1551154
aaccauauccuaagaaacc

SEQ ID NO: 1551156 - RNA, 19 nt, Artificial Sequence
  Description of Artificial Sequence: Synthetic oligonucleotide
  Sense strand starting at position 1337 of SEQ ID NO: 1245287
gaguguucuaaguaugaag

SEQ ID NO: 1551157 - RNA, 19 nt, Artificial Sequence
  Description of Artificial Sequence: Synthetic oligonucleotide
  Antisense strand to SEQ ID NO: 1551156
cuucauacuuagaacacuc

SEQ ID NO: 1551158 - RNA, 19 nt, Artificial Sequence
  Description of Artificial Sequence: Synthetic oligonucleotide
  Sense strand starting at position 1339 of SEQ ID NO: 1245287
guguucuaaguaugaagaa

SEQ ID NO: 1551159 - RNA, 19 nt, Artificial Sequence
  Description of Artificial Sequence: Synthetic oligonucleotide
  Antisense strand to SEQ ID NO: 1551158
uucuucauacuuagaacac

SEQ ID NO: 1551160 - RNA, 19 nt, Artificial Sequence
  Description of Artificial Sequence: Synthetic oligonucleotide
  Sense strand starting at position 1351 of SEQ ID NO: 1245287
ugaagaauaaaguguuggu

SEQ ID NO: 1551161 - RNA, 19 nt, Artificial Sequence
  Description of Artificial Sequence: Synthetic oligonucleotide
  Antisense strand to SEQ ID NO: 1551160
accaacacuuuauucuuca

SEQ ID NO: 1551162 - RNA, 19 nt, Artificial Sequence
  Description of Artificial Sequence: Synthetic oligonucleotide
  Sense strand starting at position 1355 of SEQ ID NO: 1245287
gaauaaaguguugguuaac

SEQ ID NO: 1551163 - RNA, 19 nt, Artificial Sequence
  Description of Artificial Sequence: Synthetic oligonucleotide
  Antisense strand to SEQ ID NO: 1551162
guuaaccaacacuuuauuc

SEQ ID NO: 1551164 - RNA, 19 nt, Artificial Sequence
  Description of Artificial Sequence: Synthetic oligonucleotide
  Sense strand starting at position 1356 of SEQ ID NO: 1245287
aauaaaguguugguuaacu

SEQ ID NO: 1551165 - RNA, 19 nt, Artificial Sequence
  Description of Artificial Sequence: Synthetic oligonucleotide
  Antisense strand to SEQ ID NO: 1551164
aguuaaccaacacuuuauu

SEQ ID NO: 1551166 - RNA, 19 nt, Artificial Sequence
  Description of Artificial Sequence: Synthetic oligonucleotide
  Sense strand starting at position 1358 of SEQ ID NO: 1245287
uaaaguguugguuaacuag

SEQ ID NO: 1551167 - RNA, 19 nt, Artificial Sequence
  Description of Artificial Sequence: Synthetic oligonucleotide
  Antisense strand to SEQ ID NO: 1551166
cuaguuaaccaacacuuua

SEQ ID NO: 1551168 - RNA, 19 nt, Artificial Sequence
  Description of Artificial Sequence: Synthetic oligonucleotide
  Sense strand starting at position 1367 of SEQ ID NO: 1245287
gguuaacuagaucaaagcu

SEQ ID NO: 1551169 - RNA, 19 nt, Artificial Sequence
  Description of Artificial Sequence: Synthetic oligonucleotide
  Antisense strand to SEQ ID NO: 1551168
agcuuugaucuaguuaacc

SEQ ID NO: 1551170 - RNA, 19 nt, Artificial Sequence
  Description of Artificial Sequence: Synthetic oligonucleotide
  Sense strand starting at position 1432 of SEQ ID NO: 1245287
aaugucgaguuauuucuau

SEQ ID NO: 1551171 - RNA, 19 nt, Artificial Sequence
  Description of Artificial Sequence: Synthetic oligonucleotide
  Antisense strand to SEQ ID NO: 1551170
auagaaauaacucgacauu

SEQ ID NO: 1551172 - RNA, 19 nt, Artificial Sequence
  Description of Artificial Sequence: Synthetic oligonucleotide
  Sense strand starting at position 1493 of SEQ ID NO: 1245287
cagguaaacuucguugaag

SEQ ID NO: 1551173 - RNA, 19 nt, Artificial Sequence
  Description of Artificial Sequence: Synthetic oligonucleotide
  Antisense strand to SEQ ID NO: 1551172
cuucaacgaaguuuaccug

SEQ ID NO: 1551174 - RNA, 19 nt, Artificial Sequence
  Description of Artificial Sequence: Synthetic oligonucleotide
  Sense strand starting at position 1501 of SEQ ID NO: 1245287
cuucguugaagcuagagaa

SEQ ID NO: 1551175 - RNA, 19 nt, Artificial Sequence
  Description of Artificial Sequence: Synthetic oligonucleotide
  Antisense strand to SEQ ID NO: 1551174
uucucuagcuucaacgaag

SEQ ID NO: 1551176 - RNA, 19 nt, Artificial Sequence
  Description of Artificial Sequence: Synthetic oligonucleotide
  Sense strand starting at position 1806 of SEQ ID NO: 1245287
cuaugaaucgcauaccuua

SEQ ID NO: 1551177 - RNA, 19 nt, Artificial Sequence
  Description of Artificial Sequence: Synthetic oligonucleotide
  Antisense strand to SEQ ID NO: 1551176
uaagguaugcgauucauag

SEQ ID NO: 1551178 - RNA, 19 nt, Artificial Sequence
  Description of Artificial Sequence: Synthetic oligonucleotide
  Sense strand starting at position 1848 of SEQ ID NO: 1245287
ucuugauuugcaugcuaga

SEQ ID NO: 1551179 - RNA, 19 nt, Artificial Sequence
  Description of Artificial Sequence: Synthetic oligonucleotide
  Antisense strand to SEQ ID NO: 1551178
ucuagcaugcaaaucaaga

SEQ ID NO: 1551180 - RNA, 19 nt, Artificial Sequence
  Description of Artificial Sequence: Synthetic oligonucleotide
  Sense strand starting at position 2005 of SEQ ID NO: 1245287
aggaaaguacaguguaauu

SEQ ID NO: 1551181 - RNA, 19 nt, Artificial Sequence
  Description of Artificial Sequence: Synthetic oligonucleotide
  Antisense strand to SEQ ID NO: 1551180
aauuacacuguacuuuccu

SEQ ID NO: 1551182 - RNA, 19 nt, Artificial Sequence
  Description of Artificial Sequence: Synthetic oligonucleotide
  Sense strand starting at position 2007 of SEQ ID NO: 1245287
gaaaguacaguguaauucu

SEQ ID NO: 1551183 - RNA, 19 nt, Artificial Sequence
  Description of Artificial Sequence: Synthetic oligonucleotide
  Antisense strand to SEQ ID NO: 1551182
agaauuacacuguacuuuc

SEQ ID NO: 1551184 - RNA, 19 nt, Artificial Sequence
  Description of Artificial Sequence: Synthetic oligonucleotide
  Sense strand starting at position 2111 of SEQ ID NO: 1245287
auccaaagguguccuaaga

SEQ ID NO: 1551185 - RNA, 19 nt, Artificial Sequence
  Description of Artificial Sequence: Synthetic oligonucleotide
  Antisense strand to SEQ ID NO: 1551184
ucuuaggacaccuuuggau

SEQ ID NO: 1551186 - RNA, 19 nt, Artificial Sequence
  Description of Artificial Sequence: Synthetic oligonucleotide
  Sense strand starting at position 2241 of SEQ ID NO: 1245287
cagucaacccuuuggaaga

SEQ ID NO: 1551187 - RNA, 19 nt, Artificial Sequence
  Description of Artificial Sequence: Synthetic oligonucleotide
  Antisense strand to SEQ ID NO: 1551186
ucuuccaaaggguugacug

SEQ ID NO: 1551188 - RNA, 19 nt, Artificial Sequence
  Description of Artificial Sequence: Synthetic oligonucleotide
  Sense strand starting at position 2429 of SEQ ID NO: 1245287
cgggcuaugacccacuuua

SEQ ID NO: 1551189 - RNA, 19 nt, Artificial Sequence
  Description of Artificial Sequence: Synthetic oligonucleotide
  Antisense strand to SEQ ID NO: 1551188
uaaagugggucauagcccg

SEQ ID NO: 1551190 - RNA, 19 nt, Artificial Sequence
  Description of Artificial Sequence: Synthetic oligonucleotide
  Sense strand starting at position 2944 of SEQ ID NO: 1245287
agauucguagccgaagaaa

SEQ ID NO: 1551191 - RNA, 19 nt, Artificial Sequence
  Description of Artificial Sequence: Synthetic oligonucleotide
  Antisense strand to SEQ ID NO: 1551190
uuucuucggcuacgaaucu

SEQ ID NO: 1551192 - RNA, 19 nt, Artificial Sequence
  Description of Artificial Sequence: Synthetic oligonucleotide
  Sense strand starting at position 3032 of SEQ ID NO: 1245287
cgaauugccuacuuaggga

SEQ ID NO: 1551193 - RNA, 19 nt, Artificial Sequence
  Description of Artificial Sequence: Synthetic oligonucleotide
  Antisense strand to SEQ ID NO: 1551192
ucccuaaguaggcaauucg

SEQ ID NO: 1551194 - RNA, 19 nt, Artificial Sequence
  Description of Artificial Sequence: Synthetic oligonucleotide
  Sense strand starting at position 3184 of SEQ ID NO: 1245287
gucaacauuaguuagguuu

SEQ ID NO: 1551195 - RNA, 19 nt, Artificial Sequence
  Description of Artificial Sequence: Synthetic oligonucleotide
  Antisense strand to SEQ ID NO: 1551194
aaaccuaacuaauguugac

SEQ ID NO: 1551196 - RNA, 19 nt, Artificial Sequence
  Description of Artificial Sequence: Synthetic oligonucleotide
  Sense strand starting at position 3187 of SEQ ID NO: 1245287
aacauuaguuagguuugau

SEQ ID NO: 1551197 - RNA, 19 nt, Artificial Sequence
  Description of Artificial Sequence: Synthetic oligonucleotide
  Antisense strand to SEQ ID NO: 1551196
aucaaaccuaacuaauguu

SEQ ID NO: 1551198 - RNA, 19 nt, Artificial Sequence
  Description of Artificial Sequence: Synthetic oligonucleotide
  Sense strand starting at position 3213 of SEQ ID NO: 1245287
cccuguacuccugaaagug

SEQ ID NO: 1551199 - RNA, 19 nt, Artificial Sequence
  Description of Artificial Sequence: Synthetic oligonucleotide
  Antisense strand to SEQ ID NO: 1551198
cacuuucaggaguacaggg

SEQ ID NO: 1551200 - RNA, 19 nt, Artificial Sequence
  Description of Artificial Sequence: Synthetic oligonucleotide
  Sense strand starting at position 3223 of SEQ ID NO: 1245287
cugaaagugguuuguaaau

SEQ ID NO: 1551201 - RNA, 19 nt, Artificial Sequence
  Description of Artificial Sequence: Synthetic oligonucleotide
  Antisense strand to SEQ ID NO: 1551200
auuuacaaaccacuuucag

SEQ ID NO: 1551202 - RNA, 19 nt, Artificial Sequence
  Description of Artificial Sequence: Synthetic oligonucleotide
  Sense strand starting at position 3233 of SEQ ID NO: 1245287
uuuguaaauggccaauuaa

SEQ ID NO: 1551203 - RNA, 19 nt, Artificial Sequence
  Description of Artificial Sequence: Synthetic oligonucleotide
  Antisense strand to SEQ ID NO: 1551202
uuaauuggccauuuacaaa

SEQ ID NO: 1551204 - RNA, 19 nt, Artificial Sequence
  Description of Artificial Sequence: Synthetic oligonucleotide
  Sense strand starting at position 3264 of SEQ ID NO: 1245287
augagacguaauuauggua

SEQ ID NO: 1551205 - RNA, 19 nt, Artificial Sequence
  Description of Artificial Sequence: Synthetic oligonucleotide
  Antisense strand to SEQ ID NO: 1551204
uaccauaauuacgucucau

SEQ ID NO: 1551206 - RNA, 19 nt, Artificial Sequence
  Description of Artificial Sequence: Synthetic oligonucleotide
  Sense strand starting at position 3300 of SEQ ID NO: 1245287
augggaaugucauccaauc

SEQ ID NO: 1551207 - RNA, 19 nt, Artificial Sequence
  Description of Artificial Sequence: Synthetic oligonucleotide
  Antisense strand to SEQ ID NO: 1551206
gauuggaugacauucccau

SEQ ID NO: 1551208 - RNA, 19 nt, Artificial Sequence
  Description of Artificial Sequence: Synthetic oligonucleotide
  Sense strand starting at position 3465 of SEQ ID NO: 1245287
ugguuauucccucauaguc

SEQ ID NO: 1551209 - RNA, 19 nt, Artificial Sequence
  Description of Artificial Sequence: Synthetic oligonucleotide
  Antisense strand to SEQ ID NO: 1551208
gacuaugagggaauaacca

SEQ ID NO: 1551210 - RNA, 19 nt, Artificial Sequence
  Description of Artificial Sequence: Synthetic oligonucleotide
  Sense strand starting at position 3541 of SEQ ID NO: 1245287
gcucaaacucuaggagagu

SEQ ID NO: 1551211 - RNA, 19 nt, Artificial Sequence
  Description of Artificial Sequence: Synthetic oligonucleotide
  Antisense strand to SEQ ID NO: 1551210
acucuccuagaguuugagc

SEQ ID NO: 1551212 - RNA, 19 nt, Artificial Sequence
  Description of Artificial Sequence: Synthetic oligonucleotide
  Sense strand starting at position 3586 of SEQ ID NO: 1245287
ccuugaccucaguguagga

SEQ ID NO: 1551213 - RNA, 19 nt, Artificial Sequence
  Description of Artificial Sequence: Synthetic oligonucleotide
  Antisense strand to SEQ ID NO: 1551212
uccuacacugaggucaagg

SEQ ID NO: 1551214 - RNA, 19 nt, Artificial Sequence
  Description of Artificial Sequence: Synthetic oligonucleotide
  Sense strand starting at position 3754 of SEQ ID NO: 1245287
gagcuagacccugauagca

SEQ ID NO: 1551215 - RNA, 19 nt, Artificial Sequence
  Description of Artificial Sequence: Synthetic oligonucleotide
  Antisense strand to SEQ ID NO: 1551214
ugcuaucagggucuagcuc

SEQ ID NO: 1551216 - RNA, 19 nt, Artificial Sequence
  Description of Artificial Sequence: Synthetic oligonucleotide
  Sense strand starting at position 3770 of SEQ ID NO: 1245287
gcaaacuacucccuggaca

SEQ ID NO: 1551217 - RNA, 19 nt, Artificial Sequence
  Description of Artificial Sequence: Synthetic oligonucleotide
  Antisense strand to SEQ ID NO: 1551216
uguccagggaguaguuugc

SEQ ID NO: 1551218 - RNA, 19 nt, Artificial Sequence
  Description of Artificial Sequence: Synthetic oligonucleotide
  Sense strand starting at position 68 of SEQ ID NO: 1245288
gguuucuuaggauaugguu

SEQ ID NO: 1551219 - RNA, 19 nt, Artificial Sequence
  Description of Artificial Sequence: Synthetic oligonucleotide
  Antisense strand to SEQ ID NO: 1551218
aaccauauccuaagaaacc

SEQ ID NO: 1551220 - RNA, 19 nt, Artificial Sequence
  Description of Artificial Sequence: Synthetic oligonucleotide
  Sense strand starting at position 356 of SEQ ID NO: 1245288
gaguguucuaaguaugaag

SEQ ID NO: 1551221 - RNA, 19 nt, Artificial Sequence
  Description of Artificial Sequence: Synthetic oligonucleotide
  Antisense strand to SEQ ID NO: 1551220
cuucauacuuagaacacuc

SEQ ID NO: 1551222 - RNA, 19 nt, Artificial Sequence
  Description of Artificial Sequence: Synthetic oligonucleotide
  Sense strand starting at position 358 of SEQ ID NO: 1245288
guguucuaaguaugaagaa

SEQ ID NO: 1551223 - RNA, 19 nt, Artificial Sequence
  Description of Artificial Sequence: Synthetic oligonucleotide
  Antisense strand to SEQ ID NO: 1551222
uucuucauacuuagaacac

SEQ ID NO: 1551224 - RNA, 19 nt, Artificial Sequence
  Description of Artificial Sequence: Synthetic oligonucleotide
  Sense strand starting at position 370 of SEQ ID NO: 1245288
ugaagaauaaaguguuggu

SEQ ID NO: 1551225 - RNA, 19 nt, Artificial Sequence
  Description of Artificial Sequence: Synthetic oligonucleotide
  Antisense strand to SEQ ID NO: 1551224
accaacacuuuauucuuca

SEQ ID NO: 1551226 - RNA, 19 nt, Artificial Sequence
  Description of Artificial Sequence: Synthetic oligonucleotide
  Sense strand starting at position 374 of SEQ ID NO: 1245288
gaauaaaguguugguuaac

SEQ ID NO: 1551227 - RNA, 19 nt, Artificial Sequence
  Description of Artificial Sequence: Synthetic oligonucleotide
  Antisense strand to SEQ ID NO: 1551226
guuaaccaacacuuuauuc

SEQ ID NO: 1551228 - RNA, 19 nt, Artificial Sequence
  Description of Artificial Sequence: Synthetic oligonucleotide
  Sense strand starting at position 375 of SEQ ID NO: 1245288
aauaaaguguugguuaacu

SEQ ID NO: 1551229 - RNA, 19 nt, Artificial Sequence
  Description of Artificial Sequence: Synthetic oligonucleotide
  Antisense strand to SEQ ID NO: 1551228
aguuaaccaacacuuuauu

SEQ ID NO: 1551230 - RNA, 19 nt, Artificial Sequence
  Description of Artificial Sequence: Synthetic oligonucleotide
  Sense strand starting at position 377 of SEQ ID NO: 1245288
uaaaguguugguuaacuag

SEQ ID NO: 1551231 - RNA, 19 nt, Artificial Sequence
  Description of Artificial Sequence: Synthetic oligonucleotide
  Antisense strand to SEQ ID NO: 1551230
cuaguuaaccaacacuuua

SEQ ID NO: 1551232 - RNA, 19 nt, Artificial Sequence
  Description of Artificial Sequence: Synthetic oligonucleotide
  Sense strand starting at position 386 of SEQ ID NO: 1245288
gguuaacuagaucaaagcu

SEQ ID NO: 1551233 - RNA, 19 nt, Artificial Sequence
  Description of Artificial Sequence: Synthetic oligonucleotide
  Antisense strand to SEQ ID NO: 1551232
agcuuugaucuaguuaacc

SEQ ID NO: 1551234 - RNA, 19 nt, Artificial Sequence
  Description of Artificial Sequence: Synthetic oligonucleotide
  Sense strand starting at position 451 of SEQ ID NO: 1245288
aaugucgaguuauuucuau

SEQ ID NO: 1551235 - RNA, 19 nt, Artificial Sequence
  Description of Artificial Sequence: Synthetic oligonucleotide
  Antisense strand to SEQ ID NO: 1551234
auagaaauaacucgacauu

SEQ ID NO: 1551236 - RNA, 19 nt, Artificial Sequence
  Description of Artificial Sequence: Synthetic oligonucleotide
  Sense strand starting at position 511 of SEQ ID NO: 1245288
ccagguaaacuucguugaa

SEQ ID NO: 1551237 - RNA, 19 nt, Artificial Sequence
  Description of Artificial Sequence: Synthetic oligonucleotide
  Antisense strand to SEQ ID NO: 1551236
uucaacgaaguuuaccugg

SEQ ID NO: 1551238 - RNA, 19 nt, Artificial Sequence
  Description of Artificial Sequence: Synthetic oligonucleotide
  Sense strand starting at position 512 of SEQ ID NO: 1245288
cagguaaacuucguugaag

SEQ ID NO: 1551239 - RNA, 19 nt, Artificial Sequence
  Description of Artificial Sequence: Synthetic oligonucleotide
  Antisense strand to SEQ ID NO: 1551238
cuucaacgaaguuuaccug

SEQ ID NO: 1551240 - RNA, 19 nt, Artificial Sequence
  Description of Artificial Sequence: Synthetic oligonucleotide
  Sense strand starting at position 515 of SEQ ID NO: 1245288
guaaacuucguugaagcua

SEQ ID NO: 1551241 - RNA, 19 nt, Artificial Sequence
  Description of Artificial Sequence: Synthetic oligonucleotide
  Antisense strand to SEQ ID NO: 1551240
uagcuucaacgaaguuuac

SEQ ID NO: 1551242 - RNA, 19 nt, Artificial Sequence
  Description of Artificial Sequence: Synthetic oligonucleotide
  Sense strand starting at position 520 of SEQ ID NO: 1245288
cuucguugaagcuagagaa

SEQ ID NO: 1551243 - RNA, 19 nt, Artificial Sequence
  Description of Artificial Sequence: Synthetic oligonucleotide
  Antisense strand to SEQ ID NO: 1551242
uucucuagcuucaacgaag

SEQ ID NO: 1551244 - RNA, 19 nt, Artificial Sequence
  Description of Artificial Sequence: Synthetic oligonucleotide
  Sense strand starting at position 825 of SEQ ID NO: 1245288
cuaugaaucgcauaccuua

SEQ ID NO: 1551245 - RNA, 19 nt, Artificial Sequence
  Description of Artificial Sequence: Synthetic oligonucleotide
  Antisense strand to SEQ ID NO: 1551244
uaagguaugcgauucauag

SEQ ID NO: 1551246 - RNA, 19 nt, Artificial Sequence
  Description of Artificial Sequence: Synthetic oligonucleotide
  Sense strand starting at position 867 of SEQ ID NO: 1245288
ucuugauuugcaugcuaga

SEQ ID NO: 1551247 - RNA, 19 nt, Artificial Sequence
  Description of Artificial Sequence: Synthetic oligonucleotide
  Antisense strand to SEQ ID NO: 1551246
ucuagcaugcaaaucaaga

SEQ ID NO: 1551248 - RNA, 19 nt, Artificial Sequence
  Description of Artificial Sequence: Synthetic oligonucleotide
  Sense strand starting at position 1024 of SEQ ID NO: 1245288
aggaaaguacaguguaauu

SEQ ID NO: 1551249 - RNA, 19 nt, Artificial Sequence
  Description of Artificial Sequence: Synthetic oligonucleotide
  Antisense strand to SEQ ID NO: 1551248
aauuacacuguacuuuccu

SEQ ID NO: 1551250 - RNA, 19 nt, Artificial Sequence
  Description of Artificial Sequence: Synthetic oligonucleotide
  Sense strand starting at position 1026 of SEQ ID NO: 1245288
gaaaguacaguguaauucu

SEQ ID NO: 1551251 - RNA, 19 nt, Artificial Sequence
  Description of Artificial Sequence: Synthetic oligonucleotide
  Antisense strand to SEQ ID NO: 1551250
agaauuacacuguacuuuc

SEQ ID NO: 1551252 - RNA, 19 nt, Artificial Sequence
  Description of Artificial Sequence: Synthetic oligonucleotide
  Sense strand starting at position 1130 of SEQ ID NO: 1245288
auccaaagguguccuaaga

SEQ ID NO: 1551253 - RNA, 19 nt, Artificial Sequence
  Description of Artificial Sequence: Synthetic oligonucleotide
  Antisense strand to SEQ ID NO: 1551252
ucuuaggacaccuuuggau

SEQ ID NO: 1551254 - RNA, 19 nt, Artificial Sequence
  Description of Artificial Sequence: Synthetic oligonucleotide
  Sense strand starting at position 1260 of SEQ ID NO: 1245288
cagucaacccuuuggaaga

SEQ ID NO: 1551255 - RNA, 19 nt, Artificial Sequence
  Description of Artificial Sequence: Synthetic oligonucleotide
  Antisense strand to SEQ ID NO: 1551254
ucuuccaaaggguugacug

SEQ ID NO: 1551256 - RNA, 19 nt, Artificial Sequence
  Description of Artificial Sequence: Synthetic oligonucleotide
  Sense strand starting at position 1448 of SEQ ID NO: 1245288
cgggcuaugacccacuuua

SEQ ID NO: 1551257 - RNA, 19 nt, Artificial Sequence
  Description of Artificial Sequence: Synthetic oligonucleotide
  Antisense strand to SEQ ID NO: 1551256
uaaagugggucauagcccg

SEQ ID NO: 1551258 - RNA, 19 nt, Artificial Sequence
  Description of Artificial Sequence: Synthetic oligonucleotide
  Sense strand starting at position 1963 of SEQ ID NO: 1245288
agauucguagccgaagaaa

SEQ ID NO: 1551259 - RNA, 19 nt, Artificial Sequence
  Description of Artificial Sequence: Synthetic oligonucleotide
  Antisense strand to SEQ ID NO: 1551258
uuucuucggcuacgaaucu

SEQ ID NO: 1551260 - RNA, 19 nt, Artificial Sequence
  Description of Artificial Sequence: Synthetic oligonucleotide
  Sense strand starting at position 2051 of SEQ ID NO: 1245288
cgaauugccuacuuaggga

SEQ ID NO: 1551261 - RNA, 19 nt, Artificial Sequence
  Description of Artificial Sequence: Synthetic oligonucleotide
  Antisense strand to SEQ ID NO: 1551260
ucccuaaguaggcaauucg

SEQ ID NO: 1551262 - RNA, 19 nt, Artificial Sequence
  Description of Artificial Sequence: Synthetic oligonucleotide
  Sense strand starting at position 2155 of SEQ ID NO: 1245288
aggacaggcuacguauuau

SEQ ID NO: 1551263 - RNA, 19 nt, Artificial Sequence
  Description of Artificial Sequence: Synthetic oligonucleotide
  Antisense strand to SEQ ID NO: 1551262
auaauacguagccuguccu

SEQ ID NO: 1551264 - RNA, 19 nt, Artificial Sequence
  Description of Artificial Sequence: Synthetic oligonucleotide
  Sense strand starting at position 2196 of SEQ ID NO: 1245288
uuuauucgucaacauuagu

SEQ ID NO: 1551265 - RNA, 19 nt, Artificial Sequence
  Description of Artificial Sequence: Synthetic oligonucleotide
  Antisense strand to SEQ ID NO: 1551264
acuaauguugacgaauaaa

SEQ ID NO: 1551266 - RNA, 19 nt, Artificial Sequence
  Description of Artificial Sequence: Synthetic oligonucleotide
  Sense strand starting at position 2203 of SEQ ID NO: 1245288
gucaacauuaguuagguuu

SEQ ID NO: 1551267 - RNA, 19 nt, Artificial Sequence
  Description of Artificial Sequence: Synthetic oligonucleotide
  Antisense strand to SEQ ID NO: 1551266
aaaccuaacuaauguugac

SEQ ID NO: 1551268 - RNA, 19 nt, Artificial Sequence
  Description of Artificial Sequence: Synthetic oligonucleotide
  Sense strand starting at position 2206 of SEQ ID NO: 1245288
aacauuaguuagguuugau

SEQ ID NO: 1551269 - RNA, 19 nt, Artificial Sequence
  Description of Artificial Sequence: Synthetic oligonucleotide
  Antisense strand to SEQ ID NO: 1551268
aucaaaccuaacuaauguu

SEQ ID NO: 1551270 - RNA, 19 nt, Artificial Sequence
  Description of Artificial Sequence: Synthetic oligonucleotide
  Sense strand starting at position 2232 of SEQ ID NO: 1245288
cccuguacuccugaaagug

SEQ ID NO: 1551271 - RNA, 19 nt, Artificial Sequence
  Description of Artificial Sequence: Synthetic oligonucleotide
  Antisense strand to SEQ ID NO: 1551270
cacuuucaggaguacaggg

SEQ ID NO: 1551272 - RNA, 19 nt, Artificial Sequence
  Description of Artificial Sequence: Synthetic oligonucleotide
  Sense strand starting at position 2240 of SEQ ID NO: 1245288
uccugaaagugguuuguaa

SEQ ID NO: 1551273 - RNA, 19 nt, Artificial Sequence
  Description of Artificial Sequence: Synthetic oligonucleotide
  Antisense strand to SEQ ID NO: 1551272
uuacaaaccacuuucagga

SEQ ID NO: 1551274 - RNA, 19 nt, Artificial Sequence
  Description of Artificial Sequence: Synthetic oligonucleotide
  Sense strand starting at position 2242 of SEQ ID NO: 1245288
cugaaagugguuuguaaau

SEQ ID NO: 1551275 - RNA, 19 nt, Artificial Sequence
  Description of Artificial Sequence: Synthetic oligonucleotide
  Antisense strand to SEQ ID NO: 1551274
auuuacaaaccacuuucag

SEQ ID NO: 1551276 - RNA, 19 nt, Artificial Sequence
  Description of Artificial Sequence: Synthetic oligonucleotide
  Sense strand starting at position 2252 of SEQ ID NO: 1245288
uuuguaaauggccaauuaa

SEQ ID NO: 1551277 - RNA, 19 nt, Artificial Sequence
  Description of Artificial Sequence: Synthetic oligonucleotide
  Antisense strand to SEQ ID NO: 1551276
uuaauuggccauuuacaaa

SEQ ID NO: 1551278 - RNA, 19 nt, Artificial Sequence
  Description of Artificial Sequence: Synthetic oligonucleotide
  Sense strand starting at position 2283 of SEQ ID NO: 1245288
augagacguaauuauggua

SEQ ID NO: 1551279 - RNA, 19 nt, Artificial Sequence
  Description of Artificial Sequence: Synthetic oligonucleotide
  Antisense strand to SEQ ID NO: 1551278
uaccauaauuacgucucau

SEQ ID NO: 1551280 - RNA, 19 nt, Artificial Sequence
  Description of Artificial Sequence: Synthetic oligonucleotide
  Sense strand starting at position 2319 of SEQ ID NO: 1245288
augggaaugucauccaauc

SEQ ID NO: 1551281 - RNA, 19 nt, Artificial Sequence
  Description of Artificial Sequence: Synthetic oligonucleotide
  Antisense strand to SEQ ID NO: 1551280
gauuggaugacauucccau

SEQ ID NO: 1551282 - RNA, 19 nt, Artificial Sequence
  Description of Artificial Sequence: Synthetic oligonucleotide
  Sense strand starting at position 2484 of SEQ ID NO: 1245288
ugguuauucccucauaguc

SEQ ID NO: 1551283 - RNA, 19 nt, Artificial Sequence
  Description of Artificial Sequence: Synthetic oligonucleotide
  Antisense strand to SEQ ID NO: 1551282
gacuaugagggaauaacca

SEQ ID NO: 1551284 - RNA, 19 nt, Artificial Sequence
  Description of Artificial Sequence: Synthetic oligonucleotide
  Sense strand starting at position 2560 of SEQ ID NO: 1245288
gcucaaacucuaggagagu

SEQ ID NO: 1551285 - RNA, 19 nt, Artificial Sequence
  Description of Artificial Sequence: Synthetic oligonucleotide
  Antisense strand to SEQ ID NO: 1551284
acucuccuagaguuugagc

SEQ ID NO: 1551286 - RNA, 19 nt, Artificial Sequence
  Description of Artificial Sequence: Synthetic oligonucleotide
  Sense strand starting at position 2605 of SEQ ID NO: 1245288
ccuugaccucaguguagga

SEQ ID NO: 1551287 - RNA, 19 nt, Artificial Sequence
  Description of Artificial Sequence: Synthetic oligonucleotide
  Antisense strand to SEQ ID NO: 1551286
uccuacacugaggucaagg

SEQ ID NO: 1551288 - RNA, 19 nt, Artificial Sequence
  Description of Artificial Sequence: Synthetic oligonucleotide
  Sense strand starting at position 2773 of SEQ ID NO: 1245288
gagcuagacccugauagca

SEQ ID NO: 1551289 - RNA, 19 nt, Artificial Sequence
  Description of Artificial Sequence: Synthetic oligonucleotide
  Antisense strand to SEQ ID NO: 1551288
ugcuaucagggucuagcuc

SEQ ID NO: 1551290 - RNA, 19 nt, Artificial Sequence
  Description of Artificial Sequence: Synthetic oligonucleotide
  Sense strand starting at position 2789 of SEQ ID NO: 1245288
gcaaacuacucccuggaca

SEQ ID NO: 1551291 - RNA, 19 nt, Artificial Sequence
  Description of Artificial Sequence: Synthetic oligonucleotide
  Antisense strand to SEQ ID NO: 1551290
uguccagggaguaguuugc

SEQ ID NO: 1551292 - RNA, 19 nt, Artificial Sequence
  Description of Artificial Sequence: Synthetic oligonucleotide
  Sense strand starting at position 3269 of SEQ ID NO: 1245288
acuagauucuaggcaguau

SEQ ID NO: 1551293 - RNA, 19 nt, Artificial Sequence
  Description of Artificial Sequence: Synthetic oligonucleotide
  Antisense strand to SEQ ID NO: 1551292
auacugccuagaaucuagu

SEQ ID NO: 1551294 - RNA, 19 nt, Artificial Sequence
  Description of Artificial Sequence: Synthetic oligonucleotide
  Sense strand starting at position 3360 of SEQ ID NO: 1245288
gcugcuacaaugugaagaa

SEQ ID NO: 1551295 - RNA, 19 nt, Artificial Sequence
  Description of Artificial Sequence: Synthetic oligonucleotide
  Antisense strand to SEQ ID NO: 1551294
uucuucacauuguagcagc

SEQ ID NO: 1551296 - RNA, 19 nt, Artificial Sequence
  Description of Artificial Sequence: Synthetic oligonucleotide
  Sense strand starting at position 3445 of SEQ ID NO: 1245288
ggcagccuucuguaaccaa

SEQ ID NO: 1551297 - RNA, 19 nt, Artificial Sequence
  Description of Artificial Sequence: Synthetic oligonucleotide
  Antisense strand to SEQ ID NO: 1551296
uugguuacagaaggcugcc

SEQ ID NO: 1551298 - RNA, 19 nt, Artificial Sequence
  Description of Artificial Sequence: Synthetic oligonucleotide
  Sense strand starting at position 282 of SEQ ID NO: 1245289
caccaagugguauaagagu

SEQ ID NO: 1551299 - RNA, 19 nt, Artificial Sequence
  Description of Artificial Sequence: Synthetic oligonucleotide
  Antisense strand to SEQ ID NO: 1551298
acucuuauaccacuuggug

SEQ ID NO: 1551300 - RNA, 19 nt, Artificial Sequence
  Description of Artificial Sequence: Synthetic oligonucleotide
  Sense strand starting at position 364 of SEQ ID NO: 1245289
gugguaccucacuggcuua

SEQ ID NO: 1551301 - RNA, 19 nt, Artificial Sequence
  Description of Artificial Sequence: Synthetic oligonucleotide
  Antisense strand to SEQ ID NO: 1551300
uaagccagugagguaccac

SEQ ID NO: 1551302 - RNA, 19 nt, Artificial Sequence
  Description of Artificial Sequence: Synthetic oligonucleotide
  Sense strand starting at position 389 of SEQ ID NO: 1245289
ccugauuuguaagauuaag

SEQ ID NO: 1551303 - RNA, 19 nt, Artificial Sequence
  Description of Artificial Sequence: Synthetic oligonucleotide
  Antisense strand to SEQ ID NO: 1551302
cuuaaucuuacaaaucagg

SEQ ID NO: 1551304 - RNA, 19 nt, Artificial Sequence
  Description of Artificial Sequence: Synthetic oligonucleotide
  Sense strand starting at position 437 of SEQ ID NO: 1245289
acgugaaaugccuauaaac

SEQ ID NO: 1551305 - RNA, 19 nt, Artificial Sequence
  Description of Artificial Sequence: Synthetic oligonucleotide
  Antisense strand to SEQ ID NO: 1551304
guuuauaggcauuucacgu

SEQ ID NO: 1551306 - RNA, 19 nt, Artificial Sequence
  Description of Artificial Sequence: Synthetic oligonucleotide
  Sense strand starting at position 498 of SEQ ID NO: 1245289
aagagagucuggguaucaa

SEQ ID NO: 1551307 - RNA, 19 nt, Artificial Sequence
  Description of Artificial Sequence: Synthetic oligonucleotide
  Antisense strand to SEQ ID NO: 1551306
uugauacccagacucucuu

SEQ ID NO: 1551308 - RNA, 19 nt, Artificial Sequence
  Description of Artificial Sequence: Synthetic oligonucleotide
  Sense strand starting at position 524 of SEQ ID NO: 1245289
cugauuacauguguuucua

SEQ ID NO: 1551309 - RNA, 19 nt, Artificial Sequence
  Description of Artificial Sequence: Synthetic oligonucleotide
  Antisense strand to SEQ ID NO: 1551308
uagaaacacauguaaucag

SEQ ID NO: 1551310 - RNA, 19 nt, Artificial Sequence
  Description of Artificial Sequence: Synthetic oligonucleotide
  Sense strand starting at position 528 of SEQ ID NO: 1245289
uuacauguguuucuaaaug

SEQ ID NO: 1551311 - RNA, 19 nt, Artificial Sequence
  Description of Artificial Sequence: Synthetic oligonucleotide
  Antisense strand to SEQ ID NO: 1551310
cauuuagaaacacauguaa

SEQ ID NO: 1551312 - RNA, 19 nt, Artificial Sequence
  Description of Artificial Sequence: Synthetic oligonucleotide
  Sense strand starting at position 658 of SEQ ID NO: 1245289
ccuuuauaucaguguuucu

SEQ ID NO: 1551313 - RNA, 19 nt, Artificial Sequence
  Description of Artificial Sequence: Synthetic oligonucleotide
  Antisense strand to SEQ ID NO: 1551312
agaaacacugauauaaagg

SEQ ID NO: 1551314 - RNA, 19 nt, Artificial Sequence
  Description of Artificial Sequence: Synthetic oligonucleotide
  Sense strand starting at position 661 of SEQ ID NO: 1245289
uuauaucaguguuucugaa

SEQ ID NO: 1551315 - RNA, 19 nt, Artificial Sequence
  Description of Artificial Sequence: Synthetic oligonucleotide
  Antisense strand to SEQ ID NO: 1551314
uucagaaacacugauauaa

SEQ ID NO: 1551316 - RNA, 19 nt, Artificial Sequence
  Description of Artificial Sequence: Synthetic oligonucleotide
  Sense strand starting at position 663 of SEQ ID NO: 1245289
auaucaguguuucugaaac

SEQ ID NO: 1551317 - RNA, 19 nt, Artificial Sequence
  Description of Artificial Sequence: Synthetic oligonucleotide
  Antisense strand to SEQ ID NO: 1551316
guuucagaaacacugauau

SEQ ID NO: 1551318 - RNA, 19 nt, Artificial Sequence
  Description of Artificial Sequence: Synthetic oligonucleotide
  Sense strand starting at position 820 of SEQ ID NO: 1245289
aggacagauugucuccauu

SEQ ID NO: 1551319 - RNA, 19 nt, Artificial Sequence
  Description of Artificial Sequence: Synthetic oligonucleotide
  Antisense strand to SEQ ID NO: 1551318
aauggagacaaucuguccu

SEQ ID NO: 1551320 - RNA, 19 nt, Artificial Sequence
  Description of Artificial Sequence: Synthetic oligonucleotide
  Sense strand starting at position 869 of SEQ ID NO: 1245289
ggcuguuacguacauacau

SEQ ID NO: 1551321 - RNA, 19 nt, Artificial Sequence
  Description of Artificial Sequence: Synthetic oligonucleotide
  Antisense strand to SEQ ID NO: 1551320
auguauguacguaacagcc

SEQ ID NO: 1551322 - RNA, 19 nt, Artificial Sequence
  Description of Artificial Sequence: Synthetic oligonucleotide
  Sense strand starting at position 983 of SEQ ID NO: 1245289
ggauguuugcaacaauaau

SEQ ID NO: 1551323 - RNA, 19 nt, Artificial Sequence
  Description of Artificial Sequence: Synthetic oligonucleotide
  Antisense strand to SEQ ID NO: 1551322
auuauuguugcaaacaucc

SEQ ID NO: 1551324 - RNA, 19 nt, Artificial Sequence
  Description of Artificial Sequence: Synthetic oligonucleotide
  Sense strand starting at position 1099 of SEQ ID NO: 1245289
uuacaaaguugcucugcau

SEQ ID NO: 1551325 - RNA, 19 nt, Artificial Sequence
  Description of Artificial Sequence: Synthetic oligonucleotide
  Antisense strand to SEQ ID NO: 1551324
augcagagcaacuuuguaa

SEQ ID NO: 1551326 - RNA, 19 nt, Artificial Sequence
  Description of Artificial Sequence: Synthetic oligonucleotide
  Sense strand starting at position 1105 of SEQ ID NO: 1245289
aguugcucugcauacauga

SEQ ID NO: 1551327 - RNA, 19 nt, Artificial Sequence
  Description of Artificial Sequence: Synthetic oligonucleotide
  Antisense strand to SEQ ID NO: 1551326
ucauguaugcagagcaacu

SEQ ID NO: 1551328 - RNA, 19 nt, Artificial Sequence
  Description of Artificial Sequence: Synthetic oligonucleotide
  Sense strand starting at position 1212 of SEQ ID NO: 1245289
acugcauuagggcauauaa

SEQ ID NO: 1551329 - RNA, 19 nt, Artificial Sequence
  Description of Artificial Sequence: Synthetic oligonucleotide
  Antisense strand to SEQ ID NO: 1551328
uuauaugcccuaaugcagu

SEQ ID NO: 1551330 - RNA, 19 nt, Artificial Sequence
  Description of Artificial Sequence: Synthetic oligonucleotide
  Sense strand starting at position 1214 of SEQ ID NO: 1245289
ugcauuagggcauauaauc

SEQ ID NO: 1551331 - RNA, 19 nt, Artificial Sequence
  Description of Artificial Sequence: Synthetic oligonucleotide
  Antisense strand to SEQ ID NO: 1551330
gauuauaugcccuaaugca

SEQ ID NO: 1551332 - RNA, 19 nt, Artificial Sequence
  Description of Artificial Sequence: Synthetic oligonucleotide
  Sense strand starting at position 1251 of SEQ ID NO: 1245289
uuaggugacuuacucuaaa

SEQ ID NO: 1551333 - RNA, 19 nt, Artificial Sequence
  Description of Artificial Sequence: Synthetic oligonucleotide
  Antisense strand to SEQ ID NO: 1551332
uuuagaguaagucaccuaa

SEQ ID NO: 1551334 - RNA, 19 nt, Artificial Sequence
  Description of Artificial Sequence: Synthetic oligonucleotide
  Sense strand starting at position 1254 of SEQ ID NO: 1245289
ggugacuuacucuaaaucu

SEQ ID NO: 1551335 - RNA, 19 nt, Artificial Sequence
  Description of Artificial Sequence: Synthetic oligonucleotide
  Antisense strand to SEQ ID NO: 1551334
agauuuagaguaagucacc

SEQ ID NO: 1551336 - RNA, 19 nt, Artificial Sequence
  Description of Artificial Sequence: Synthetic oligonucleotide
  Sense strand starting at position 1433 of SEQ ID NO: 1245289
ugcugcguuacagaaauga

SEQ ID NO: 1551337 - RNA, 19 nt, Artificial Sequence
  Description of Artificial Sequence: Synthetic oligonucleotide
  Antisense strand to SEQ ID NO: 1551336
ucauuucuguaacgcagca

SEQ ID NO: 1551338 - RNA, 19 nt, Artificial Sequence
  Description of Artificial Sequence: Synthetic oligonucleotide
  Sense strand starting at position 1603 of SEQ ID NO: 1245289
uacuguuuccguguuaagc

SEQ ID NO: 1551339 - RNA, 19 nt, Artificial Sequence
  Description of Artificial Sequence: Synthetic oligonucleotide
  Antisense strand to SEQ ID NO: 1551338
gcuuaacacggaaacagua

SEQ ID NO: 1551340 - RNA, 19 nt, Artificial Sequence
  Description of Artificial Sequence: Synthetic oligonucleotide
  Sense strand starting at position 1604 of SEQ ID NO: 1245289
acuguuuccguguuaagcu

SEQ ID NO: 1551341 - RNA, 19 nt, Artificial Sequence
  Description of Artificial Sequence: Synthetic oligonucleotide
  Antisense strand to SEQ ID NO: 1551340
agcuuaacacggaaacagu

SEQ ID NO: 1551342 - RNA, 19 nt, Artificial Sequence
  Description of Artificial Sequence: Synthetic oligonucleotide
  Sense strand starting at position 1824 of SEQ ID NO: 1245289
gacauaagcgguugacuca

SEQ ID NO: 1551343 - RNA, 19 nt, Artificial Sequence
  Description of Artificial Sequence: Synthetic oligonucleotide
  Antisense strand to SEQ ID NO: 1551342
ugagucaaccgcuuauguc

SEQ ID NO: 1551344 - RNA, 19 nt, Artificial Sequence
  Description of Artificial Sequence: Synthetic oligonucleotide
  Sense strand starting at position 1885 of SEQ ID NO: 1245289
gaguguuuacgguggugaa

SEQ ID NO: 1551345 - RNA, 19 nt, Artificial Sequence
  Description of Artificial Sequence: Synthetic oligonucleotide
  Antisense strand to SEQ ID NO: 1551344
uucaccaccguaaacacuc

SEQ ID NO: 1551346 - RNA, 19 nt, Artificial Sequence
  Description of Artificial Sequence: Synthetic oligonucleotide
  Sense strand starting at position 2323 of SEQ ID NO: 1245289
gggaguuugccaggccuga

SEQ ID NO: 1551347 - RNA, 19 nt, Artificial Sequence
  Description of Artificial Sequence: Synthetic oligonucleotide
  Antisense strand to SEQ ID NO: 1551346
ucaggccuggcaaacuccc

SEQ ID NO: 1551348 - RNA, 19 nt, Artificial Sequence
  Description of Artificial Sequence: Synthetic oligonucleotide
  Sense strand starting at position 2353 of SEQ ID NO: 1245289
uggaaacucugucaaagaa

SEQ ID NO: 1551349 - RNA, 19 nt, Artificial Sequence
  Description of Artificial Sequence: Synthetic oligonucleotide
  Antisense strand to SEQ ID NO: 1551348
uucuuugacagaguuucca

SEQ ID NO: 1551350 - RNA, 19 nt, Artificial Sequence
  Description of Artificial Sequence: Synthetic oligonucleotide
  Sense strand starting at position 2388 of SEQ ID NO: 1245289
ucuacauaggcauguaaac

SEQ ID NO: 1551351 - RNA, 19 nt, Artificial Sequence
  Description of Artificial Sequence: Synthetic oligonucleotide
  Antisense strand to SEQ ID NO: 1551350
guuuacaugccuauguaga

SEQ ID NO: 1551352 - RNA, 19 nt, Artificial Sequence
  Description of Artificial Sequence: Synthetic oligonucleotide
  Sense strand starting at position 2395 of SEQ ID NO: 1245289
aggcauguaaacugguaua

SEQ ID NO: 1551353 - RNA, 19 nt, Artificial Sequence
  Description of Artificial Sequence: Synthetic oligonucleotide
  Antisense strand to SEQ ID NO: 1551352
uauaccaguuuacaugccu

SEQ ID NO: 1551354 - RNA, 19 nt, Artificial Sequence
  Description of Artificial Sequence: Synthetic oligonucleotide
  Sense strand starting at position 2638 of SEQ ID NO: 1245289
aaaggauaauuggauuguu

SEQ ID NO: 1551355 - RNA, 19 nt, Artificial Sequence
  Description of Artificial Sequence: Synthetic oligonucleotide
  Antisense strand to SEQ ID NO: 1551354
aacaauccaauuauccuuu

SEQ ID NO: 1551356 - RNA, 19 nt, Artificial Sequence
  Description of Artificial Sequence: Synthetic oligonucleotide
  Sense strand starting at position 2702 of SEQ ID NO: 1245289
gcauaaugcgauuauuagg

SEQ ID NO: 1551357 - RNA, 19 nt, Artificial Sequence
  Description of Artificial Sequence: Synthetic oligonucleotide
  Antisense strand to SEQ ID NO: 1551356
ccuaauaaucgcauuaugc

SEQ ID NO: 1551358 - RNA, 19 nt, Artificial Sequence
  Description of Artificial Sequence: Synthetic oligonucleotide
  Sense strand starting at position 2723 of SEQ ID NO: 1245289
uugccaugccuguaccaaa

SEQ ID NO: 1551359 - RNA, 19 nt, Artificial Sequence
  Description of Artificial Sequence: Synthetic oligonucleotide
  Antisense strand to SEQ ID NO: 1551358
uuugguacaggcauggcaa

SEQ ID NO: 1551360 - RNA, 19 nt, Artificial Sequence
  Description of Artificial Sequence: Synthetic oligonucleotide
  Sense strand starting at position 2878 of SEQ ID NO: 1245289
gcauguuugcaccaggaag

SEQ ID NO: 1551361 - RNA, 19 nt, Artificial Sequence
  Description of Artificial Sequence: Synthetic oligonucleotide
  Antisense strand to SEQ ID NO: 1551360
cuuccuggugcaaacaugc

SEQ ID NO: 1551362 - RNA, 19 nt, Artificial Sequence
  Description of Artificial Sequence: Synthetic oligonucleotide
  Sense strand starting at position 2960 of SEQ ID NO: 1245289
cuacacagauacgucuaua

SEQ ID NO: 1551363 - RNA, 19 nt, Artificial Sequence
  Description of Artificial Sequence: Synthetic oligonucleotide
  Antisense strand to SEQ ID NO: 1551362
uauagacguaucuguguag

SEQ ID NO: 1551364 - RNA, 19 nt, Artificial Sequence
  Description of Artificial Sequence: Synthetic oligonucleotide
  Sense strand starting at position 3249 of SEQ ID NO: 1245289
guauaccacuucuuguuua

SEQ ID NO: 1551365 - RNA, 19 nt, Artificial Sequence
  Description of Artificial Sequence: Synthetic oligonucleotide
  Antisense strand to SEQ ID NO: 1551364
uaaacaagaagugguauac

SEQ ID NO: 1551366 - RNA, 19 nt, Artificial Sequence
  Description of Artificial Sequence: Synthetic oligonucleotide
  Sense strand starting at position 3254 of SEQ ID NO: 1245289
ccacuucuuguuuaaaggu

SEQ ID NO: 1551367 - RNA, 19 nt, Artificial Sequence
  Description of Artificial Sequence: Synthetic oligonucleotide
  Antisense strand to SEQ ID NO: 1551366
accuuuaaacaagaagugg

SEQ ID NO: 1551368 - RNA, 19 nt, Artificial Sequence
  Description of Artificial Sequence: Synthetic oligonucleotide
  Sense strand starting at position 3262 of SEQ ID NO: 1245289
uguuuaaagguauguaguu

SEQ ID NO: 1551369 - RNA, 19 nt, Artificial Sequence
  Description of Artificial Sequence: Synthetic oligonucleotide
  Antisense strand to SEQ ID NO: 1551368
aacuacauaccuuuaaaca

SEQ ID NO: 1551370 - RNA, 19 nt, Artificial Sequence
  Description of Artificial Sequence: Synthetic oligonucleotide
  Sense strand starting at position 3375 of SEQ ID NO: 1245289
cccuuaaauuguguccaua

SEQ ID NO: 1551371 - RNA, 19 nt, Artificial Sequence
  Description of Artificial Sequence: Synthetic oligonucleotide
  Antisense strand to SEQ ID NO: 1551370
uauggacacaauuuaaggg

SEQ ID NO: 1551372 - RNA, 19 nt, Artificial Sequence
  Description of Artificial Sequence: Synthetic oligonucleotide
  Sense strand starting at position 3377 of SEQ ID NO: 1245289
cuuaaauuguguccauauu

SEQ ID NO: 1551373 - RNA, 19 nt, Artificial Sequence
  Description of Artificial Sequence: Synthetic oligonucleotide
  Antisense strand to SEQ ID NO: 1551372
aauauggacacaauuuaag

SEQ ID NO: 1551374 - RNA, 19 nt, Artificial Sequence
  Description of Artificial Sequence: Synthetic oligonucleotide
  Sense strand starting at position 3669 of SEQ ID NO: 1245289
acaagaaacuuccagaaag

SEQ ID NO: 1551375 - RNA, 19 nt, Artificial Sequence
  Description of Artificial Sequence: Synthetic oligonucleotide
  Antisense strand to SEQ ID NO: 1551374
cuuucuggaaguuucuugu

SEQ ID NO: 1551376 - RNA, 19 nt, Artificial Sequence
  Description of Artificial Sequence: Synthetic oligonucleotide
  Sense strand starting at position 3742 of SEQ ID NO: 1245289
gaacuuugcggccagaugu

SEQ ID NO: 1551377 - RNA, 19 nt, Artificial Sequence
  Description of Artificial Sequence: Synthetic oligonucleotide
  Antisense strand to SEQ ID NO: 1551376
acaucuggccgcaaaguuc

SEQ ID NO: 1551378 - RNA, 19 nt, Artificial Sequence
  Description of Artificial Sequence: Synthetic oligonucleotide
  Sense strand starting at position 106 of SEQ ID NO: 1245290
cugucaaacuggccucaua

SEQ ID NO: 1551379 - RNA, 19 nt, Artificial Sequence
  Description of Artificial Sequence: Synthetic oligonucleotide
  Antisense strand to SEQ ID NO: 1551378
uaugaggccaguuugacag

SEQ ID NO: 1551380 - RNA, 19 nt, Artificial Sequence
  Description of Artificial Sequence: Synthetic oligonucleotide
  Sense strand starting at position 347 of SEQ ID NO: 1245290
uccaaagaguuaccaguuu

SEQ ID NO: 1551381 - RNA, 19 nt, Artificial Sequence
  Description of Artificial Sequence: Synthetic oligonucleotide
  Antisense strand to SEQ ID NO: 1551380
aaacugguaacucuuugga

SEQ ID NO: 1551382 - RNA, 19 nt, Artificial Sequence
  Description of Artificial Sequence: Synthetic oligonucleotide
  Sense strand starting at position 767 of SEQ ID NO: 1245290
gcuagaaaugcacauuauc

SEQ ID NO: 1551383 - RNA, 19 nt, Artificial Sequence
  Description of Artificial Sequence: Synthetic oligonucleotide
  Antisense strand to SEQ ID NO: 1551382
gauaaugugcauuucuagc

SEQ ID NO: 1551384 - RNA, 19 nt, Artificial Sequence
  Description of Artificial Sequence: Synthetic oligonucleotide
  Sense strand starting at position 857 of SEQ ID NO: 1245290
cggucaacaggaugucaaa

SEQ ID NO: 1551385 - RNA, 19 nt, Artificial Sequence
  Description of Artificial Sequence: Synthetic oligonucleotide
  Antisense strand to SEQ ID NO: 1551384
uuugacauccuguugaccg

SEQ ID NO: 1551386 - RNA, 19 nt, Artificial Sequence
  Description of Artificial Sequence: Synthetic oligonucleotide
  Sense strand starting at position 868 of SEQ ID NO: 1245290
augucaaaguaguuuaaga

SEQ ID NO: 1551387 - RNA, 19 nt, Artificial Sequence
  Description of Artificial Sequence: Synthetic oligonucleotide
  Antisense strand to SEQ ID NO: 1551386
ucuuaaacuacuuugacau

SEQ ID NO: 1551388 - RNA, 19 nt, Artificial Sequence
  Description of Artificial Sequence: Synthetic oligonucleotide
  Sense strand starting at position 870 of SEQ ID NO: 1245290
gucaaaguaguuuaagauu

SEQ ID NO: 1551389 - RNA, 19 nt, Artificial Sequence
  Description of Artificial Sequence: Synthetic oligonucleotide
  Antisense strand to SEQ ID NO: 1551388
aaucuuaaacuacuuugac

SEQ ID NO: 1551390 - RNA, 19 nt, Artificial Sequence
  Description of Artificial Sequence: Synthetic oligonucleotide
  Sense strand starting at position 961 of SEQ ID NO: 1245290
cuacucuugagguaggcau

SEQ ID NO: 1551391 - RNA, 19 nt, Artificial Sequence
  Description of Artificial Sequence: Synthetic oligonucleotide
  Antisense strand to SEQ ID NO: 1551390
augccuaccucaagaguag

SEQ ID NO: 1551392 - RNA, 19 nt, Artificial Sequence
  Description of Artificial Sequence: Synthetic oligonucleotide
  Sense strand starting at position 963 of SEQ ID NO: 1245290
acucuugagguaggcauaa

SEQ ID NO: 1551393 - RNA, 19 nt, Artificial Sequence
  Description of Artificial Sequence: Synthetic oligonucleotide
  Antisense strand to SEQ ID NO: 1551392
uuaugccuaccucaagagu

SEQ ID NO: 1551394 - RNA, 19 nt, Artificial Sequence
  Description of Artificial Sequence: Synthetic oligonucleotide
  Sense strand starting at position 1010 of SEQ ID NO: 1245290
gcaacuuaacauugguauu

SEQ ID NO: 1551395 - RNA, 19 nt, Artificial Sequence
  Description of Artificial Sequence: Synthetic oligonucleotide
  Antisense strand to SEQ ID NO: 1551394
aauaccaauguuaaguugc

SEQ ID NO: 1551396 - RNA, 19 nt, Artificial Sequence
  Description of Artificial Sequence: Synthetic oligonucleotide
  Sense strand starting at position 1030 of SEQ ID NO: 1245290
augaaucacgguuauguaa

SEQ ID NO: 1551397 - RNA, 19 nt, Artificial Sequence
  Description of Artificial Sequence: Synthetic oligonucleotide
  Antisense strand to SEQ ID NO: 1551396
uuacauaaccgugauucau

SEQ ID NO: 1551398 - RNA, 19 nt, Artificial Sequence
  Description of Artificial Sequence: Synthetic oligonucleotide
  Sense strand starting at position 1180 of SEQ ID NO: 1245290
aaagaaguucuguguuacu

SEQ ID NO: 1551399 - RNA, 19 nt, Artificial Sequence
  Description of Artificial Sequence: Synthetic oligonucleotide
  Antisense strand to SEQ ID NO: 1551398
aguaacacagaacuucuuu

SEQ ID NO: 1551400 - RNA, 19 nt, Artificial Sequence
  Description of Artificial Sequence: Synthetic oligonucleotide
  Sense strand starting at position 1273 of SEQ ID NO: 1245290
auuaaacaucucugguuga

SEQ ID NO: 1551401 - RNA, 19 nt, Artificial Sequence
  Description of Artificial Sequence: Synthetic oligonucleotide
  Antisense strand to SEQ ID NO: 1551400
ucaaccagagauguuuaau

SEQ ID NO: 1551402 - RNA, 19 nt, Artificial Sequence
  Description of Artificial Sequence: Synthetic oligonucleotide
  Sense strand starting at position 1491 of SEQ ID NO: 1245290
gccucuccugaaugagauc

SEQ ID NO: 1551403 - RNA, 19 nt, Artificial Sequence
  Description of Artificial Sequence: Synthetic oligonucleotide
  Antisense strand to SEQ ID NO: 1551402
gaucucauucaggagaggc

SEQ ID NO: 1551404 - RNA, 19 nt, Artificial Sequence
  Description of Artificial Sequence: Synthetic oligonucleotide
  Sense strand starting at position 1497 of SEQ ID NO: 1245290
ccugaaugagaucagcgua

SEQ ID NO: 1551405 - RNA, 19 nt, Artificial Sequence
  Description of Artificial Sequence: Synthetic oligonucleotide
  Antisense strand to SEQ ID NO: 1551404
uacgcugaucucauucagg

SEQ ID NO: 1551406 - RNA, 19 nt, Artificial Sequence
  Description of Artificial Sequence: Synthetic oligonucleotide
  Sense strand starting at position 1502 of SEQ ID NO: 1245290
augagaucagcguagcaga

SEQ ID NO: 1551407 - RNA, 19 nt, Artificial Sequence
  Description of Artificial Sequence: Synthetic oligonucleotide
  Antisense strand to SEQ ID NO: 1551406
ucugcuacgcugaucucau

SEQ ID NO: 1551408 - RNA, 19 nt, Artificial Sequence
  Description of Artificial Sequence: Synthetic oligonucleotide
  Sense strand starting at position 1518 of SEQ ID NO: 1245290
agauuaaguugugcucaau

SEQ ID NO: 1551409 - RNA, 19 nt, Artificial Sequence
  Description of Artificial Sequence: Synthetic oligonucleotide
  Antisense strand to SEQ ID NO: 1551408
auugagcacaacuuaaucu

SEQ ID NO: 1551410 - RNA, 19 nt, Artificial Sequence
  Description of Artificial Sequence: Synthetic oligonucleotide
  Sense strand starting at position 1723 of SEQ ID NO: 1245290
acgcgaaccgcgaaguuua

SEQ ID NO: 1551411 - RNA, 19 nt, Artificial Sequence
  Description of Artificial Sequence: Synthetic oligonucleotide
  Antisense strand to SEQ ID NO: 1551410
uaaacuucgcgguucgcgu

SEQ ID NO: 1551412 - RNA, 19 nt, Artificial Sequence
  Description of Artificial Sequence: Synthetic oligonucleotide
  Sense strand starting at position 2152 of SEQ ID NO: 1245290
gcagucuccgucgcaagaa

SEQ ID NO: 1551413 - RNA, 19 nt, Artificial Sequence
  Description of Artificial Sequence: Synthetic oligonucleotide
  Antisense strand to SEQ ID NO: 1551412
uucuugcgacggagacugc

SEQ ID NO: 1551414 - RNA, 19 nt, Artificial Sequence
  Description of Artificial Sequence: Synthetic oligonucleotide
  Sense strand starting at position 2504 of SEQ ID NO: 1245290
ccucuuuaacugugaaaug

SEQ ID NO: 1551415 - RNA, 19 nt, Artificial Sequence
  Description of Artificial Sequence: Synthetic oligonucleotide
  Antisense strand to SEQ ID NO: 1551414
cauuucacaguuaaagagg

SEQ ID NO: 1551416 - RNA, 19 nt, Artificial Sequence
  Description of Artificial Sequence: Synthetic oligonucleotide
  Sense strand starting at position 2514 of SEQ ID NO: 1245290
ugugaaauguaccugcaaa

SEQ ID NO: 1551417 - RNA, 19 nt, Artificial Sequence
  Description of Artificial Sequence: Synthetic oligonucleotide
  Antisense strand to SEQ ID NO: 1551416
uuugcagguacauuucaca

SEQ ID NO: 1551418 - RNA, 19 nt, Artificial Sequence
  Description of Artificial Sequence: Synthetic oligonucleotide
  Sense strand starting at position 2515 of SEQ ID NO: 1245290
gugaaauguaccugcaaag

SEQ ID NO: 1551419 - RNA, 19 nt, Artificial Sequence
  Description of Artificial Sequence: Synthetic oligonucleotide
  Antisense strand to SEQ ID NO: 1551418
cuuugcagguacauuucac

SEQ ID NO: 1551420 - RNA, 19 nt, Artificial Sequence
  Description of Artificial Sequence: Synthetic oligonucleotide
  Sense strand starting at position 2540 of SEQ ID NO: 1245290
agugucuuuggauacccaa

SEQ ID NO: 1551421 - RNA, 19 nt, Artificial Sequence
  Description of Artificial Sequence: Synthetic oligonucleotide
  Antisense strand to SEQ ID NO: 1551420
uuggguauccaaagacacu

SEQ ID NO: 1551422 - RNA, 19 nt, Artificial Sequence
  Description of Artificial Sequence: Synthetic oligonucleotide
  Sense strand starting at position 2597 of SEQ ID NO: 1245290
gcggguaugagugagcaga

SEQ ID NO: 1551423 - RNA, 19 nt, Artificial Sequence
  Description of Artificial Sequence: Synthetic oligonucleotide
  Antisense strand to SEQ ID NO: 1551422
ucugcucacucauacccgc

SEQ ID NO: 1551424 - RNA, 19 nt, Artificial Sequence
  Description of Artificial Sequence: Synthetic oligonucleotide
  Sense strand starting at position 2711 of SEQ ID NO: 1245290
agugaucgagcugagcaaa

SEQ ID NO: 1551425 - RNA, 19 nt, Artificial Sequence
  Description of Artificial Sequence: Synthetic oligonucleotide
  Antisense strand to SEQ ID NO: 1551424
uuugcucagcucgaucacu

SEQ ID NO: 1551426 - RNA, 19 nt, Artificial Sequence
  Description of Artificial Sequence: Synthetic oligonucleotide
  Sense strand starting at position 2714 of SEQ ID NO: 1245290
gaucgagcugagcaaauua

SEQ ID NO: 1551427 - RNA, 19 nt, Artificial Sequence
  Description of Artificial Sequence: Synthetic oligonucleotide
  Antisense strand to SEQ ID NO: 1551426
uaauuugcucagcucgauc

SEQ ID NO: 1551428 - RNA, 19 nt, Artificial Sequence
  Description of Artificial Sequence: Synthetic oligonucleotide
  Sense strand starting at position 3269 of SEQ ID NO: 1245290
aggagcugaccugauguuu

SEQ ID NO: 1551429 - RNA, 19 nt, Artificial Sequence
  Description of Artificial Sequence: Synthetic oligonucleotide
  Antisense strand to SEQ ID NO: 1551428
aaacaucaggucagcuccu

SEQ ID NO: 1551430 - RNA, 19 nt, Artificial Sequence
  Description of Artificial Sequence: Synthetic oligonucleotide
  Sense strand starting at position 3326 of SEQ ID NO: 1245290
gugucaauaggagagugau

SEQ ID NO: 1551431 - RNA, 19 nt, Artificial Sequence
  Description of Artificial Sequence: Synthetic oligonucleotide
  Antisense strand to SEQ ID NO: 1551430
aucacucuccuauugacac

SEQ ID NO: 1551432 - RNA, 19 nt, Artificial Sequence
  Description of Artificial Sequence: Synthetic oligonucleotide
  Sense strand starting at position 3346 of SEQ ID NO: 1245290
auauuugaguuggaucuua

SEQ ID NO: 1551433 - RNA, 19 nt, Artificial Sequence
  Description of Artificial Sequence: Synthetic oligonucleotide
  Antisense strand to SEQ ID NO: 1551432
uaagauccaacucaaauau

SEQ ID NO: 1551434 - RNA, 19 nt, Artificial Sequence
  Description of Artificial Sequence: Synthetic oligonucleotide
  Sense strand starting at position 3494 of SEQ ID NO: 1245290
gccauauuaucucugggaa

SEQ ID NO: 1551435 - RNA, 19 nt, Artificial Sequence
  Description of Artificial Sequence: Synthetic oligonucleotide
  Antisense strand to SEQ ID NO: 1551434
uucccagagauaauauggc

SEQ ID NO: 1551436 - RNA, 19 nt, Artificial Sequence
  Description of Artificial Sequence: Synthetic oligonucleotide
  Sense strand starting at position 3495 of SEQ ID NO: 1245290
ccauauuaucucugggaag

SEQ ID NO: 1551437 - RNA, 19 nt, Artificial Sequence
  Description of Artificial Sequence: Synthetic oligonucleotide
  Antisense strand to SEQ ID NO: 1551436
cuucccagagauaauaugg

SEQ ID NO: 1551438 - RNA, 19 nt, Artificial Sequence
  Description of Artificial Sequence: Synthetic oligonucleotide
  Sense strand starting at position 3682 of SEQ ID NO: 1245290
gaggcaucagcaggaaauu

SEQ ID NO: 1551439 - RNA, 19 nt, Artificial Sequence
  Description of Artificial Sequence: Synthetic oligonucleotide
  Antisense strand to SEQ ID NO: 1551438
aauuuccugcugaugccuc

SEQ ID NO: 1551440 - RNA, 19 nt, Artificial Sequence
  Description of Artificial Sequence: Synthetic oligonucleotide
  Sense strand starting at position 3786 of SEQ ID NO: 1245290
ggcugaauuccuugaccca

SEQ ID NO: 1551441 - RNA, 19 nt, Artificial Sequence
  Description of Artificial Sequence: Synthetic oligonucleotide
  Antisense strand to SEQ ID NO: 1551440
ugggucaaggaauucagcc

SEQ ID NO: 1551442 - RNA, 19 nt, Artificial Sequence
  Description of Artificial Sequence: Synthetic oligonucleotide
  Sense strand starting at position 3787 of SEQ ID NO: 1245290
gcugaauuccuugacccaa

SEQ ID NO: 1551443 - RNA, 19 nt, Artificial Sequence
  Description of Artificial Sequence: Synthetic oligonucleotide
  Antisense strand to SEQ ID NO: 1551442
uugggucaaggaauucagc

SEQ ID NO: 1551444 - RNA, 19 nt, Artificial Sequence
  Description of Artificial Sequence: Synthetic oligonucleotide
  Sense strand starting at position 3814 of SEQ ID NO: 1245290
uguccugauggauagcaua

SEQ ID NO: 1551445 - RNA, 19 nt, Artificial Sequence
  Description of Artificial Sequence: Synthetic oligonucleotide
  Antisense strand to SEQ ID NO: 1551444
uaugcuauccaucaggaca

SEQ ID NO: 1551446 - RNA, 19 nt, Artificial Sequence
  Description of Artificial Sequence: Synthetic oligonucleotide
  Sense strand starting at position 3875 of SEQ ID NO: 1245290
gucuguaguuauccaggaa

SEQ ID NO: 1551447 - RNA, 19 nt, Artificial Sequence
  Description of Artificial Sequence: Synthetic oligonucleotide
  Antisense strand to SEQ ID NO: 1551446
uuccuggauaacuacagac

SEQ ID NO: 1551448 - RNA, 19 nt, Artificial Sequence
  Description of Artificial Sequence: Synthetic oligonucleotide
  Sense strand starting at position 3876 of SEQ ID NO: 1245290
ucuguaguuauccaggaag

SEQ ID NO: 1551449 - RNA, 19 nt, Artificial Sequence
  Description of Artificial Sequence: Synthetic oligonucleotide
  Antisense strand to SEQ ID NO: 1551448
cuuccuggauaacuacaga

SEQ ID NO: 1551450 - RNA, 19 nt, Artificial Sequence
  Description of Artificial Sequence: Synthetic oligonucleotide
  Sense strand starting at position 3878 of SEQ ID NO: 1245290
uguaguuauccaggaagga

SEQ ID NO: 1551451 - RNA, 19 nt, Artificial Sequence
  Description of Artificial Sequence: Synthetic oligonucleotide
  Antisense strand to SEQ ID NO: 1551450
uccuuccuggauaacuaca

SEQ ID NO: 1551452 - RNA, 19 nt, Artificial Sequence
  Description of Artificial Sequence: Synthetic oligonucleotide
  Sense strand starting at position 3888 of SEQ ID NO: 1245290
caggaaggaagguguuaau

SEQ ID NO: 1551453 - RNA, 19 nt, Artificial Sequence
  Description of Artificial Sequence: Synthetic oligonucleotide
  Antisense strand to SEQ ID NO: 1551452
auuaacaccuuccuuccug

SEQ ID NO: 1551454 - RNA, 19 nt, Artificial Sequence
  Description of Artificial Sequence: Synthetic oligonucleotide
  Sense strand starting at position 3895 of SEQ ID NO: 1245290
gaagguguuaauuacggau

SEQ ID NO: 1551455 - RNA, 19 nt, Artificial Sequence
  Description of Artificial Sequence: Synthetic oligonucleotide
  Antisense strand to SEQ ID NO: 1551454
auccguaauuaacaccuuc

SEQ ID NO: 1551456 - RNA, 19 nt, Artificial Sequence
  Description of Artificial Sequence: Synthetic oligonucleotide
  Sense strand starting at position 3964 of SEQ ID NO: 1245290
auaacuugucaaugauguu

SEQ ID NO: 1551457 - RNA, 19 nt, Artificial Sequence
  Description of Artificial Sequence: Synthetic oligonucleotide
  Antisense strand to SEQ ID NO: 1551456
aacaucauugacaaguuau

SEQ ID NO: 1551458 - RNA, 19 nt, Artificial Sequence
  Description of Artificial Sequence: Synthetic oligonucleotide
  Sense strand starting at position 30 of SEQ ID NO: 1245291
aguagaacuugugaauaau

SEQ ID NO: 1551459 - RNA, 19 nt, Artificial Sequence
  Description of Artificial Sequence: Synthetic oligonucleotide
  Antisense strand to SEQ ID NO: 1551458
auuauucacaaguucuacu

SEQ ID NO: 1551460 - RNA, 19 nt, Artificial Sequence
  Description of Artificial Sequence: Synthetic oligonucleotide
  Sense strand starting at position 92 of SEQ ID NO: 1245291
acacguuuacacuauuaag

SEQ ID NO: 1551461 - RNA, 19 nt, Artificial Sequence
  Description of Artificial Sequence: Synthetic oligonucleotide
  Antisense strand to SEQ ID NO: 1551460
cuuaauaguguaaacgugu

SEQ ID NO: 1551462 - RNA, 19 nt, Artificial Sequence
  Description of Artificial Sequence: Synthetic oligonucleotide
  Sense strand starting at position 119 of SEQ ID NO: 1245291
gcucacauuucugaaguga

SEQ ID NO: 1551463 - RNA, 19 nt, Artificial Sequence
  Description of Artificial Sequence: Synthetic oligonucleotide
  Antisense strand to SEQ ID NO: 1551462
ucacuucagaaaugugagc

SEQ ID NO: 1551464 - RNA, 19 nt, Artificial Sequence
  Description of Artificial Sequence: Synthetic oligonucleotide
  Sense strand starting at position 155 of SEQ ID NO: 1245291
agugccucagcuuguuaau

SEQ ID NO: 1551465 - RNA, 19 nt, Artificial Sequence
  Description of Artificial Sequence: Synthetic oligonucleotide
  Antisense strand to SEQ ID NO: 1551464
auuaacaagcugaggcacu

SEQ ID NO: 1551466 - RNA, 19 nt, Artificial Sequence
  Description of Artificial Sequence: Synthetic oligonucleotide
  Sense strand starting at position 156 of SEQ ID NO: 1245291
gugccucagcuuguuaauu

SEQ ID NO: 1551467 - RNA, 19 nt, Artificial Sequence
  Description of Artificial Sequence: Synthetic oligonucleotide
  Antisense strand to SEQ ID NO: 1551466
aauuaacaagcugaggcac

SEQ ID NO: 1551468 - RNA, 19 nt, Artificial Sequence
  Description of Artificial Sequence: Synthetic oligonucleotide
  Sense strand starting at position 161 of SEQ ID NO: 1245291
ucagcuuguuaauuguuaa

SEQ ID NO: 1551469 - RNA, 19 nt, Artificial Sequence
  Description of Artificial Sequence: Synthetic oligonucleotide
  Antisense strand to SEQ ID NO: 1551468
uuaacaauuaacaagcuga

SEQ ID NO: 1551470 - RNA, 19 nt, Artificial Sequence
  Description of Artificial Sequence: Synthetic oligonucleotide
  Sense strand starting at position 253 of SEQ ID NO: 1245291
cuacaaagcugagaaguau

SEQ ID NO: 1551471 - RNA, 19 nt, Artificial Sequence
  Description of Artificial Sequence: Synthetic oligonucleotide
  Antisense strand to SEQ ID NO: 1551470
auacuucucagcuuuguag

SEQ ID NO: 1551472 - RNA, 19 nt, Artificial Sequence
  Description of Artificial Sequence: Synthetic oligonucleotide
  Sense strand starting at position 268 of SEQ ID NO: 1245291
guauuuacauuguugcauu

SEQ ID NO: 1551473 - RNA, 19 nt, Artificial Sequence
  Description of Artificial Sequence: Synthetic oligonucleotide
  Antisense strand to SEQ ID NO: 1551472
aaugcaacaauguaaauac

SEQ ID NO: 1551474 - RNA, 19 nt, Artificial Sequence
  Description of Artificial Sequence: Synthetic oligonucleotide
  Sense strand starting at position 389 of SEQ ID NO: 1245291
cugucuuucucauucggca

SEQ ID NO: 1551475 - RNA, 19 nt, Artificial Sequence
  Description of Artificial Sequence: Synthetic oligonucleotide
  Antisense strand to SEQ ID NO: 1551474
ugccgaaugagaaagacag

SEQ ID NO: 1551476 - RNA, 19 nt, Artificial Sequence
  Description of Artificial Sequence: Synthetic oligonucleotide
  Sense strand starting at position 391 of SEQ ID NO: 1245291
gucuuucucauucggcaga

SEQ ID NO: 1551477 - RNA, 19 nt, Artificial Sequence
  Description of Artificial Sequence: Synthetic oligonucleotide
  Antisense strand to SEQ ID NO: 1551476
ucugccgaaugagaaagac

SEQ ID NO: 1551478 - RNA, 19 nt, Artificial Sequence
  Description of Artificial Sequence: Synthetic oligonucleotide
  Sense strand starting at position 393 of SEQ ID NO: 1245291
cuuucucauucggcagaaa

SEQ ID NO: 1551479 - RNA, 19 nt, Artificial Sequence
  Description of Artificial Sequence: Synthetic oligonucleotide
  Antisense strand to SEQ ID NO: 1551478
uuucugccgaaugagaaag

SEQ ID NO: 1551480 - RNA, 19 nt, Artificial Sequence
  Description of Artificial Sequence: Synthetic oligonucleotide
  Sense strand starting at position 394 of SEQ ID NO: 1245291
uuucucauucggcagaaau

SEQ ID NO: 1551481 - RNA, 19 nt, Artificial Sequence
  Description of Artificial Sequence: Synthetic oligonucleotide
  Antisense strand to SEQ ID NO: 1551480
auuucugccgaaugagaaa

SEQ ID NO: 1551482 - RNA, 19 nt, Artificial Sequence
  Description of Artificial Sequence: Synthetic oligonucleotide
  Sense strand starting at position 396 of SEQ ID NO: 1245291
ucucauucggcagaaauaa

SEQ ID NO: 1551483 - RNA, 19 nt, Artificial Sequence
  Description of Artificial Sequence: Synthetic oligonucleotide
  Antisense strand to SEQ ID NO: 1551482
uuauuucugccgaaugaga

SEQ ID NO: 1551484 - RNA, 19 nt, Artificial Sequence
  Description of Artificial Sequence: Synthetic oligonucleotide
  Sense strand starting at position 425 of SEQ ID NO: 1245291
uugaucauguagucauuga

SEQ ID NO: 1551485 - RNA, 19 nt, Artificial Sequence
  Description of Artificial Sequence: Synthetic oligonucleotide
  Antisense strand to SEQ ID NO: 1551484
ucaaugacuacaugaucaa

SEQ ID NO: 1551486 - RNA, 19 nt, Artificial Sequence
  Description of Artificial Sequence: Synthetic oligonucleotide
  Sense strand starting at position 433 of SEQ ID NO: 1245291
guagucauugagggcgaua

SEQ ID NO: 1551487 - RNA, 19 nt, Artificial Sequence
  Description of Artificial Sequence: Synthetic oligonucleotide
  Antisense strand to SEQ ID NO: 1551486
uaucgcccucaaugacuac

SEQ ID NO: 1551488 - RNA, 19 nt, Artificial Sequence
  Description of Artificial Sequence: Synthetic oligonucleotide
  Sense strand starting at position 435 of SEQ ID NO: 1245291
agucauugagggcgauaca

SEQ ID NO: 1551489 - RNA, 19 nt, Artificial Sequence
  Description of Artificial Sequence: Synthetic oligonucleotide
  Antisense strand to SEQ ID NO: 1551488
uguaucgcccucaaugacu

SEQ ID NO: 1551490 - RNA, 19 nt, Artificial Sequence
  Description of Artificial Sequence: Synthetic oligonucleotide
  Sense strand starting at position 436 of SEQ ID NO: 1245291
gucauugagggcgauacaa

SEQ ID NO: 1551491 - RNA, 19 nt, Artificial Sequence
  Description of Artificial Sequence: Synthetic oligonucleotide
  Antisense strand to SEQ ID NO: 1551490
uuguaucgcccucaaugac

SEQ ID NO: 1551492 - RNA, 19 nt, Artificial Sequence
  Description of Artificial Sequence: Synthetic oligonucleotide
  Sense strand starting at position 457 of SEQ ID NO: 1245291
caaaccaagugugagaaau

SEQ ID NO: 1551493 - RNA, 19 nt, Artificial Sequence
  Description of Artificial Sequence: Synthetic oligonucleotide
  Antisense strand to SEQ ID NO: 1551492
auuucucacacuugguuug

SEQ ID NO: 1551494 - RNA, 19 nt, Artificial Sequence
  Description of Artificial Sequence: Synthetic oligonucleotide
  Sense strand starting at position 468 of SEQ ID NO: 1245291
ugagaaauucuaugugaug

SEQ ID NO: 1551495 - RNA, 19 nt, Artificial Sequence
  Description of Artificial Sequence: Synthetic oligonucleotide
  Antisense strand to SEQ ID NO: 1551494
caucacauagaauuucuca

SEQ ID NO: 1551496 - RNA, 19 nt, Artificial Sequence
  Description of Artificial Sequence: Synthetic oligonucleotide
  Sense strand starting at position 471 of SEQ ID NO: 1245291
gaaauucuaugugaugaag

SEQ ID NO: 1551497 - RNA, 19 nt, Artificial Sequence
  Description of Artificial Sequence: Synthetic oligonucleotide
  Antisense strand to SEQ ID NO: 1551496
cuucaucacauagaauuuc

SEQ ID NO: 1551498 - RNA, 19 nt, Artificial Sequence
  Description of Artificial Sequence: Synthetic oligonucleotide
  Sense strand starting at position 473 of SEQ ID NO: 1245291
aauucuaugugaugaagua

SEQ ID NO: 1551499 - RNA, 19 nt, Artificial Sequence
  Description of Artificial Sequence: Synthetic oligonucleotide
  Antisense strand to SEQ ID NO: 1551498
uacuucaucacauagaauu

SEQ ID NO: 1551500 - RNA, 19 nt, Artificial Sequence
  Description of Artificial Sequence: Synthetic oligonucleotide
  Sense strand starting at position 575 of SEQ ID NO: 1245291
gcauaucgccuguucucau

SEQ ID NO: 1551501 - RNA, 19 nt, Artificial Sequence
  Description of Artificial Sequence: Synthetic oligonucleotide
  Antisense strand to SEQ ID NO: 1551500
augagaacaggcgauaugc

SEQ ID NO: 1551502 - RNA, 19 nt, Artificial Sequence
  Description of Artificial Sequence: Synthetic oligonucleotide
  Sense strand starting at position 599 of SEQ ID NO: 1245291
cugacuuggcuacacagau

SEQ ID NO: 1551503 - RNA, 19 nt, Artificial Sequence
  Description of Artificial Sequence: Synthetic oligonucleotide
  Antisense strand to SEQ ID NO: 1551502
aucuguguagccaagucag

SEQ ID NO: 1551504 - RNA, 19 nt, Artificial Sequence
  Description of Artificial Sequence: Synthetic oligonucleotide
  Sense strand starting at position 734 of SEQ ID NO: 1245291
gugucuacccgcuuuguca

SEQ ID NO: 1551505 - RNA, 19 nt, Artificial Sequence
  Description of Artificial Sequence: Synthetic oligonucleotide
  Antisense strand to SEQ ID NO: 1551504
ugacaaagcggguagacac

SEQ ID NO: 1551506 - RNA, 19 nt, Artificial Sequence
  Description of Artificial Sequence: Synthetic oligonucleotide
  Sense strand starting at position 736 of SEQ ID NO: 1245291
gucuacccgcuuugucaaa

SEQ ID NO: 1551507 - RNA, 19 nt, Artificial Sequence
  Description of Artificial Sequence: Synthetic oligonucleotide
  Antisense strand to SEQ ID NO: 1551506
uuugacaaagcggguagac

SEQ ID NO: 1551508 - RNA, 19 nt, Artificial Sequence
  Description of Artificial Sequence: Synthetic oligonucleotide
  Sense strand starting at position 804 of SEQ ID NO: 1245291
acagucucauucucagagu

SEQ ID NO: 1551509 - RNA, 19 nt, Artificial Sequence
  Description of Artificial Sequence: Synthetic oligonucleotide
  Antisense strand to SEQ ID NO: 1551508
acucugagaaugagacugu

SEQ ID NO: 1551510 - RNA, 19 nt, Artificial Sequence
  Description of Artificial Sequence: Synthetic oligonucleotide
  Sense strand starting at position 807 of SEQ ID NO: 1245291
gucucauucucagaguaaa

SEQ ID NO: 1551511 - RNA, 19 nt, Artificial Sequence
  Description of Artificial Sequence: Synthetic oligonucleotide
  Antisense strand to SEQ ID NO: 1551510
uuuacucugagaaugagac

SEQ ID NO: 1551512 - RNA, 19 nt, Artificial Sequence
  Description of Artificial Sequence: Synthetic oligonucleotide
  Sense strand starting at position 1139 of SEQ ID NO: 1245291
uuggauguuucgaagagga

SEQ ID NO: 1551513 - RNA, 19 nt, Artificial Sequence
  Description of Artificial Sequence: Synthetic oligonucleotide
  Antisense strand to SEQ ID NO: 1551512
uccucuucgaaacauccaa

SEQ ID NO: 1551514 - RNA, 19 nt, Artificial Sequence
  Description of Artificial Sequence: Synthetic oligonucleotide
  Sense strand starting at position 1159 of SEQ ID NO: 1245291
gcuccuaccagcgaaauga

SEQ ID NO: 1551515 - RNA, 19 nt, Artificial Sequence
  Description of Artificial Sequence: Synthetic oligonucleotide
  Antisense strand to SEQ ID NO: 1551514
ucauuucgcugguaggagc

SEQ ID NO: 1551516 - RNA, 19 nt, Artificial Sequence
  Description of Artificial Sequence: Synthetic oligonucleotide
  Sense strand starting at position 1704 of SEQ ID NO: 1245291
guuuacuucgcccacaacu

SEQ ID NO: 1551517 - RNA, 19 nt, Artificial Sequence
  Description of Artificial Sequence: Synthetic oligonucleotide
  Antisense strand to SEQ ID NO: 1551516
aguugugggcgaaguaaac

SEQ ID NO: 1551518 - RNA, 19 nt, Artificial Sequence
  Description of Artificial Sequence: Synthetic oligonucleotide
  Sense strand starting at position 2138 of SEQ ID NO: 1245291
gagcaauuaggcuggugaa

SEQ ID NO: 1551519 - RNA, 19 nt, Artificial Sequence
  Description of Artificial Sequence: Synthetic oligonucleotide
  Antisense strand to SEQ ID NO: 1551518
uucaccagccuaauugcuc

SEQ ID NO: 1551520 - RNA, 19 nt, Artificial Sequence
  Description of Artificial Sequence: Synthetic oligonucleotide
  Sense strand starting at position 2139 of SEQ ID NO: 1245291
agcaauuaggcuggugaau

SEQ ID NO: 1551521 - RNA, 19 nt, Artificial Sequence
  Description of Artificial Sequence: Synthetic oligonucleotide
  Antisense strand to SEQ ID NO: 1551520
auucaccagccuaauugcu

SEQ ID NO: 1551522 - RNA, 19 nt, Artificial Sequence
  Description of Artificial Sequence: Synthetic oligonucleotide
  Sense strand starting at position 2141 of SEQ ID NO: 1245291
caauuaggcuggugaauaa

SEQ ID NO: 1551523 - RNA, 19 nt, Artificial Sequence
  Description of Artificial Sequence: Synthetic oligonucleotide
  Antisense strand to SEQ ID NO: 1551522
uuauucaccagccuaauug

SEQ ID NO: 1551524 - RNA, 19 nt, Artificial Sequence
  Description of Artificial Sequence: Synthetic oligonucleotide
  Sense strand starting at position 2152 of SEQ ID NO: 1245291
gugaauaaugcauggccau

SEQ ID NO: 1551525 - RNA, 19 nt, Artificial Sequence
  Description of Artificial Sequence: Synthetic oligonucleotide
  Antisense strand to SEQ ID NO: 1551524
auggccaugcauuauucac

SEQ ID NO: 1551526 - RNA, 19 nt, Artificial Sequence
  Description of Artificial Sequence: Synthetic oligonucleotide
  Sense strand starting at position 2153 of SEQ ID NO: 1245291
ugaauaaugcauggccauu

SEQ ID NO: 1551527 - RNA, 19 nt, Artificial Sequence
  Description of Artificial Sequence: Synthetic oligonucleotide
  Antisense strand to SEQ ID NO: 1551526
aauggccaugcauuauuca

SEQ ID NO: 1551528 - RNA, 19 nt, Artificial Sequence
  Description of Artificial Sequence: Synthetic oligonucleotide
  Sense strand starting at position 3044 of SEQ ID NO: 1245291
gccggcggcuucuuaaaua

SEQ ID NO: 1551529 - RNA, 19 nt, Artificial Sequence
  Description of Artificial Sequence: Synthetic oligonucleotide
  Antisense strand to SEQ ID NO: 1551528
uauuuaagaagccgccggc

SEQ ID NO: 1551530 - RNA, 19 nt, Artificial Sequence
  Description of Artificial Sequence: Synthetic oligonucleotide
  Sense strand starting at position 3798 of SEQ ID NO: 1245291
gccugccuuuaauugugua

SEQ ID NO: 1551531 - RNA, 19 nt, Artificial Sequence
  Description of Artificial Sequence: Synthetic oligonucleotide
  Antisense strand to SEQ ID NO: 1551530
uacacaauuaaaggcaggc

SEQ ID NO: 1551532 - RNA, 19 nt, Artificial Sequence
  Description of Artificial Sequence: Synthetic oligonucleotide
  Sense strand starting at position 3802 of SEQ ID NO: 1245291
gccuuuaauuguguaaguu

SEQ ID NO: 1551533 - RNA, 19 nt, Artificial Sequence
  Description of Artificial Sequence: Synthetic oligonucleotide
  Antisense strand to SEQ ID NO: 1551532
aacuuacacaauuaaaggc

SEQ ID NO: 1551534 - RNA, 19 nt, Artificial Sequence
  Description of Artificial Sequence: Synthetic oligonucleotide
  Sense strand starting at position 3803 of SEQ ID NO: 1245291
ccuuuaauuguguaaguuu

SEQ ID NO: 1551535 - RNA, 19 nt, Artificial Sequence
  Description of Artificial Sequence: Synthetic oligonucleotide
  Antisense strand to SEQ ID NO: 1551534
aaacuuacacaauuaaagg

SEQ ID NO: 1551536 - RNA, 19 nt, Artificial Sequence
  Description of Artificial Sequence: Synthetic oligonucleotide
  Sense strand starting at position 3833 of SEQ ID NO: 1245291
agcuuuggguuccaggaaa

SEQ ID NO: 1551537 - RNA, 19 nt, Artificial Sequence
  Description of Artificial Sequence: Synthetic oligonucleotide
  Antisense strand to SEQ ID NO: 1551536
uuuccuggaacccaaagcu

SEQ ID NO: 1551538 - RNA, 19 nt, Artificial Sequence
  Description of Artificial Sequence: Synthetic oligonucleotide
  Sense strand starting at position 371 of SEQ ID NO: 1245292
ggcaaacugguuuagggau

SEQ ID NO: 1551539 - RNA, 19 nt, Artificial Sequence
  Description of Artificial Sequence: Synthetic oligonucleotide
  Antisense strand to SEQ ID NO: 1551538
aucccuaaaccaguuugcc

SEQ ID NO: 1551540 - RNA, 19 nt, Artificial Sequence
  Description of Artificial Sequence: Synthetic oligonucleotide
  Sense strand starting at position 414 of SEQ ID NO: 1245292
ucugacagucugcaauuau

SEQ ID NO: 1551541 - RNA, 19 nt, Artificial Sequence
  Description of Artificial Sequence: Synthetic oligonucleotide
  Antisense strand to SEQ ID NO: 1551540
auaauugcagacugucaga

SEQ ID NO: 1551542 - RNA, 19 nt, Artificial Sequence
  Description of Artificial Sequence: Synthetic oligonucleotide
  Sense strand starting at position 509 of SEQ ID NO: 1245292
cugcuuccuggaggauauu

SEQ ID NO: 1551543 - RNA, 19 nt, Artificial Sequence
  Description of Artificial Sequence: Synthetic oligonucleotide
  Antisense strand to SEQ ID NO: 1551542
aauauccuccaggaagcag

SEQ ID NO: 1551544 - RNA, 19 nt, Artificial Sequence
  Description of Artificial Sequence: Synthetic oligonucleotide
  Sense strand starting at position 527 of SEQ ID NO: 1245292
ucuugugaacagcaucaau

SEQ ID NO: 1551545 - RNA, 19 nt, Artificial Sequence
  Description of Artificial Sequence: Synthetic oligonucleotide
  Antisense strand to SEQ ID NO: 1551544
auugaugcuguucacaaga

SEQ ID NO: 1551546 - RNA, 19 nt, Artificial Sequence
  Description of Artificial Sequence: Synthetic oligonucleotide
  Sense strand starting at position 577 of SEQ ID NO: 1245292
uggugauaaucucuacuac

SEQ ID NO: 1551547 - RNA, 19 nt, Artificial Sequence
  Description of Artificial Sequence: Synthetic oligonucleotide
  Antisense strand to SEQ ID NO: 1551546
guaguagagauuaucacca

SEQ ID NO: 1551548 - RNA, 19 nt, Artificial Sequence
  Description of Artificial Sequence: Synthetic oligonucleotide
  Sense strand starting at position 652 of SEQ ID NO: 1245292
ccuaaacacgguugaugaa

SEQ ID NO: 1551549 - RNA, 19 nt, Artificial Sequence
  Description of Artificial Sequence: Synthetic oligonucleotide
  Antisense strand to SEQ ID NO: 1551548
uucaucaaccguguuuagg

SEQ ID NO: 1551550 - RNA, 19 nt, Artificial Sequence
  Description of Artificial Sequence: Synthetic oligonucleotide
  Sense strand starting at position 1089 of SEQ ID NO: 1245292
gacagugaugauggccaau

SEQ ID NO: 1551551 - RNA, 19 nt, Artificial Sequence
  Description of Artificial Sequence: Synthetic oligonucleotide
  Antisense strand to SEQ ID NO: 1551550
auuggccaucaucacuguc

SEQ ID NO: 1551552 - RNA, 19 nt, Artificial Sequence
  Description of Artificial Sequence: Synthetic oligonucleotide
  Sense strand starting at position 1091 of SEQ ID NO: 1245292
cagugaugauggccaauaa

SEQ ID NO: 1551553 - RNA, 19 nt, Artificial Sequence
  Description of Artificial Sequence: Synthetic oligonucleotide
  Antisense strand to SEQ ID NO: 1551552
uuauuggccaucaucacug

SEQ ID NO: 1551554 - RNA, 19 nt, Artificial Sequence
  Description of Artificial Sequence: Synthetic oligonucleotide
  Sense strand starting at position 1252 of SEQ ID NO: 1245292
ucuggaaucucgcugggaa

SEQ ID NO: 1551555 - RNA, 19 nt, Artificial Sequence
  Description of Artificial Sequence: Synthetic oligonucleotide
  Antisense strand to SEQ ID NO: 1551554
uucccagcgagauuccaga

SEQ ID NO: 1551556 - RNA, 19 nt, Artificial Sequence
  Description of Artificial Sequence: Synthetic oligonucleotide
  Sense strand starting at position 1253 of SEQ ID NO: 1245292
cuggaaucucgcugggaac

SEQ ID NO: 1551557 - RNA, 19 nt, Artificial Sequence
  Description of Artificial Sequence: Synthetic oligonucleotide
  Antisense strand to SEQ ID NO: 1551556
guucccagcgagauuccag

SEQ ID NO: 1551558 - RNA, 19 nt, Artificial Sequence
  Description of Artificial Sequence: Synthetic oligonucleotide
  Sense strand starting at position 1254 of SEQ ID NO: 1245292
uggaaucucgcugggaaca

SEQ ID NO: 1551559 - RNA, 19 nt, Artificial Sequence
  Description of Artificial Sequence: Synthetic oligonucleotide
  Antisense strand to SEQ ID NO: 1551558
uguucccagcgagauucca

SEQ ID NO: 1551560 - RNA, 19 nt, Artificial Sequence
  Description of Artificial Sequence: Synthetic oligonucleotide
  Sense strand starting at position 1325 of SEQ ID NO: 1245292
gagcauuauuuagucccga

SEQ ID NO: 1551561 - RNA, 19 nt, Artificial Sequence
  Description of Artificial Sequence: Synthetic oligonucleotide
  Antisense strand to SEQ ID NO: 1551560
ucgggacuaaauaaugcuc

SEQ ID NO: 1551562 - RNA, 19 nt, Artificial Sequence
  Description of Artificial Sequence: Synthetic oligonucleotide
  Sense strand starting at position 1548 of SEQ ID NO: 1245292
gucguucaccgagucaucu

SEQ ID NO: 1551563 - RNA, 19 nt, Artificial Sequence
  Description of Artificial Sequence: Synthetic oligonucleotide
  Antisense strand to SEQ ID NO: 1551562
agaugacucggugaacgac

SEQ ID NO: 1551564 - RNA, 19 nt, Artificial Sequence
  Description of Artificial Sequence: Synthetic oligonucleotide
  Sense strand starting at position 2544 of SEQ ID NO: 1245292
acuuguaugcaaggaagua

SEQ ID NO: 1551565 - RNA, 19 nt, Artificial Sequence
  Description of Artificial Sequence: Synthetic oligonucleotide
  Antisense strand to SEQ ID NO: 1551564
uacuuccuugcauacaagu

SEQ ID NO: 1551566 - RNA, 19 nt, Artificial Sequence
  Description of Artificial Sequence: Synthetic oligonucleotide
  Sense strand starting at position 2545 of SEQ ID NO: 1245292
cuuguaugcaaggaaguau

SEQ ID NO: 1551567 - RNA, 19 nt, Artificial Sequence
  Description of Artificial Sequence: Synthetic oligonucleotide
  Antisense strand to SEQ ID NO: 1551566
auacuuccuugcauacaag

SEQ ID NO: 1551568 - RNA, 19 nt, Artificial Sequence
  Description of Artificial Sequence: Synthetic oligonucleotide
  Sense strand starting at position 2565 of SEQ ID NO: 1245292
uuugaaugccuugaccaua

SEQ ID NO: 1551569 - RNA, 19 nt, Artificial Sequence
  Description of Artificial Sequence: Synthetic oligonucleotide
  Antisense strand to SEQ ID NO: 1551568
uauggucaaggcauucaaa

SEQ ID NO: 1551570 - RNA, 19 nt, Artificial Sequence
  Description of Artificial Sequence: Synthetic oligonucleotide
  Sense strand starting at position 2577 of SEQ ID NO: 1245292
gaccauaauuggguugcaa

SEQ ID NO: 1551571 - RNA, 19 nt, Artificial Sequence
  Description of Artificial Sequence: Synthetic oligonucleotide
  Antisense strand to SEQ ID NO: 1551570
uugcaacccaauuaugguc

SEQ ID NO: 1551572 - RNA, 19 nt, Artificial Sequence
  Description of Artificial Sequence: Synthetic oligonucleotide
  Sense strand starting at position 2579 of SEQ ID NO: 1245292
ccauaauuggguugcaaua

SEQ ID NO: 1551573 - RNA, 19 nt, Artificial Sequence
  Description of Artificial Sequence: Synthetic oligonucleotide
  Antisense strand to SEQ ID NO: 1551572
uauugcaacccaauuaugg

SEQ ID NO: 1551574 - RNA, 19 nt, Artificial Sequence
  Description of Artificial Sequence: Synthetic oligonucleotide
  Sense strand starting at position 2586 of SEQ ID NO: 1245292
uggguugcaauagauauua

SEQ ID NO: 1551575 - RNA, 19 nt, Artificial Sequence
  Description of Artificial Sequence: Synthetic oligonucleotide
  Antisense strand to SEQ ID NO: 1551574
uaauaucuauugcaaccca

SEQ ID NO: 1551576 - RNA, 19 nt, Artificial Sequence
  Description of Artificial Sequence: Synthetic oligonucleotide
  Sense strand starting at position 2686 of SEQ ID NO: 1245292
guggaaaugaguggaauau

SEQ ID NO: 1551577 - RNA, 19 nt, Artificial Sequence
  Description of Artificial Sequence: Synthetic oligonucleotide
  Antisense strand to SEQ ID NO: 1551576
auauuccacucauuuccac

SEQ ID NO: 1551578 - RNA, 19 nt, Artificial Sequence
  Description of Artificial Sequence: Synthetic oligonucleotide
  Sense strand starting at position 2727 of SEQ ID NO: 1245292
aguccuagaucaucacagu

SEQ ID NO: 1551579 - RNA, 19 nt, Artificial Sequence
  Description of Artificial Sequence: Synthetic oligonucleotide
  Antisense strand to SEQ ID NO: 1551578
acugugaugaucuaggacu

SEQ ID NO: 1551580 - RNA, 19 nt, Artificial Sequence
  Description of Artificial Sequence: Synthetic oligonucleotide
  Sense strand starting at position 2728 of SEQ ID NO: 1245292
guccuagaucaucacaguu

SEQ ID NO: 1551581 - RNA, 19 nt, Artificial Sequence
  Description of Artificial Sequence: Synthetic oligonucleotide
  Antisense strand to SEQ ID NO: 1551580
aacugugaugaucuaggac

SEQ ID NO: 1551582 - RNA, 19 nt, Artificial Sequence
  Description of Artificial Sequence: Synthetic oligonucleotide
  Sense strand starting at position 2860 of SEQ ID NO: 1245292
guucuaggcacuugagaaa

SEQ ID NO: 1551583 - RNA, 19 nt, Artificial Sequence
  Description of Artificial Sequence: Synthetic oligonucleotide
  Antisense strand to SEQ ID NO: 1551582
uuucucaagugccuagaac

SEQ ID NO: 1551584 - RNA, 19 nt, Artificial Sequence
  Description of Artificial Sequence: Synthetic oligonucleotide
  Sense strand starting at position 2947 of SEQ ID NO: 1245292
auggauaauuuauacggua

SEQ ID NO: 1551585 - RNA, 19 nt, Artificial Sequence
  Description of Artificial Sequence: Synthetic oligonucleotide
  Antisense strand to SEQ ID NO: 1551584
uaccguauaaauuauccau

SEQ ID NO: 1551586 - RNA, 19 nt, Artificial Sequence
  Description of Artificial Sequence: Synthetic oligonucleotide
  Sense strand starting at position 3030 of SEQ ID NO: 1245292
aaaggaucagguugcaauu

SEQ ID NO: 1551587 - RNA, 19 nt, Artificial Sequence
  Description of Artificial Sequence: Synthetic oligonucleotide
  Antisense strand to SEQ ID NO: 1551586
aauugcaaccugauccuuu

SEQ ID NO: 1551588 - RNA, 19 nt, Artificial Sequence
  Description of Artificial Sequence: Synthetic oligonucleotide
  Sense strand starting at position 3065 of SEQ ID NO: 1245292
cugacuuaccaugaagcua

SEQ ID NO: 1551589 - RNA, 19 nt, Artificial Sequence
  Description of Artificial Sequence: Synthetic oligonucleotide
  Antisense strand to SEQ ID NO: 1551588
uagcuucaugguaagucag

SEQ ID NO: 1551590 - RNA, 19 nt, Artificial Sequence
  Description of Artificial Sequence: Synthetic oligonucleotide
  Sense strand starting at position 3146 of SEQ ID NO: 1245292
uuaaccauagaauguguaa

SEQ ID NO: 1551591 - RNA, 19 nt, Artificial Sequence
  Description of Artificial Sequence: Synthetic oligonucleotide
  Antisense strand to SEQ ID NO: 1551590
uuacacauucuaugguuaa

SEQ ID NO: 1551592 - RNA, 19 nt, Artificial Sequence
  Description of Artificial Sequence: Synthetic oligonucleotide
  Sense strand starting at position 3189 of SEQ ID NO: 1245292
auugcuauugguuaagagu

SEQ ID NO: 1551593 - RNA, 19 nt, Artificial Sequence
  Description of Artificial Sequence: Synthetic oligonucleotide
  Antisense strand to SEQ ID NO: 1551592
acucuuaaccaauagcaau

SEQ ID NO: 1551594 - RNA, 19 nt, Artificial Sequence
  Description of Artificial Sequence: Synthetic oligonucleotide
  Sense strand starting at position 3316 of SEQ ID NO: 1245292
uugguuugaguuuagugaa

SEQ ID NO: 1551595 - RNA, 19 nt, Artificial Sequence
  Description of Artificial Sequence: Synthetic oligonucleotide
  Antisense strand to SEQ ID NO: 1551594
uucacuaaacucaaaccaa

SEQ ID NO: 1551596 - RNA, 19 nt, Artificial Sequence
  Description of Artificial Sequence: Synthetic oligonucleotide
  Sense strand starting at position 3447 of SEQ ID NO: 1245292
ggaaguggcaucugauaug

SEQ ID NO: 1551597 - RNA, 19 nt, Artificial Sequence
  Description of Artificial Sequence: Synthetic oligonucleotide
  Antisense strand to SEQ ID NO: 1551596
cauaucagaugccacuucc

SEQ ID NO: 1551598 - RNA, 19 nt, Artificial Sequence
  Description of Artificial Sequence: Synthetic oligonucleotide
  Sense strand starting at position 3452 of SEQ ID NO: 1245292
uggcaucugauaugaaagu

SEQ ID NO: 1551599 - RNA, 19 nt, Artificial Sequence
  Description of Artificial Sequence: Synthetic oligonucleotide
  Antisense strand to SEQ ID NO: 1551598
acuuucauaucagaugcca

SEQ ID NO: 1551600 - RNA, 19 nt, Artificial Sequence
  Description of Artificial Sequence: Synthetic oligonucleotide
  Sense strand starting at position 3458 of SEQ ID NO: 1245292
cugauaugaaaguguucug

SEQ ID NO: 1551601 - RNA, 19 nt, Artificial Sequence
  Description of Artificial Sequence: Synthetic oligonucleotide
  Antisense strand to SEQ ID NO: 1551600
cagaacacuuucauaucag

SEQ ID NO: 1551602 - RNA, 19 nt, Artificial Sequence
  Description of Artificial Sequence: Synthetic oligonucleotide
  Sense strand starting at position 3478 of SEQ ID NO: 1245292
agcacuugaccuuggaaau

SEQ ID NO: 1551603 - RNA, 19 nt, Artificial Sequence
  Description of Artificial Sequence: Synthetic oligonucleotide
  Antisense strand to SEQ ID NO: 1551602
auuuccaaggucaagugcu

SEQ ID NO: 1551604 - RNA, 19 nt, Artificial Sequence
  Description of Artificial Sequence: Synthetic oligonucleotide
  Sense strand starting at position 3479 of SEQ ID NO: 1245292
gcacuugaccuuggaaaua

SEQ ID NO: 1551605 - RNA, 19 nt, Artificial Sequence
  Description of Artificial Sequence: Synthetic oligonucleotide
  Antisense strand to SEQ ID NO: 1551604
uauuuccaaggucaagugc

SEQ ID NO: 1551606 - RNA, 19 nt, Artificial Sequence
  Description of Artificial Sequence: Synthetic oligonucleotide
  Sense strand starting at position 3529 of SEQ ID NO: 1245292
uguacagauccagaagcua

SEQ ID NO: 1551607 - RNA, 19 nt, Artificial Sequence
  Description of Artificial Sequence: Synthetic oligonucleotide
  Antisense strand to SEQ ID NO: 1551606
uagcuucuggaucuguaca

SEQ ID NO: 1551608 - RNA, 19 nt, Artificial Sequence
  Description of Artificial Sequence: Synthetic oligonucleotide
  Sense strand starting at position 3597 of SEQ ID NO: 1245292
agacacagugcuuaguaca

SEQ ID NO: 1551609 - RNA, 19 nt, Artificial Sequence
  Description of Artificial Sequence: Synthetic oligonucleotide
  Antisense strand to SEQ ID NO: 1551608
uguacuaagcacugugucu

SEQ ID NO: 1551610 - RNA, 19 nt, Artificial Sequence
  Description of Artificial Sequence: Synthetic oligonucleotide
  Sense strand starting at position 3647 of SEQ ID NO: 1245292
cuaauaauugcuggaacua

SEQ ID NO: 1551611 - RNA, 19 nt, Artificial Sequence
  Description of Artificial Sequence: Synthetic oligonucleotide
  Antisense strand to SEQ ID NO: 1551610
uaguuccagcaauuauuag

SEQ ID NO: 1551612 - RNA, 19 nt, Artificial Sequence
  Description of Artificial Sequence: Synthetic oligonucleotide
  Sense strand starting at position 3736 of SEQ ID NO: 1245292
auaaauauagggcgugaaa

SEQ ID NO: 1551613 - RNA, 19 nt, Artificial Sequence
  Description of Artificial Sequence: Synthetic oligonucleotide
  Antisense strand to SEQ ID NO: 1551612
uuucacgcccuauauuuau

SEQ ID NO: 1551614 - RNA, 19 nt, Artificial Sequence
  Description of Artificial Sequence: Synthetic oligonucleotide
  Sense strand starting at position 3738 of SEQ ID NO: 1245292
aaauauagggcgugaaaga

SEQ ID NO: 1551615 - RNA, 19 nt, Artificial Sequence
  Description of Artificial Sequence: Synthetic oligonucleotide
  Antisense strand to SEQ ID NO: 1551614
ucuuucacgcccuauauuu

SEQ ID NO: 1551616 - RNA, 19 nt, Artificial Sequence
  Description of Artificial Sequence: Synthetic oligonucleotide
  Sense strand starting at position 3897 of SEQ ID NO: 1245292
ccuagaacccagugugaua

SEQ ID NO: 1551617 - RNA, 19 nt, Artificial Sequence
  Description of Artificial Sequence: Synthetic oligonucleotide
  Antisense strand to SEQ ID NO: 1551616
uaucacacuggguucuagg

SEQ ID NO: 1551618 - RNA, 19 nt, Artificial Sequence
  Description of Artificial Sequence: Synthetic oligonucleotide
  Sense strand starting at position 1 of SEQ ID NO: 1245293
gcgaauauucuaugauucu

SEQ ID NO: 1551619 - RNA, 19 nt, Artificial Sequence
  Description of Artificial Sequence: Synthetic oligonucleotide
  Antisense strand to SEQ ID NO: 1551618
agaaucauagaauauucgc

SEQ ID NO: 1551620 - RNA, 19 nt, Artificial Sequence
  Description of Artificial Sequence: Synthetic oligonucleotide
  Sense strand starting at position 16 of SEQ ID NO: 1245293
uucuauuuaucugagguac

SEQ ID NO: 1551621 - RNA, 19 nt, Artificial Sequence
  Description of Artificial Sequence: Synthetic oligonucleotide
  Antisense strand to SEQ ID NO: 1551620
guaccucagauaaauagaa

SEQ ID NO: 1551622 - RNA, 19 nt, Artificial Sequence
  Description of Artificial Sequence: Synthetic oligonucleotide
  Sense strand starting at position 100 of SEQ ID NO: 1245293
gggugcucuuggguacaga

SEQ ID NO: 1551623 - RNA, 19 nt, Artificial Sequence
  Description of Artificial Sequence: Synthetic oligonucleotide
  Antisense strand to SEQ ID NO: 1551622
ucuguacccaagagcaccc

SEQ ID NO: 1551624 - RNA, 19 nt, Artificial Sequence
  Description of Artificial Sequence: Synthetic oligonucleotide
  Sense strand starting at position 627 of SEQ ID NO: 1245293
aaaguuuaucuuugagaga

SEQ ID NO: 1551625 - RNA, 19 nt, Artificial Sequence
  Description of Artificial Sequence: Synthetic oligonucleotide
  Antisense strand to SEQ ID NO: 1551624
ucucucaaagauaaacuuu

SEQ ID NO: 1551626 - RNA, 19 nt, Artificial Sequence
  Description of Artificial Sequence: Synthetic oligonucleotide
  Sense strand starting at position 638 of SEQ ID NO: 1245293
uugagagaucacugguauc

SEQ ID NO: 1551627 - RNA, 19 nt, Artificial Sequence
  Description of Artificial Sequence: Synthetic oligonucleotide
  Antisense strand to SEQ ID NO: 1551626
gauaccagugaucucucaa

SEQ ID NO: 1551628 - RNA, 19 nt, Artificial Sequence
  Description of Artificial Sequence: Synthetic oligonucleotide
  Sense strand starting at position 654 of SEQ ID NO: 1245293
aucaaacucgaaugugaaa

SEQ ID NO: 1551629 - RNA, 19 nt, Artificial Sequence
  Description of Artificial Sequence: Synthetic oligonucleotide
  Antisense strand to SEQ ID NO: 1551628
uuucacauucgaguuugau

SEQ ID NO: 1551630 - RNA, 19 nt, Artificial Sequence
  Description of Artificial Sequence: Synthetic oligonucleotide
  Sense strand starting at position 697 of SEQ ID NO: 1245293
ccaguuacucuggaguugu

SEQ ID NO: 1551631 - RNA, 19 nt, Artificial Sequence
  Description of Artificial Sequence: Synthetic oligonucleotide
  Antisense strand to SEQ ID NO: 1551630
acaacuccagaguaacugg

SEQ ID NO: 1551632 - RNA, 19 nt, Artificial Sequence
  Description of Artificial Sequence: Synthetic oligonucleotide
  Sense strand starting at position 707 of SEQ ID NO: 1245293
uggaguugucgagaaccaa

SEQ ID NO: 1551633 - RNA, 19 nt, Artificial Sequence
  Description of Artificial Sequence: Synthetic oligonucleotide
  Antisense strand to SEQ ID NO: 1551632
uugguucucgacaacucca

SEQ ID NO: 1551634 - RNA, 19 nt, Artificial Sequence
  Description of Artificial Sequence: Synthetic oligonucleotide
  Sense strand starting at position 711 of SEQ ID NO: 1245293
guugucgagaaccaaauaa

SEQ ID NO: 1551635 - RNA, 19 nt, Artificial Sequence
  Description of Artificial Sequence: Synthetic oligonucleotide
  Antisense strand to SEQ ID NO: 1551634
uuauuugguucucgacaac

SEQ ID NO: 1551636 - RNA, 19 nt, Artificial Sequence
  Description of Artificial Sequence: Synthetic oligonucleotide
  Sense strand starting at position 756 of SEQ ID NO: 1245293
gcaacacaucugggagguu

SEQ ID NO: 1551637 - RNA, 19 nt, Artificial Sequence
  Description of Artificial Sequence: Synthetic oligonucleotide
  Antisense strand to SEQ ID NO: 1551636
aaccucccagauguguugc

SEQ ID NO: 1551638 - RNA, 19 nt, Artificial Sequence
  Description of Artificial Sequence: Synthetic oligonucleotide
  Sense strand starting at position 800 of SEQ ID NO: 1245293
auuagaaauucugcuugua

SEQ ID NO: 1551639 - RNA, 19 nt, Artificial Sequence
  Description of Artificial Sequence: Synthetic oligonucleotide
  Antisense strand to SEQ ID NO: 1551638
uacaagcagaauuucuaau

SEQ ID NO: 1551640 - RNA, 19 nt, Artificial Sequence
  Description of Artificial Sequence: Synthetic oligonucleotide
  Sense strand starting at position 802 of SEQ ID NO: 1245293
uagaaauucugcuuguagg

SEQ ID NO: 1551641 - RNA, 19 nt, Artificial Sequence
  Description of Artificial Sequence: Synthetic oligonucleotide
  Antisense strand to SEQ ID NO: 1551640
ccuacaagcagaauuucua

SEQ ID NO: 1551642 - RNA, 19 nt, Artificial Sequence
  Description of Artificial Sequence: Synthetic oligonucleotide
  Sense strand starting at position 1022 of SEQ ID NO: 1245293
gcaggauaaucgccugaaa

SEQ ID NO: 1551643 - RNA, 19 nt, Artificial Sequence
  Description of Artificial Sequence: Synthetic oligonucleotide
  Antisense strand to SEQ ID NO: 1551642
uuucaggcgauuauccugc

SEQ ID NO: 1551644 - RNA, 19 nt, Artificial Sequence
  Description of Artificial Sequence: Synthetic oligonucleotide
  Sense strand starting at position 1024 of SEQ ID NO: 1245293
aggauaaucgccugaaagc

SEQ ID NO: 1551645 - RNA, 19 nt, Artificial Sequence
  Description of Artificial Sequence: Synthetic oligonucleotide
  Antisense strand to SEQ ID NO: 1551644
gcuuucaggcgauuauccu

SEQ ID NO: 1551646 - RNA, 19 nt, Artificial Sequence
  Description of Artificial Sequence: Synthetic oligonucleotide
  Sense strand starting at position 1154 of SEQ ID NO: 1245293
gucggaagugucuacagac

SEQ ID NO: 1551647 - RNA, 19 nt, Artificial Sequence
  Description of Artificial Sequence: Synthetic oligonucleotide
  Antisense strand to SEQ ID NO: 1551646
gucuguagacacuuccgac

SEQ ID NO: 1551648 - RNA, 19 nt, Artificial Sequence
  Description of Artificial Sequence: Synthetic oligonucleotide
  Sense strand starting at position 1234 of SEQ ID NO: 1245293
ggauguaaaugguuuguau

SEQ ID NO: 1551649 - RNA, 19 nt, Artificial Sequence
  Description of Artificial Sequence: Synthetic oligonucleotide
  Antisense strand to SEQ ID NO: 1551648
auacaaaccauuuacaucc

SEQ ID NO: 1551650 - RNA, 19 nt, Artificial Sequence
  Description of Artificial Sequence: Synthetic oligonucleotide
  Sense strand starting at position 1286 of SEQ ID NO: 1245293
cucugaacccacggagaaa

SEQ ID NO: 1551651 - RNA, 19 nt, Artificial Sequence
  Description of Artificial Sequence: Synthetic oligonucleotide
  Antisense strand to SEQ ID NO: 1551650
uuucuccguggguucagag

SEQ ID NO: 1551652 - RNA, 19 nt, Artificial Sequence
  Description of Artificial Sequence: Synthetic oligonucleotide
  Sense strand starting at position 2354 of SEQ ID NO: 1245293
guuaccugugcugagaagu

SEQ ID NO: 1551653 - RNA, 19 nt, Artificial Sequence
  Description of Artificial Sequence: Synthetic oligonucleotide
  Antisense strand to SEQ ID NO: 1551652
acuucucagcacagguaac

SEQ ID NO: 1551654 - RNA, 19 nt, Artificial Sequence
  Description of Artificial Sequence: Synthetic oligonucleotide
  Sense strand starting at position 2371 of SEQ ID NO: 1245293
guaguaagagcuuauuggu

SEQ ID NO: 1551655 - RNA, 19 nt, Artificial Sequence
  Description of Artificial Sequence: Synthetic oligonucleotide
  Antisense strand to SEQ ID NO: 1551654
accaauaagcucuuacuac

SEQ ID NO: 1551656 - RNA, 19 nt, Artificial Sequence
  Description of Artificial Sequence: Synthetic oligonucleotide
  Sense strand starting at position 2376 of SEQ ID NO: 1245293
aagagcuuauugguauacu

SEQ ID NO: 1551657 - RNA, 19 nt, Artificial Sequence
  Description of Artificial Sequence: Synthetic oligonucleotide
  Antisense strand to SEQ ID NO: 1551656
aguauaccaauaagcucuu

SEQ ID NO: 1551658 - RNA, 19 nt, Artificial Sequence
  Description of Artificial Sequence: Synthetic oligonucleotide
  Sense strand starting at position 2384 of SEQ ID NO: 1245293
auugguauacugugcaaau

SEQ ID NO: 1551659 - RNA, 19 nt, Artificial Sequence
  Description of Artificial Sequence: Synthetic oligonucleotide
  Antisense strand to SEQ ID NO: 1551658
auuugcacaguauaccaau

SEQ ID NO: 1551660 - RNA, 19 nt, Artificial Sequence
  Description of Artificial Sequence: Synthetic oligonucleotide
  Sense strand starting at position 2385 of SEQ ID NO: 1245293
uugguauacugugcaaaug

SEQ ID NO: 1551661 - RNA, 19 nt, Artificial Sequence
  Description of Artificial Sequence: Synthetic oligonucleotide
  Antisense strand to SEQ ID NO: 1551660
cauuugcacaguauaccaa

SEQ ID NO: 1551662 - RNA, 19 nt, Artificial Sequence
  Description of Artificial Sequence: Synthetic oligonucleotide
  Sense strand starting at position 2386 of SEQ ID NO: 1245293
ugguauacugugcaaauga

SEQ ID NO: 1551663 - RNA, 19 nt, Artificial Sequence
  Description of Artificial Sequence: Synthetic oligonucleotide
  Antisense strand to SEQ ID NO: 1551662
ucauuugcacaguauacca

SEQ ID NO: 1551664 - RNA, 19 nt, Artificial Sequence
  Description of Artificial Sequence: Synthetic oligonucleotide
  Sense strand starting at position 2663 of SEQ ID NO: 1245293
gaaguaguaguuuaaaugu

SEQ ID NO: 1551665 - RNA, 19 nt, Artificial Sequence
  Description of Artificial Sequence: Synthetic oligonucleotide
  Antisense strand to SEQ ID NO: 1551664
acauuuaaacuacuacuuc

SEQ ID NO: 1551666 - RNA, 19 nt, Artificial Sequence
  Description of Artificial Sequence: Synthetic oligonucleotide
  Sense strand starting at position 2670 of SEQ ID NO: 1245293
uaguuuaaaugugucaaga

SEQ ID NO: 1551667 - RNA, 19 nt, Artificial Sequence
  Description of Artificial Sequence: Synthetic oligonucleotide
  Antisense strand to SEQ ID NO: 1551666
ucuugacacauuuaaacua

SEQ ID NO: 1551668 - RNA, 19 nt, Artificial Sequence
  Description of Artificial Sequence: Synthetic oligonucleotide
  Sense strand starting at position 2890 of SEQ ID NO: 1245293
ggcucagaucaaggauucu

SEQ ID NO: 1551669 - RNA, 19 nt, Artificial Sequence
  Description of Artificial Sequence: Synthetic oligonucleotide
  Antisense strand to SEQ ID NO: 1551668
agaauccuugaucugagcc

SEQ ID NO: 1551670 - RNA, 19 nt, Artificial Sequence
  Description of Artificial Sequence: Synthetic oligonucleotide
  Sense strand starting at position 3102 of SEQ ID NO: 1245293
aaaugugagguaugguaaa

SEQ ID NO: 1551671 - RNA, 19 nt, Artificial Sequence
  Description of Artificial Sequence: Synthetic oligonucleotide
  Antisense strand to SEQ ID NO: 1551670
uuuaccauaccucacauuu

SEQ ID NO: 1551672 - RNA, 19 nt, Artificial Sequence
  Description of Artificial Sequence: Synthetic oligonucleotide
  Sense strand starting at position 3202 of SEQ ID NO: 1245293
gcgcaaugaccugaccuuu

SEQ ID NO: 1551673 - RNA, 19 nt, Artificial Sequence
  Description of Artificial Sequence: Synthetic oligonucleotide
  Antisense strand to SEQ ID NO: 1551672
aaaggucaggucauugcgc

SEQ ID NO: 1551674 - RNA, 19 nt, Artificial Sequence
  Description of Artificial Sequence: Synthetic oligonucleotide
  Sense strand starting at position 3435 of SEQ ID NO: 1245293
gaucauugguugccagaga

SEQ ID NO: 1551675 - RNA, 19 nt, Artificial Sequence
  Description of Artificial Sequence: Synthetic oligonucleotide
  Antisense strand to SEQ ID NO: 1551674
ucucuggcaaccaaugauc

SEQ ID NO: 1551676 - RNA, 19 nt, Artificial Sequence
  Description of Artificial Sequence: Synthetic oligonucleotide
  Sense strand starting at position 3440 of SEQ ID NO: 1245293
uugguugccagagauuauc

SEQ ID NO: 1551677 - RNA, 19 nt, Artificial Sequence
  Description of Artificial Sequence: Synthetic oligonucleotide
  Antisense strand to SEQ ID NO: 1551676
gauaaucucuggcaaccaa

SEQ ID NO: 1551678 - RNA, 19 nt, Artificial Sequence
  Description of Artificial Sequence: Synthetic oligonucleotide
  Sense strand starting at position 3443 of SEQ ID NO: 1245293
guugccagagauuaucaga

SEQ ID NO: 1551679 - RNA, 19 nt, Artificial Sequence
  Description of Artificial Sequence: Synthetic oligonucleotide
  Antisense strand to SEQ ID NO: 1551678
ucugauaaucucuggcaac

SEQ ID NO: 1551680 - RNA, 19 nt, Artificial Sequence
  Description of Artificial Sequence: Synthetic oligonucleotide
  Sense strand starting at position 3451 of SEQ ID NO: 1245293
agauuaucagagugggagu

SEQ ID NO: 1551681 - RNA, 19 nt, Artificial Sequence
  Description of Artificial Sequence: Synthetic oligonucleotide
  Antisense strand to SEQ ID NO: 1551680
acucccacucugauaaucu

SEQ ID NO: 1551682 - RNA, 19 nt, Artificial Sequence
  Description of Artificial Sequence: Synthetic oligonucleotide
  Sense strand starting at position 3462 of SEQ ID NO: 1245293
gugggagugaaguguugaa

SEQ ID NO: 1551683 - RNA, 19 nt, Artificial Sequence
  Description of Artificial Sequence: Synthetic oligonucleotide
  Antisense strand to SEQ ID NO: 1551682
uucaacacuucacucccac

SEQ ID NO: 1551684 - RNA, 19 nt, Artificial Sequence
  Description of Artificial Sequence: Synthetic oligonucleotide
  Sense strand starting at position 3466 of SEQ ID NO: 1245293
gagugaaguguugaauuag

SEQ ID NO: 1551685 - RNA, 19 nt, Artificial Sequence
  Description of Artificial Sequence: Synthetic oligonucleotide
  Antisense strand to SEQ ID NO: 1551684
cuaauucaacacuucacuc

SEQ ID NO: 1551686 - RNA, 19 nt, Artificial Sequence
  Description of Artificial Sequence: Synthetic oligonucleotide
  Sense strand starting at position 3474 of SEQ ID NO: 1245293
uguugaauuaggugaaaca

SEQ ID NO: 1551687 - RNA, 19 nt, Artificial Sequence
  Description of Artificial Sequence: Synthetic oligonucleotide
  Antisense strand to SEQ ID NO: 1551686
uguuucaccuaauucaaca

SEQ ID NO: 1551688 - RNA, 19 nt, Artificial Sequence
  Description of Artificial Sequence: Synthetic oligonucleotide
  Sense strand starting at position 3638 of SEQ ID NO: 1245293
cuuuguuaugaucagugaa

SEQ ID NO: 1551689 - RNA, 19 nt, Artificial Sequence
  Description of Artificial Sequence: Synthetic oligonucleotide
  Antisense strand to SEQ ID NO: 1551688
uucacugaucauaacaaag

SEQ ID NO: 1551690 - RNA, 19 nt, Artificial Sequence
  Description of Artificial Sequence: Synthetic oligonucleotide
  Sense strand starting at position 3641 of SEQ ID NO: 1245293
uguuaugaucagugaaccu

SEQ ID NO: 1551691 - RNA, 19 nt, Artificial Sequence
  Description of Artificial Sequence: Synthetic oligonucleotide
  Antisense strand to SEQ ID NO: 1551690
agguucacugaucauaaca

SEQ ID NO: 1551692 - RNA, 19 nt, Artificial Sequence
  Description of Artificial Sequence: Synthetic oligonucleotide
  Sense strand starting at position 3784 of SEQ ID NO: 1245293
uaguuugacugcccugaaa

SEQ ID NO: 1551693 - RNA, 19 nt, Artificial Sequence
  Description of Artificial Sequence: Synthetic oligonucleotide
  Antisense strand to SEQ ID NO: 1551692
uuucagggcagucaaacua

SEQ ID NO: 1551694 - RNA, 19 nt, Artificial Sequence
  Description of Artificial Sequence: Synthetic oligonucleotide
  Sense strand starting at position 3937 of SEQ ID NO: 1245293
ggcuucuuuccuuauagua

SEQ ID NO: 1551695 - RNA, 19 nt, Artificial Sequence
  Description of Artificial Sequence: Synthetic oligonucleotide
  Antisense strand to SEQ ID NO: 1551694
uacuauaaggaaagaagcc

SEQ ID NO: 1551696 - RNA, 19 nt, Artificial Sequence
  Description of Artificial Sequence: Synthetic oligonucleotide
  Sense strand starting at position 3977 of SEQ ID NO: 1245293
augucuugucuugagaguu

SEQ ID NO: 1551697 - RNA, 19 nt, Artificial Sequence
  Description of Artificial Sequence: Synthetic oligonucleotide
  Antisense strand to SEQ ID NO: 1551696
aacucucaagacaagacau

SEQ ID NO: 1551698 - RNA, 19 nt, Artificial Sequence
  Description of Artificial Sequence: Synthetic oligonucleotide
  Sense strand starting at position 131 of SEQ ID NO: 1245294
acaagucagucauuccuau

SEQ ID NO: 1551699 - RNA, 19 nt, Artificial Sequence
  Description of Artificial Sequence: Synthetic oligonucleotide
  Antisense strand to SEQ ID NO: 1551698
auaggaaugacugacuugu

SEQ ID NO: 1551700 - RNA, 19 nt, Artificial Sequence
  Description of Artificial Sequence: Synthetic oligonucleotide
  Sense strand starting at position 181 of SEQ ID NO: 1245294
gggcucugacuugacuuaa

SEQ ID NO: 1551701 - RNA, 19 nt, Artificial Sequence
  Description of Artificial Sequence: Synthetic oligonucleotide
  Antisense strand to SEQ ID NO: 1551700
uuaagucaagucagagccc

SEQ ID NO: 1551702 - RNA, 19 nt, Artificial Sequence
  Description of Artificial Sequence: Synthetic oligonucleotide
  Sense strand starting at position 192 of SEQ ID NO: 1245294
ugacuuaauguguguaaua

SEQ ID NO: 1551703 - RNA, 19 nt, Artificial Sequence
  Description of Artificial Sequence: Synthetic oligonucleotide
  Antisense strand to SEQ ID NO: 1551702
uauuacacacauuaaguca

SEQ ID NO: 1551704 - RNA, 19 nt, Artificial Sequence
  Description of Artificial Sequence: Synthetic oligonucleotide
  Sense strand starting at position 193 of SEQ ID NO: 1245294
gacuuaauguguguaauaa

SEQ ID NO: 1551705 - RNA, 19 nt, Artificial Sequence
  Description of Artificial Sequence: Synthetic oligonucleotide
  Antisense strand to SEQ ID NO: 1551704
uuauuacacacauuaaguc

SEQ ID NO: 1551706 - RNA, 19 nt, Artificial Sequence
  Description of Artificial Sequence: Synthetic oligonucleotide
  Sense strand starting at position 248 of SEQ ID NO: 1245294
agucgaauuuaaguugcua

SEQ ID NO: 1551707 - RNA, 19 nt, Artificial Sequence
  Description of Artificial Sequence: Synthetic oligonucleotide
  Antisense strand to SEQ ID NO: 1551706
uagcaacuuaaauucgacu

SEQ ID NO: 1551708 - RNA, 19 nt, Artificial Sequence
  Description of Artificial Sequence: Synthetic oligonucleotide
  Sense strand starting at position 250 of SEQ ID NO: 1245294
ucgaauuuaaguugcuagu

SEQ ID NO: 1551709 - RNA, 19 nt, Artificial Sequence
  Description of Artificial Sequence: Synthetic oligonucleotide
  Antisense strand to SEQ ID NO: 1551708
acuagcaacuuaaauucga

SEQ ID NO: 1551710 - RNA, 19 nt, Artificial Sequence
  Description of Artificial Sequence: Synthetic oligonucleotide
  Sense strand starting at position 252 of SEQ ID NO: 1245294
gaauuuaaguugcuagucu

SEQ ID NO: 1551711 - RNA, 19 nt, Artificial Sequence
  Description of Artificial Sequence: Synthetic oligonucleotide
  Antisense strand to SEQ ID NO: 1551710
agacuagcaacuuaaauuc

SEQ ID NO: 1551712 - RNA, 19 nt, Artificial Sequence
  Description of Artificial Sequence: Synthetic oligonucleotide
  Sense strand starting at position 288 of SEQ ID NO: 1245294
uuguaacuagaaugauguu

SEQ ID NO: 1551713 - RNA, 19 nt, Artificial Sequence
  Description of Artificial Sequence: Synthetic oligonucleotide
  Antisense strand to SEQ ID NO: 1551712
aacaucauucuaguuacaa

SEQ ID NO: 1551714 - RNA, 19 nt, Artificial Sequence
  Description of Artificial Sequence: Synthetic oligonucleotide
  Sense strand starting at position 371 of SEQ ID NO: 1245294
gaagaaugcuaggugucca

SEQ ID NO: 1551715 - RNA, 19 nt, Artificial Sequence
  Description of Artificial Sequence: Synthetic oligonucleotide
  Antisense strand to SEQ ID NO: 1551714
uggacaccuagcauucuuc

SEQ ID NO: 1551716 - RNA, 19 nt, Artificial Sequence
  Description of Artificial Sequence: Synthetic oligonucleotide
  Sense strand starting at position 422 of SEQ ID NO: 1245294
agccauaauuauguggaaa

SEQ ID NO: 1551717 - RNA, 19 nt, Artificial Sequence
  Description of Artificial Sequence: Synthetic oligonucleotide
  Antisense strand to SEQ ID NO: 1551716
uuuccacauaauuauggcu

SEQ ID NO: 1551718 - RNA, 19 nt, Artificial Sequence
  Description of Artificial Sequence: Synthetic oligonucleotide
  Sense strand starting at position 504 of SEQ ID NO: 1245294
ugacauauuuaggcgcaau

SEQ ID NO: 1551719 - RNA, 19 nt, Artificial Sequence
  Description of Artificial Sequence: Synthetic oligonucleotide
  Antisense strand to SEQ ID NO: 1551718
auugcgccuaaauauguca

SEQ ID NO: 1551720 - RNA, 19 nt, Artificial Sequence
  Description of Artificial Sequence: Synthetic oligonucleotide
  Sense strand starting at position 507 of SEQ ID NO: 1245294
cauauuuaggcgcaauguu

SEQ ID NO: 1551721 - RNA, 19 nt, Artificial Sequence
  Description of Artificial Sequence: Synthetic oligonucleotide
  Antisense strand to SEQ ID NO: 1551720
aacauugcgccuaaauaug

SEQ ID NO: 1551722 - RNA, 19 nt, Artificial Sequence
  Description of Artificial Sequence: Synthetic oligonucleotide
  Sense strand starting at position 960 of SEQ ID NO: 1245294
ucuugugaacuacaagagu

SEQ ID NO: 1551723 - RNA, 19 nt, Artificial Sequence
  Description of Artificial Sequence: Synthetic oligonucleotide
  Antisense strand to SEQ ID NO: 1551722
acucuuguaguucacaaga

SEQ ID NO: 1551724 - RNA, 19 nt, Artificial Sequence
  Description of Artificial Sequence: Synthetic oligonucleotide
  Sense strand starting at position 978 of SEQ ID NO: 1245294
uaaggauguuaucccaagu

SEQ ID NO: 1551725 - RNA, 19 nt, Artificial Sequence
  Description of Artificial Sequence: Synthetic oligonucleotide
  Antisense strand to SEQ ID NO: 1551724
acuugggauaacauccuua

SEQ ID NO: 1551726 - RNA, 19 nt, Artificial Sequence
  Description of Artificial Sequence: Synthetic oligonucleotide
  Sense strand starting at position 1010 of SEQ ID NO: 1245294
gcauguguucugcccacuu

SEQ ID NO: 1551727 - RNA, 19 nt, Artificial Sequence
  Description of Artificial Sequence: Synthetic oligonucleotide
  Antisense strand to SEQ ID NO: 1551726
aagugggcagaacacaugc

SEQ ID NO: 1551728 - RNA, 19 nt, Artificial Sequence
  Description of Artificial Sequence: Synthetic oligonucleotide
  Sense strand starting at position 1292 of SEQ ID NO: 1245294
ugaggaugcuuauugcaaa

SEQ ID NO: 1551729 - RNA, 19 nt, Artificial Sequence
  Description of Artificial Sequence: Synthetic oligonucleotide
  Antisense strand to SEQ ID NO: 1551728
uuugcaauaagcauccuca

SEQ ID NO: 1551730 - RNA, 19 nt, Artificial Sequence
  Description of Artificial Sequence: Synthetic oligonucleotide
  Sense strand starting at position 1614 of SEQ ID NO: 1245294
ggacacagguucucaaaug

SEQ ID NO: 1551731 - RNA, 19 nt, Artificial Sequence
  Description of Artificial Sequence: Synthetic oligonucleotide
  Antisense strand to SEQ ID NO: 1551730
cauuugagaaccugugucc

SEQ ID NO: 1551732 - RNA, 19 nt, Artificial Sequence
  Description of Artificial Sequence: Synthetic oligonucleotide
  Sense strand starting at position 1717 of SEQ ID NO: 1245294
uagagaauguuauugugaa

SEQ ID NO: 1551733 - RNA, 19 nt, Artificial Sequence
  Description of Artificial Sequence: Synthetic oligonucleotide
  Antisense strand to SEQ ID NO: 1551732
uucacaauaacauucucua

SEQ ID NO: 1551734 - RNA, 19 nt, Artificial Sequence
  Description of Artificial Sequence: Synthetic oligonucleotide
  Sense strand starting at position 1738 of SEQ ID NO: 1245294
guaaauuauugaguuguca

SEQ ID NO: 1551735 - RNA, 19 nt, Artificial Sequence
  Description of Artificial Sequence: Synthetic oligonucleotide
  Antisense strand to SEQ ID NO: 1551734
ugacaacucaauaauuuac

SEQ ID NO: 1551736 - RNA, 19 nt, Artificial Sequence
  Description of Artificial Sequence: Synthetic oligonucleotide
  Sense strand starting at position 1742 of SEQ ID NO: 1245294
auuauugaguugucaagag

SEQ ID NO: 1551737 - RNA, 19 nt, Artificial Sequence
  Description of Artificial Sequence: Synthetic oligonucleotide
  Antisense strand to SEQ ID NO: 1551736
cucuugacaacucaauaau

SEQ ID NO: 1551738 - RNA, 19 nt, Artificial Sequence
  Description of Artificial Sequence: Synthetic oligonucleotide
  Sense strand starting at position 2102 of SEQ ID NO: 1245294
ccauauacauugucauaug

SEQ ID NO: 1551739 - RNA, 19 nt, Artificial Sequence
  Description of Artificial Sequence: Synthetic oligonucleotide
  Antisense strand to SEQ ID NO: 1551738
cauaugacaauguauaugg

SEQ ID NO: 1551740 - RNA, 19 nt, Artificial Sequence
  Description of Artificial Sequence: Synthetic oligonucleotide
  Sense strand starting at position 2110 of SEQ ID NO: 1245294
auugucauaugagcugaau

SEQ ID NO: 1551741 - RNA, 19 nt, Artificial Sequence
  Description of Artificial Sequence: Synthetic oligonucleotide
  Antisense strand to SEQ ID NO: 1551740
auucagcucauaugacaau

SEQ ID NO: 1551742 - RNA, 19 nt, Artificial Sequence
  Description of Artificial Sequence: Synthetic oligonucleotide
  Sense strand starting at position 2112 of SEQ ID NO: 1245294
ugucauaugagcugaauag

SEQ ID NO: 1551743 - RNA, 19 nt, Artificial Sequence
  Description of Artificial Sequence: Synthetic oligonucleotide
  Antisense strand to SEQ ID NO: 1551742
cuauucagcucauaugaca

SEQ ID NO: 1551744 - RNA, 19 nt, Artificial Sequence
  Description of Artificial Sequence: Synthetic oligonucleotide
  Sense strand starting at position 2142 of SEQ ID NO: 1245294
auucuaguccaauaauagu

SEQ ID NO: 1551745 - RNA, 19 nt, Artificial Sequence
  Description of Artificial Sequence: Synthetic oligonucleotide
  Antisense strand to SEQ ID NO: 1551744
acuauuauuggacuagaau

SEQ ID NO: 1551746 - RNA, 19 nt, Artificial Sequence
  Description of Artificial Sequence: Synthetic oligonucleotide
  Sense strand starting at position 2187 of SEQ ID NO: 1245294
uagagaauuuacgggaauu

SEQ ID NO: 1551747 - RNA, 19 nt, Artificial Sequence
  Description of Artificial Sequence: Synthetic oligonucleotide
  Antisense strand to SEQ ID NO: 1551746
aauucccguaaauucucua

SEQ ID NO: 1551748 - RNA, 19 nt, Artificial Sequence
  Description of Artificial Sequence: Synthetic oligonucleotide
  Sense strand starting at position 2218 of SEQ ID NO: 1245294
agugcuaaugugcauuaga

SEQ ID NO: 1551749 - RNA, 19 nt, Artificial Sequence
  Description of Artificial Sequence: Synthetic oligonucleotide
  Antisense strand to SEQ ID NO: 1551748
ucuaaugcacauuagcacu

SEQ ID NO: 1551750 - RNA, 19 nt, Artificial Sequence
  Description of Artificial Sequence: Synthetic oligonucleotide
  Sense strand starting at position 2221 of SEQ ID NO: 1245294
gcuaaugugcauuagagaa

SEQ ID NO: 1551751 - RNA, 19 nt, Artificial Sequence
  Description of Artificial Sequence: Synthetic oligonucleotide
  Antisense strand to SEQ ID NO: 1551750
uucucuaaugcacauuagc

SEQ ID NO: 1551752 - RNA, 19 nt, Artificial Sequence
  Description of Artificial Sequence: Synthetic oligonucleotide
  Sense strand starting at position 2242 of SEQ ID NO: 1245294
aauggaugcuggucaguua

SEQ ID NO: 1551753 - RNA, 19 nt, Artificial Sequence
  Description of Artificial Sequence: Synthetic oligonucleotide
  Antisense strand to SEQ ID NO: 1551752
uaacugaccagcauccauu

SEQ ID NO: 1551754 - RNA, 19 nt, Artificial Sequence
  Description of Artificial Sequence: Synthetic oligonucleotide
  Sense strand starting at position 2243 of SEQ ID NO: 1245294
auggaugcuggucaguuaa

SEQ ID NO: 1551755 - RNA, 19 nt, Artificial Sequence
  Description of Artificial Sequence: Synthetic oligonucleotide
  Antisense strand to SEQ ID NO: 1551754
uuaacugaccagcauccau

SEQ ID NO: 1551756 - RNA, 19 nt, Artificial Sequence
  Description of Artificial Sequence: Synthetic oligonucleotide
  Sense strand starting at position 2263 of SEQ ID NO: 1245294
agcugagucccauaacaua

SEQ ID NO: 1551757 - RNA, 19 nt, Artificial Sequence
  Description of Artificial Sequence: Synthetic oligonucleotide
  Antisense strand to SEQ ID NO: 1551756
uauguuaugggacucagcu

SEQ ID NO: 1551758 - RNA, 19 nt, Artificial Sequence
  Description of Artificial Sequence: Synthetic oligonucleotide
  Sense strand starting at position 2358 of SEQ ID NO: 1245294
agcauaagcuuauugagag

SEQ ID NO: 1551759 - RNA, 19 nt, Artificial Sequence
  Description of Artificial Sequence: Synthetic oligonucleotide
  Antisense strand to SEQ ID NO: 1551758
cucucaauaagcuuaugcu

SEQ ID NO: 1551760 - RNA, 19 nt, Artificial Sequence
  Description of Artificial Sequence: Synthetic oligonucleotide
  Sense strand starting at position 2565 of SEQ ID NO: 1245294
agaaguuaagacuguuugu

SEQ ID NO: 1551761 - RNA, 19 nt, Artificial Sequence
  Description of Artificial Sequence: Synthetic oligonucleotide
  Antisense strand to SEQ ID NO: 1551760
acaaacagucuuaacuucu

SEQ ID NO: 1551762 - RNA, 19 nt, Artificial Sequence
  Description of Artificial Sequence: Synthetic oligonucleotide
  Sense strand starting at position 2570 of SEQ ID NO: 1245294
uuaagacuguuugucuuua

SEQ ID NO: 1551763 - RNA, 19 nt, Artificial Sequence
  Description of Artificial Sequence: Synthetic oligonucleotide
  Antisense strand to SEQ ID NO: 1551762
uaaagacaaacagucuuaa

SEQ ID NO: 1551764 - RNA, 19 nt, Artificial Sequence
  Description of Artificial Sequence: Synthetic oligonucleotide
  Sense strand starting at position 2611 of SEQ ID NO: 1245294
ugaaacuagucuucuggaa

SEQ ID NO: 1551765 - RNA, 19 nt, Artificial Sequence
  Description of Artificial Sequence: Synthetic oligonucleotide
  Antisense strand to SEQ ID NO: 1551764
uuccagaagacuaguuuca

SEQ ID NO: 1551766 - RNA, 19 nt, Artificial Sequence
  Description of Artificial Sequence: Synthetic oligonucleotide
  Sense strand starting at position 2627 of SEQ ID NO: 1245294
gaacaagaguacucaguuu

SEQ ID NO: 1551767 - RNA, 19 nt, Artificial Sequence
  Description of Artificial Sequence: Synthetic oligonucleotide
  Antisense strand to SEQ ID NO: 1551766
aaacugaguacucuuguuc

SEQ ID NO: 1551768 - RNA, 19 nt, Artificial Sequence
  Description of Artificial Sequence: Synthetic oligonucleotide
  Sense strand starting at position 2824 of SEQ ID NO: 1245294
gaggcaacugcagacauua

SEQ ID NO: 1551769 - RNA, 19 nt, Artificial Sequence
  Description of Artificial Sequence: Synthetic oligonucleotide
  Antisense strand to SEQ ID NO: 1551768
uaaugucugcaguugccuc

SEQ ID NO: 1551770 - RNA, 19 nt, Artificial Sequence
  Description of Artificial Sequence: Synthetic oligonucleotide
  Sense strand starting at position 2862 of SEQ ID NO: 1245294
aggaaacugcauggauauu

SEQ ID NO: 1551771 - RNA, 19 nt, Artificial Sequence
  Description of Artificial Sequence: Synthetic oligonucleotide
  Antisense strand to SEQ ID NO: 1551770
aauauccaugcaguuuccu

SEQ ID NO: 1551772 - RNA, 19 nt, Artificial Sequence
  Description of Artificial Sequence: Synthetic oligonucleotide
  Sense strand starting at position 2967 of SEQ ID NO: 1245294
agguuucuauaguuaauuc

SEQ ID NO: 1551773 - RNA, 19 nt, Artificial Sequence
  Description of Artificial Sequence: Synthetic oligonucleotide
  Antisense strand to SEQ ID NO: 1551772
gaauuaacuauagaaaccu

SEQ ID NO: 1551774 - RNA, 19 nt, Artificial Sequence
  Description of Artificial Sequence: Synthetic oligonucleotide
  Sense strand starting at position 3016 of SEQ ID NO: 1245294
ucucgaauaaguuaaacga

SEQ ID NO: 1551775 - RNA, 19 nt, Artificial Sequence
  Description of Artificial Sequence: Synthetic oligonucleotide
  Antisense strand to SEQ ID NO: 1551774
ucguuuaacuuauucgaga

SEQ ID NO: 1551776 - RNA, 19 nt, Artificial Sequence
  Description of Artificial Sequence: Synthetic oligonucleotide
  Sense strand starting at position 3793 of SEQ ID NO: 1245294
cgcggaauauacuccaaga

SEQ ID NO: 1551777 - RNA, 19 nt, Artificial Sequence
  Description of Artificial Sequence: Synthetic oligonucleotide
  Antisense strand to SEQ ID NO: 1551776
ucuuggaguauauuccgcg

SEQ ID NO: 1551778 - RNA, 19 nt, Artificial Sequence
  Description of Artificial Sequence: Synthetic oligonucleotide
  Sense strand starting at position 69 of SEQ ID NO: 1245295
caaacagugccaugaugaa

SEQ ID NO: 1551779 - RNA, 19 nt, Artificial Sequence
  Description of Artificial Sequence: Synthetic oligonucleotide
  Antisense strand to SEQ ID NO: 1551778
uucaucauggcacuguuug

SEQ ID NO: 1551780 - RNA, 19 nt, Artificial Sequence
  Description of Artificial Sequence: Synthetic oligonucleotide
  Sense strand starting at position 107 of SEQ ID NO: 1245295
uuacacagcugugugagaa

SEQ ID NO: 1551781 - RNA, 19 nt, Artificial Sequence
  Description of Artificial Sequence: Synthetic oligonucleotide
  Antisense strand to SEQ ID NO: 1551780
uucucacacagcuguguaa

SEQ ID NO: 1551782 - RNA, 19 nt, Artificial Sequence
  Description of Artificial Sequence: Synthetic oligonucleotide
  Sense strand starting at position 108 of SEQ ID NO: 1245295
uacacagcugugugagaau

SEQ ID NO: 1551783 - RNA, 19 nt, Artificial Sequence
  Description of Artificial Sequence: Synthetic oligonucleotide
  Antisense strand to SEQ ID NO: 1551782
auucucacacagcugugua

SEQ ID NO: 1551784 - RNA, 19 nt, Artificial Sequence
  Description of Artificial Sequence: Synthetic oligonucleotide
  Sense strand starting at position 122 of SEQ ID NO: 1245295
agaauuucuuuguaaagga

SEQ ID NO: 1551785 - RNA, 19 nt, Artificial Sequence
  Description of Artificial Sequence: Synthetic oligonucleotide
  Antisense strand to SEQ ID NO: 1551784
uccuuuacaaagaaauucu

SEQ ID NO: 1551786 - RNA, 19 nt, Artificial Sequence
  Description of Artificial Sequence: Synthetic oligonucleotide
  Sense strand starting at position 326 of SEQ ID NO: 1245295
ggcaauacauaauuauagu

SEQ ID NO: 1551787 - RNA, 19 nt, Artificial Sequence
  Description of Artificial Sequence: Synthetic oligonucleotide
  Antisense strand to SEQ ID NO: 1551786
acuauaauuauguauugcc

SEQ ID NO: 1551788 - RNA, 19 nt, Artificial Sequence
  Description of Artificial Sequence: Synthetic oligonucleotide
  Sense strand starting at position 419 of SEQ ID NO: 1245295
cugucuugccaauagacau

SEQ ID NO: 1551789 - RNA, 19 nt, Artificial Sequence
  Description of Artificial Sequence: Synthetic oligonucleotide
  Antisense strand to SEQ ID NO: 1551788
augucuauuggcaagacag

SEQ ID NO: 1551790 - RNA, 19 nt, Artificial Sequence
  Description of Artificial Sequence: Synthetic oligonucleotide
  Sense strand starting at position 452 of SEQ ID NO: 1245295
gaacuuuguuucuuggcaa

SEQ ID NO: 1551791 - RNA, 19 nt, Artificial Sequence
  Description of Artificial Sequence: Synthetic oligonucleotide
  Antisense strand to SEQ ID NO: 1551790
uugccaagaaacaaaguuc

SEQ ID NO: 1551792 - RNA, 19 nt, Artificial Sequence
  Description of Artificial Sequence: Synthetic oligonucleotide
  Sense strand starting at position 621 of SEQ ID NO: 1245295
ccucuacaucugggugauu

SEQ ID NO: 1551793 - RNA, 19 nt, Artificial Sequence
  Description of Artificial Sequence: Synthetic oligonucleotide
  Antisense strand to SEQ ID NO: 1551792
aaucacccagauguagagg

SEQ ID NO: 1551794 - RNA, 19 nt, Artificial Sequence
  Description of Artificial Sequence: Synthetic oligonucleotide
  Sense strand starting at position 623 of SEQ ID NO: 1245295
ucuacaucugggugauugu

SEQ ID NO: 1551795 - RNA, 19 nt, Artificial Sequence
  Description of Artificial Sequence: Synthetic oligonucleotide
  Antisense strand to SEQ ID NO: 1551794
acaaucacccagauguaga

SEQ ID NO: 1551796 - RNA, 19 nt, Artificial Sequence
  Description of Artificial Sequence: Synthetic oligonucleotide
  Sense strand starting at position 651 of SEQ ID NO: 1245295
ugcagagguguguauggau

SEQ ID NO: 1551797 - RNA, 19 nt, Artificial Sequence
  Description of Artificial Sequence: Synthetic oligonucleotide
  Antisense strand to SEQ ID NO: 1551796
auccauacacaccucugca

SEQ ID NO: 1551798 - RNA, 19 nt, Artificial Sequence
  Description of Artificial Sequence: Synthetic oligonucleotide
  Sense strand starting at position 699 of SEQ ID NO: 1245295
guugguauuccucacuaca

SEQ ID NO: 1551799 - RNA, 19 nt, Artificial Sequence
  Description of Artificial Sequence: Synthetic oligonucleotide
  Antisense strand to SEQ ID NO: 1551798
uguagugaggaauaccaac

SEQ ID NO: 1551800 - RNA, 19 nt, Artificial Sequence
  Description of Artificial Sequence: Synthetic oligonucleotide
  Sense strand starting at position 701 of SEQ ID NO: 1245295
ugguauuccucacuacauu

SEQ ID NO: 1551801 - RNA, 19 nt, Artificial Sequence
  Description of Artificial Sequence: Synthetic oligonucleotide
  Antisense strand to SEQ ID NO: 1551800
aauguagugaggaauacca

SEQ ID NO: 1551802 - RNA, 19 nt, Artificial Sequence
  Description of Artificial Sequence: Synthetic oligonucleotide
  Sense strand starting at position 786 of SEQ ID NO: 1245295
aaucaauacuuguuaggga

SEQ ID NO: 1551803 - RNA, 19 nt, Artificial Sequence
  Description of Artificial Sequence: Synthetic oligonucleotide
  Antisense strand to SEQ ID NO: 1551802
ucccuaacaaguauugauu

SEQ ID NO: 1551804 - RNA, 19 nt, Artificial Sequence
  Description of Artificial Sequence: Synthetic oligonucleotide
  Sense strand starting at position 1001 of SEQ ID NO: 1245295
ugaguugugucaucuggaa

SEQ ID NO: 1551805 - RNA, 19 nt, Artificial Sequence
  Description of Artificial Sequence: Synthetic oligonucleotide
  Antisense strand to SEQ ID NO: 1551804
uuccagaugacacaacuca

SEQ ID NO: 1551806 - RNA, 19 nt, Artificial Sequence
  Description of Artificial Sequence: Synthetic oligonucleotide
  Sense strand starting at position 1005 of SEQ ID NO: 1245295
uugugucaucuggaaguug

SEQ ID NO: 1551807 - RNA, 19 nt, Artificial Sequence
  Description of Artificial Sequence: Synthetic oligonucleotide
  Antisense strand to SEQ ID NO: 1551806
caacuuccagaugacacaa

SEQ ID NO: 1551808 - RNA, 19 nt, Artificial Sequence
  Description of Artificial Sequence: Synthetic oligonucleotide
  Sense strand starting at position 1020 of SEQ ID NO: 1245295
guuguuaugacagaaacga

SEQ ID NO: 1551809 - RNA, 19 nt, Artificial Sequence
  Description of Artificial Sequence: Synthetic oligonucleotide
  Antisense strand to SEQ ID NO: 1551808
ucguuucugucauaacaac

SEQ ID NO: 1551810 - RNA, 19 nt, Artificial Sequence
  Description of Artificial Sequence: Synthetic oligonucleotide
  Sense strand starting at position 1065 of SEQ ID NO: 1245295
gcccuuugagguugagaag

SEQ ID NO: 1551811 - RNA, 19 nt, Artificial Sequence
  Description of Artificial Sequence: Synthetic oligonucleotide
  Antisense strand to SEQ ID NO: 1551810
cuucucaaccucaaagggc

SEQ ID NO: 1551812 - RNA, 19 nt, Artificial Sequence
  Description of Artificial Sequence: Synthetic oligonucleotide
  Sense strand starting at position 1259 of SEQ ID NO: 1245295
accauacccuguguacauu

SEQ ID NO: 1551813 - RNA, 19 nt, Artificial Sequence
  Description of Artificial Sequence: Synthetic oligonucleotide
  Antisense strand to SEQ ID NO: 1551812
aauguacacaggguauggu

SEQ ID NO: 1551814 - RNA, 19 nt, Artificial Sequence
  Description of Artificial Sequence: Synthetic oligonucleotide
  Sense strand starting at position 1372 of SEQ ID NO: 1245295
gcccuacaacuuugugaau

SEQ ID NO: 1551815 - RNA, 19 nt, Artificial Sequence
  Description of Artificial Sequence: Synthetic oligonucleotide
  Antisense strand to SEQ ID NO: 1551814
auucacaaaguuguagggc

SEQ ID NO: 1551816 - RNA, 19 nt, Artificial Sequence
  Description of Artificial Sequence: Synthetic oligonucleotide
  Sense strand starting at position 1576 of SEQ ID NO: 1245295
cuagcauaguaaguuaaga

SEQ ID NO: 1551817 - RNA, 19 nt, Artificial Sequence
  Description of Artificial Sequence: Synthetic oligonucleotide
  Antisense strand to SEQ ID NO: 1551816
ucuuaacuuacuaugcuag

SEQ ID NO: 1551818 - RNA, 19 nt, Artificial Sequence
  Description of Artificial Sequence: Synthetic oligonucleotide
  Sense strand starting at position 1729 of SEQ ID NO: 1245295
gucagccugccucaaagau

SEQ ID NO: 1551819 - RNA, 19 nt, Artificial Sequence
  Description of Artificial Sequence: Synthetic oligonucleotide
  Antisense strand to SEQ ID NO: 1551818
aucuuugaggcaggcugac

SEQ ID NO: 1551820 - RNA, 19 nt, Artificial Sequence
  Description of Artificial Sequence: Synthetic oligonucleotide
  Sense strand starting at position 1866 of SEQ ID NO: 1245295
guccaaaugccacaguuua

SEQ ID NO: 1551821 - RNA, 19 nt, Artificial Sequence
  Description of Artificial Sequence: Synthetic oligonucleotide
  Antisense strand to SEQ ID NO: 1551820
uaaacuguggcauuuggac

SEQ ID NO: 1551822 - RNA, 19 nt, Artificial Sequence
  Description of Artificial Sequence: Synthetic oligonucleotide
  Sense strand starting at position 2249 of SEQ ID NO: 1245295
uagugagacccugaucucu

SEQ ID NO: 1551823 - RNA, 19 nt, Artificial Sequence
  Description of Artificial Sequence: Synthetic oligonucleotide
  Antisense strand to SEQ ID NO: 1551822
agagaucagggucucacua

SEQ ID NO: 1551824 - RNA, 19 nt, Artificial Sequence
  Description of Artificial Sequence: Synthetic oligonucleotide
  Sense strand starting at position 2251 of SEQ ID NO: 1245295
gugagacccugaucucuau

SEQ ID NO: 1551825 - RNA, 19 nt, Artificial Sequence
  Description of Artificial Sequence: Synthetic oligonucleotide
  Antisense strand to SEQ ID NO: 1551824
auagagaucagggucucac

SEQ ID NO: 1551826 - RNA, 19 nt, Artificial Sequence
  Description of Artificial Sequence: Synthetic oligonucleotide
  Sense strand starting at position 2342 of SEQ ID NO: 1245295
cagagaagugcucaguucu

SEQ ID NO: 1551827 - RNA, 19 nt, Artificial Sequence
  Description of Artificial Sequence: Synthetic oligonucleotide
  Antisense strand to SEQ ID NO: 1551826
agaacugagcacuucucug

SEQ ID NO: 1551828 - RNA, 19 nt, Artificial Sequence
  Description of Artificial Sequence: Synthetic oligonucleotide
  Sense strand starting at position 2729 of SEQ ID NO: 1245295
cugucugucaaagagauug

SEQ ID NO: 1551829 - RNA, 19 nt, Artificial Sequence
  Description of Artificial Sequence: Synthetic oligonucleotide
  Antisense strand to SEQ ID NO: 1551828
caaucucuuugacagacag

SEQ ID NO: 1551830 - RNA, 19 nt, Artificial Sequence
  Description of Artificial Sequence: Synthetic oligonucleotide
  Sense strand starting at position 2818 of SEQ ID NO: 1245295
caaagcuacucaguaggaa

SEQ ID NO: 1551831 - RNA, 19 nt, Artificial Sequence
  Description of Artificial Sequence: Synthetic oligonucleotide
  Antisense strand to SEQ ID NO: 1551830
uuccuacugaguagcuuug

SEQ ID NO: 1551832 - RNA, 19 nt, Artificial Sequence
  Description of Artificial Sequence: Synthetic oligonucleotide
  Sense strand starting at position 2951 of SEQ ID NO: 1245295
gguaaauccugucccacaa

SEQ ID NO: 1551833 - RNA, 19 nt, Artificial Sequence
  Description of Artificial Sequence: Synthetic oligonucleotide
  Antisense strand to SEQ ID NO: 1551832
uugugggacaggauuuacc

SEQ ID NO: 1551834 - RNA, 19 nt, Artificial Sequence
  Description of Artificial Sequence: Synthetic oligonucleotide
  Sense strand starting at position 2974 of SEQ ID NO: 1245295
acacaagaguuaucgaguu

SEQ ID NO: 1551835 - RNA, 19 nt, Artificial Sequence
  Description of Artificial Sequence: Synthetic oligonucleotide
  Antisense strand to SEQ ID NO: 1551834
aacucgauaacucuugugu

SEQ ID NO: 1551836 - RNA, 19 nt, Artificial Sequence
  Description of Artificial Sequence: Synthetic oligonucleotide
  Sense strand starting at position 2976 of SEQ ID NO: 1245295
acaagaguuaucgaguuag

SEQ ID NO: 1551837 - RNA, 19 nt, Artificial Sequence
  Description of Artificial Sequence: Synthetic oligonucleotide
  Antisense strand to SEQ ID NO: 1551836
cuaacucgauaacucuugu

SEQ ID NO: 1551838 - RNA, 19 nt, Artificial Sequence
  Description of Artificial Sequence: Synthetic oligonucleotide
  Sense strand starting at position 2980 of SEQ ID NO: 1245295
gaguuaucgaguuaguaau

SEQ ID NO: 1551839 - RNA, 19 nt, Artificial Sequence
  Description of Artificial Sequence: Synthetic oligonucleotide
  Antisense strand to SEQ ID NO: 1551838
auuacuaacucgauaacuc

SEQ ID NO: 1551840 - RNA, 19 nt, Artificial Sequence
  Description of Artificial Sequence: Synthetic oligonucleotide
  Sense strand starting at position 3076 of SEQ ID NO: 1245295
uucagaggcugaguaauga

SEQ ID NO: 1551841 - RNA, 19 nt, Artificial Sequence
  Description of Artificial Sequence: Synthetic oligonucleotide
  Antisense strand to SEQ ID NO: 1551840
ucauuacucagccucugaa

SEQ ID NO: 1551842 - RNA, 19 nt, Artificial Sequence
  Description of Artificial Sequence: Synthetic oligonucleotide
  Sense strand starting at position 3214 of SEQ ID NO: 1245295
accagucuugaccaugcaa

SEQ ID NO: 1551843 - RNA, 19 nt, Artificial Sequence
  Description of Artificial Sequence: Synthetic oligonucleotide
  Antisense strand to SEQ ID NO: 1551842
uugcauggucaagacuggu

SEQ ID NO: 1551844 - RNA, 19 nt, Artificial Sequence
  Description of Artificial Sequence: Synthetic oligonucleotide
  Sense strand starting at position 3309 of SEQ ID NO: 1245295
uuccuuuauggccagugau

SEQ ID NO: 1551845 - RNA, 19 nt, Artificial Sequence
  Description of Artificial Sequence: Synthetic oligonucleotide
  Antisense strand to SEQ ID NO: 1551844
aucacuggccauaaaggaa

SEQ ID NO: 1551846 - RNA, 19 nt, Artificial Sequence
  Description of Artificial Sequence: Synthetic oligonucleotide
  Sense strand starting at position 3441 of SEQ ID NO: 1245295
ugcccacaagguuaucaua

SEQ ID NO: 1551847 - RNA, 19 nt, Artificial Sequence
  Description of Artificial Sequence: Synthetic oligonucleotide
  Antisense strand to SEQ ID NO: 1551846
uaugauaaccuugugggca

SEQ ID NO: 1551848 - RNA, 19 nt, Artificial Sequence
  Description of Artificial Sequence: Synthetic oligonucleotide
  Sense strand starting at position 3502 of SEQ ID NO: 1245295
cccaaaucuguccagucuu

SEQ ID NO: 1551849 - RNA, 19 nt, Artificial Sequence
  Description of Artificial Sequence: Synthetic oligonucleotide
  Antisense strand to SEQ ID NO: 1551848
aagacuggacagauuuggg

SEQ ID NO: 1551850 - RNA, 19 nt, Artificial Sequence
  Description of Artificial Sequence: Synthetic oligonucleotide
  Sense strand starting at position 3597 of SEQ ID NO: 1245295
uaccauuagggcugaucuu

SEQ ID NO: 1551851 - RNA, 19 nt, Artificial Sequence
  Description of Artificial Sequence: Synthetic oligonucleotide
  Antisense strand to SEQ ID NO: 1551850
aagaucagcccuaauggua

SEQ ID NO: 1551852 - RNA, 19 nt, Artificial Sequence
  Description of Artificial Sequence: Synthetic oligonucleotide
  Sense strand starting at position 3726 of SEQ ID NO: 1245295
uuaugccuuugaucuagau

SEQ ID NO: 1551853 - RNA, 19 nt, Artificial Sequence
  Description of Artificial Sequence: Synthetic oligonucleotide
  Antisense strand to SEQ ID NO: 1551852
aucuagaucaaaggcauaa

SEQ ID NO: 1551854 - RNA, 19 nt, Artificial Sequence
  Description of Artificial Sequence: Synthetic oligonucleotide
  Sense strand starting at position 3730 of SEQ ID NO: 1245295
gccuuugaucuagauugua

SEQ ID NO: 1551855 - RNA, 19 nt, Artificial Sequence
  Description of Artificial Sequence: Synthetic oligonucleotide
  Antisense strand to SEQ ID NO: 1551854
uacaaucuagaucaaaggc

SEQ ID NO: 1551856 - RNA, 19 nt, Artificial Sequence
  Description of Artificial Sequence: Synthetic oligonucleotide
  Sense strand starting at position 3882 of SEQ ID NO: 1245295
ccuggauucccugaaagca

SEQ ID NO: 1551857 - RNA, 19 nt, Artificial Sequence
  Description of Artificial Sequence: Synthetic oligonucleotide
  Antisense strand to SEQ ID NO: 1551856
ugcuuucagggaauccagg

SEQ ID NO: 1551858 - RNA, 19 nt, Artificial Sequence
  Description of Artificial Sequence: Synthetic oligonucleotide
  Sense strand starting at position 44 of SEQ ID NO: 1245296
guugguauuccucacuaca

SEQ ID NO: 1551859 - RNA, 19 nt, Artificial Sequence
  Description of Artificial Sequence: Synthetic oligonucleotide
  Antisense strand to SEQ ID NO: 1551858
uguagugaggaauaccaac

SEQ ID NO: 1551860 - RNA, 19 nt, Artificial Sequence
  Description of Artificial Sequence: Synthetic oligonucleotide
  Sense strand starting at position 46 of SEQ ID NO: 1245296
ugguauuccucacuacauu

SEQ ID NO: 1551861 - RNA, 19 nt, Artificial Sequence
  Description of Artificial Sequence: Synthetic oligonucleotide
  Antisense strand to SEQ ID NO: 1551860
aauguagugaggaauacca

SEQ ID NO: 1551862 - RNA, 19 nt, Artificial Sequence
  Description of Artificial Sequence: Synthetic oligonucleotide
  Sense strand starting at position 131 of SEQ ID NO: 1245296
aaucaauacuuguuaggga

SEQ ID NO: 1551863 - RNA, 19 nt, Artificial Sequence
  Description of Artificial Sequence: Synthetic oligonucleotide
  Antisense strand to SEQ ID NO: 1551862
ucccuaacaaguauugauu

SEQ ID NO: 1551864 - RNA, 19 nt, Artificial Sequence
  Description of Artificial Sequence: Synthetic oligonucleotide
  Sense strand starting at position 346 of SEQ ID NO: 1245296
ugaguugugucaucuggaa

SEQ ID NO: 1551865 - RNA, 19 nt, Artificial Sequence
  Description of Artificial Sequence: Synthetic oligonucleotide
  Antisense strand to SEQ ID NO: 1551864
uuccagaugacacaacuca

SEQ ID NO: 1551866 - RNA, 19 nt, Artificial Sequence
  Description of Artificial Sequence: Synthetic oligonucleotide
  Sense strand starting at position 350 of SEQ ID NO: 1245296
uugugucaucuggaaguug

SEQ ID NO: 1551867 - RNA, 19 nt, Artificial Sequence
  Description of Artificial Sequence: Synthetic oligonucleotide
  Antisense strand to SEQ ID NO: 1551866
caacuuccagaugacacaa

SEQ ID NO: 1551868 - RNA, 19 nt, Artificial Sequence
  Description of Artificial Sequence: Synthetic oligonucleotide
  Sense strand starting at position 365 of SEQ ID NO: 1245296
guuguuaugacagaaacga

SEQ ID NO: 1551869 - RNA, 19 nt, Artificial Sequence
  Description of Artificial Sequence: Synthetic oligonucleotide
  Antisense strand to SEQ ID NO: 1551868
ucguuucugucauaacaac

SEQ ID NO: 1551870 - RNA, 19 nt, Artificial Sequence
  Description of Artificial Sequence: Synthetic oligonucleotide
  Sense strand starting at position 410 of SEQ ID NO: 1245296
gcccuuugagguugagaag

SEQ ID NO: 1551871 - RNA, 19 nt, Artificial Sequence
  Description of Artificial Sequence: Synthetic oligonucleotide
  Antisense strand to SEQ ID NO: 1551870
cuucucaaccucaaagggc

SEQ ID NO: 1551872 - RNA, 19 nt, Artificial Sequence
  Description of Artificial Sequence: Synthetic oligonucleotide
  Sense strand starting at position 604 of SEQ ID NO: 1245296
accauacccuguguacauu

SEQ ID NO: 1551873 - RNA, 19 nt, Artificial Sequence
  Description of Artificial Sequence: Synthetic oligonucleotide
  Antisense strand to SEQ ID NO: 1551872
aauguacacaggguauggu

SEQ ID NO: 1551874 - RNA, 19 nt, Artificial Sequence
  Description of Artificial Sequence: Synthetic oligonucleotide
  Sense strand starting at position 717 of SEQ ID NO: 1245296
gcccuacaacuuugugaau

SEQ ID NO: 1551875 - RNA, 19 nt, Artificial Sequence
  Description of Artificial Sequence: Synthetic oligonucleotide
  Antisense strand to SEQ ID NO: 1551874
auucacaaaguuguagggc

SEQ ID NO: 1551876 - RNA, 19 nt, Artificial Sequence
  Description of Artificial Sequence: Synthetic oligonucleotide
  Sense strand starting at position 921 of SEQ ID NO: 1245296
cuagcauaguaaguuaaga

SEQ ID NO: 1551877 - RNA, 19 nt, Artificial Sequence
  Description of Artificial Sequence: Synthetic oligonucleotide
  Antisense strand to SEQ ID NO: 1551876
ucuuaacuuacuaugcuag

SEQ ID NO: 1551878 - RNA, 19 nt, Artificial Sequence
  Description of Artificial Sequence: Synthetic oligonucleotide
  Sense strand starting at position 1074 of SEQ ID NO: 1245296
gucagccugccucaaagau

SEQ ID NO: 1551879 - RNA, 19 nt, Artificial Sequence
  Description of Artificial Sequence: Synthetic oligonucleotide
  Antisense strand to SEQ ID NO: 1551878
aucuuugaggcaggcugac

SEQ ID NO: 1551880 - RNA, 19 nt, Artificial Sequence
  Description of Artificial Sequence: Synthetic oligonucleotide
  Sense strand starting at position 1211 of SEQ ID NO: 1245296
guccaaaugccacaguuua

SEQ ID NO: 1551881 - RNA, 19 nt, Artificial Sequence
  Description of Artificial Sequence: Synthetic oligonucleotide
  Antisense strand to SEQ ID NO: 1551880
uaaacuguggcauuuggac

SEQ ID NO: 1551882 - RNA, 19 nt, Artificial Sequence
  Description of Artificial Sequence: Synthetic oligonucleotide
  Sense strand starting at position 1594 of SEQ ID NO: 1245296
uagugagacccugaucucu

SEQ ID NO: 1551883 - RNA, 19 nt, Artificial Sequence
  Description of Artificial Sequence: Synthetic oligonucleotide
  Antisense strand to SEQ ID NO: 1551882
agagaucagggucucacua

SEQ ID NO: 1551884 - RNA, 19 nt, Artificial Sequence
  Description of Artificial Sequence: Synthetic oligonucleotide
  Sense strand starting at position 1596 of SEQ ID NO: 1245296
gugagacccugaucucuau

SEQ ID NO: 1551885 - RNA, 19 nt, Artificial Sequence
  Description of Artificial Sequence: Synthetic oligonucleotide
  Antisense strand to SEQ ID NO: 1551884
auagagaucagggucucac

SEQ ID NO: 1551886 - RNA, 19 nt, Artificial Sequence
  Description of Artificial Sequence: Synthetic oligonucleotide
  Sense strand starting at position 1687 of SEQ ID NO: 1245296
cagagaagugcucaguucu

SEQ ID NO: 1551887 - RNA, 19 nt, Artificial Sequence
  Description of Artificial Sequence: Synthetic oligonucleotide
  Antisense strand to SEQ ID NO: 1551886
agaacugagcacuucucug

SEQ ID NO: 1551888 - RNA, 19 nt, Artificial Sequence
  Description of Artificial Sequence: Synthetic oligonucleotide
  Sense strand starting at position 2074 of SEQ ID NO: 1245296
cugucugucaaagagauug

SEQ ID NO: 1551889 - RNA, 19 nt, Artificial Sequence
  Description of Artificial Sequence: Synthetic oligonucleotide
  Antisense strand to SEQ ID NO: 1551888
caaucucuuugacagacag

SEQ ID NO: 1551890 - RNA, 19 nt, Artificial Sequence
  Description of Artificial Sequence: Synthetic oligonucleotide
  Sense strand starting at position 2163 of SEQ ID NO: 1245296
caaagcuacucaguaggaa

SEQ ID NO: 1551891 - RNA, 19 nt, Artificial Sequence
  Description of Artificial Sequence: Synthetic oligonucleotide
  Antisense strand to SEQ ID NO: 1551890
uuccuacugaguagcuuug

SEQ ID NO: 1551892 - RNA, 19 nt, Artificial Sequence
  Description of Artificial Sequence: Synthetic oligonucleotide
  Sense strand starting at position 2296 of SEQ ID NO: 1245296
gguaaauccugucccacaa

SEQ ID NO: 1551893 - RNA, 19 nt, Artificial Sequence
  Description of Artificial Sequence: Synthetic oligonucleotide
  Antisense strand to SEQ ID NO: 1551892
uugugggacaggauuuacc

SEQ ID NO: 1551894 - RNA, 19 nt, Artificial Sequence
  Description of Artificial Sequence: Synthetic oligonucleotide
  Sense strand starting at position 2319 of SEQ ID NO: 1245296
acacaagaguuaucgaguu

SEQ ID NO: 1551895 - RNA, 19 nt, Artificial Sequence
  Description of Artificial Sequence: Synthetic oligonucleotide
  Antisense strand to SEQ ID NO: 1551894
aacucgauaacucuugugu

SEQ ID NO: 1551896 - RNA, 19 nt, Artificial Sequence
  Description of Artificial Sequence: Synthetic oligonucleotide
  Sense strand starting at position 2321 of SEQ ID NO: 1245296
acaagaguuaucgaguuag

SEQ ID NO: 1551897 - RNA, 19 nt, Artificial Sequence
  Description of Artificial Sequence: Synthetic oligonucleotide
  Antisense strand to SEQ ID NO: 1551896
cuaacucgauaacucuugu

SEQ ID NO: 1551898 - RNA, 19 nt, Artificial Sequence
  Description of Artificial Sequence: Synthetic oligonucleotide
  Sense strand starting at position 2325 of SEQ ID NO: 1245296
gaguuaucgaguuaguaau

SEQ ID NO: 1551899 - RNA, 19 nt, Artificial Sequence
  Description of Artificial Sequence: Synthetic oligonucleotide
  Antisense strand to SEQ ID NO: 1551898
auuacuaacucgauaacuc

SEQ ID NO: 1551900 - RNA, 19 nt, Artificial Sequence
  Description of Artificial Sequence: Synthetic oligonucleotide
  Sense strand starting at position 2421 of SEQ ID NO: 1245296
uucagaggcugaguaauga

SEQ ID NO: 1551901 - RNA, 19 nt, Artificial Sequence
  Description of Artificial Sequence: Synthetic oligonucleotide
  Antisense strand to SEQ ID NO: 1551900
ucauuacucagccucugaa

SEQ ID NO: 1551902 - RNA, 19 nt, Artificial Sequence
  Description of Artificial Sequence: Synthetic oligonucleotide
  Sense strand starting at position 2559 of SEQ ID NO: 1245296
accagucuugaccaugcaa

SEQ ID NO: 1551903 - RNA, 19 nt, Artificial Sequence
  Description of Artificial Sequence: Synthetic oligonucleotide
  Antisense strand to SEQ ID NO: 1551902
uugcauggucaagacuggu

SEQ ID NO: 1551904 - RNA, 19 nt, Artificial Sequence
  Description of Artificial Sequence: Synthetic oligonucleotide
  Sense strand starting at position 2653 of SEQ ID NO: 1245296
auuccuuuauggccaguga

SEQ ID NO: 1551905 - RNA, 19 nt, Artificial Sequence
  Description of Artificial Sequence: Synthetic oligonucleotide
  Antisense strand to SEQ ID NO: 1551904
ucacuggccauaaaggaau

SEQ ID NO: 1551906 - RNA, 19 nt, Artificial Sequence
  Description of Artificial Sequence: Synthetic oligonucleotide
  Sense strand starting at position 2654 of SEQ ID NO: 1245296
uuccuuuauggccagugau

SEQ ID NO: 1551907 - RNA, 19 nt, Artificial Sequence
  Description of Artificial Sequence: Synthetic oligonucleotide
  Antisense strand to SEQ ID NO: 1551906
aucacuggccauaaaggaa

SEQ ID NO: 1551908 - RNA, 19 nt, Artificial Sequence
  Description of Artificial Sequence: Synthetic oligonucleotide
  Sense strand starting at position 2786 of SEQ ID NO: 1245296
ugcccacaagguuaucaua

SEQ ID NO: 1551909 - RNA, 19 nt, Artificial Sequence
  Description of Artificial Sequence: Synthetic oligonucleotide
  Antisense strand to SEQ ID NO: 1551908
uaugauaaccuugugggca

SEQ ID NO: 1551910 - RNA, 19 nt, Artificial Sequence
  Description of Artificial Sequence: Synthetic oligonucleotide
  Sense strand starting at position 2847 of SEQ ID NO: 1245296
cccaaaucuguccagucuu

SEQ ID NO: 1551911 - RNA, 19 nt, Artificial Sequence
  Description of Artificial Sequence: Synthetic oligonucleotide
  Antisense strand to SEQ ID NO: 1551910
aagacuggacagauuuggg

SEQ ID NO: 1551912 - RNA, 19 nt, Artificial Sequence
  Description of Artificial Sequence: Synthetic oligonucleotide
  Sense strand starting at position 2942 of SEQ ID NO: 1245296
uaccauuagggcugaucuu

SEQ ID NO: 1551913 - RNA, 19 nt, Artificial Sequence
  Description of Artificial Sequence: Synthetic oligonucleotide
  Antisense strand to SEQ ID NO: 1551912
aagaucagcccuaauggua

SEQ ID NO: 1551914 - RNA, 19 nt, Artificial Sequence
  Description of Artificial Sequence: Synthetic oligonucleotide
  Sense strand starting at position 3071 of SEQ ID NO: 1245296
uuaugccuuugaucuagau

SEQ ID NO: 1551915 - RNA, 19 nt, Artificial Sequence
  Description of Artificial Sequence: Synthetic oligonucleotide
  Antisense strand to SEQ ID NO: 1551914
aucuagaucaaaggcauaa

SEQ ID NO: 1551916 - RNA, 19 nt, Artificial Sequence
  Description of Artificial Sequence: Synthetic oligonucleotide
  Sense strand starting at position 3075 of SEQ ID NO: 1245296
gccuuugaucuagauugua

SEQ ID NO: 1551917 - RNA, 19 nt, Artificial Sequence
  Description of Artificial Sequence: Synthetic oligonucleotide
  Antisense strand to SEQ ID NO: 1551916
uacaaucuagaucaaaggc

SEQ ID NO: 1551918 - RNA, 19 nt, Artificial Sequence
  Description of Artificial Sequence: Synthetic oligonucleotide
  Sense strand starting at position 3227 of SEQ ID NO: 1245296
ccuggauucccugaaagca

SEQ ID NO: 1551919 - RNA, 19 nt, Artificial Sequence
  Description of Artificial Sequence: Synthetic oligonucleotide
  Antisense strand to SEQ ID NO: 1551918
ugcuuucagggaauccagg

SEQ ID NO: 1551920 - RNA, 19 nt, Artificial Sequence
  Description of Artificial Sequence: Synthetic oligonucleotide
  Sense strand starting at position 3380 of SEQ ID NO: 1245296
aucugaauccauggacuuu

SEQ ID NO: 1551921 - RNA, 19 nt, Artificial Sequence
  Description of Artificial Sequence: Synthetic oligonucleotide
  Antisense strand to SEQ ID NO: 1551920
aaaguccauggauucagau

SEQ ID NO: 1551922 - RNA, 19 nt, Artificial Sequence
  Description of Artificial Sequence: Synthetic oligonucleotide
  Sense strand starting at position 3391 of SEQ ID NO: 1245296
uggacuuucggaggaaucu

SEQ ID NO: 1551923 - RNA, 19 nt, Artificial Sequence
  Description of Artificial Sequence: Synthetic oligonucleotide
  Antisense strand to SEQ ID NO: 1551922
agauuccuccgaaagucca

SEQ ID NO: 1551924 - RNA, 19 nt, Artificial Sequence
  Description of Artificial Sequence: Synthetic oligonucleotide
  Sense strand starting at position 3493 of SEQ ID NO: 1245296
gaaggucccauggguguua

SEQ ID NO: 1551925 - RNA, 19 nt, Artificial Sequence
  Description of Artificial Sequence: Synthetic oligonucleotide
  Antisense strand to SEQ ID NO: 1551924
uaacacccaugggaccuuc

SEQ ID NO: 1551926 - RNA, 19 nt, Artificial Sequence
  Description of Artificial Sequence: Synthetic oligonucleotide
  Sense strand starting at position 3517 of SEQ ID NO: 1245296
gaucacacuugagugucaa

SEQ ID NO: 1551927 - RNA, 19 nt, Artificial Sequence
  Description of Artificial Sequence: Synthetic oligonucleotide
  Antisense strand to SEQ ID NO: 1551926
uugacacucaagugugauc

SEQ ID NO: 1551928 - RNA, 19 nt, Artificial Sequence
  Description of Artificial Sequence: Synthetic oligonucleotide
  Sense strand starting at position 3518 of SEQ ID NO: 1245296
aucacacuugagugucaau

SEQ ID NO: 1551929 - RNA, 19 nt, Artificial Sequence
  Description of Artificial Sequence: Synthetic oligonucleotide
  Antisense strand to SEQ ID NO: 1551928
auugacacucaagugugau

SEQ ID NO: 1551930 - RNA, 19 nt, Artificial Sequence
  Description of Artificial Sequence: Synthetic oligonucleotide
  Sense strand starting at position 3599 of SEQ ID NO: 1245296
aagugcugccaguuugcaa

SEQ ID NO: 1551931 - RNA, 19 nt, Artificial Sequence
  Description of Artificial Sequence: Synthetic oligonucleotide
  Antisense strand to SEQ ID NO: 1551930
uugcaaacuggcagcacuu

SEQ ID NO: 1551932 - RNA, 19 nt, Artificial Sequence
  Description of Artificial Sequence: Synthetic oligonucleotide
  Sense strand starting at position 3600 of SEQ ID NO: 1245296
agugcugccaguuugcaau

SEQ ID NO: 1551933 - RNA, 19 nt, Artificial Sequence
  Description of Artificial Sequence: Synthetic oligonucleotide
  Antisense strand to SEQ ID NO: 1551932
auugcaaacuggcagcacu

SEQ ID NO: 1551934 - RNA, 19 nt, Artificial Sequence
  Description of Artificial Sequence: Synthetic oligonucleotide
  Sense strand starting at position 3751 of SEQ ID NO: 1245296
aggaaaugcccucaaguuu

SEQ ID NO: 1551935 - RNA, 19 nt, Artificial Sequence
  Description of Artificial Sequence: Synthetic oligonucleotide
  Antisense strand to SEQ ID NO: 1551934
aaacuugagggcauuuccu

SEQ ID NO: 1551936 - RNA, 19 nt, Artificial Sequence
  Description of Artificial Sequence: Synthetic oligonucleotide
  Sense strand starting at position 3902 of SEQ ID NO: 1245296
caguaaucccugugacuag

SEQ ID NO: 1551937 - RNA, 19 nt, Artificial Sequence
  Description of Artificial Sequence: Synthetic oligonucleotide
  Antisense strand to SEQ ID NO: 1551936
cuagucacagggauuacug

SEQ ID NO: 1551938 - RNA, 19 nt, Artificial Sequence
  Description of Artificial Sequence: Synthetic oligonucleotide
  Sense strand starting at position 100 of SEQ ID NO: 1245297
aucugaauugacuguaagu

SEQ ID NO: 1551939 - RNA, 19 nt, Artificial Sequence
  Description of Artificial Sequence: Synthetic oligonucleotide
  Antisense strand to SEQ ID NO: 1551938
acuuacagucaauucagau

SEQ ID NO: 1551940 - RNA, 19 nt, Artificial Sequence
  Description of Artificial Sequence: Synthetic oligonucleotide
  Sense strand starting at position 216 of SEQ ID NO: 1245297
uugcauauacuagguuaaa

SEQ ID NO: 1551941 - RNA, 19 nt, Artificial Sequence
  Description of Artificial Sequence: Synthetic oligonucleotide
  Antisense strand to SEQ ID NO: 1551940
uuuaaccuaguauaugcaa

SEQ ID NO: 1551942 - RNA, 19 nt, Artificial Sequence
  Description of Artificial Sequence: Synthetic oligonucleotide
  Sense strand starting at position 652 of SEQ ID NO: 1245297
gggaaacagccugaguugu

SEQ ID NO: 1551943 - RNA, 19 nt, Artificial Sequence
  Description of Artificial Sequence: Synthetic oligonucleotide
  Antisense strand to SEQ ID NO: 1551942
acaacucaggcuguuuccc

SEQ ID NO: 1551944 - RNA, 19 nt, Artificial Sequence
  Description of Artificial Sequence: Synthetic oligonucleotide
  Sense strand starting at position 690 of SEQ ID NO: 1245297
ugcuacauccaaggaagua

SEQ ID NO: 1551945 - RNA, 19 nt, Artificial Sequence
  Description of Artificial Sequence: Synthetic oligonucleotide
  Antisense strand to SEQ ID NO: 1551944
uacuuccuuggauguagca

SEQ ID NO: 1551946 - RNA, 19 nt, Artificial Sequence
  Description of Artificial Sequence: Synthetic oligonucleotide
  Sense strand starting at position 972 of SEQ ID NO: 1245297
auaggaugggcaugacuua

SEQ ID NO: 1551947 - RNA, 19 nt, Artificial Sequence
  Description of Artificial Sequence: Synthetic oligonucleotide
  Antisense strand to SEQ ID NO: 1551946
uaagucaugcccauccuau

SEQ ID NO: 1551948 - RNA, 19 nt, Artificial Sequence
  Description of Artificial Sequence: Synthetic oligonucleotide
  Sense strand starting at position 1048 of SEQ ID NO: 1245297
gauggagucacagggcuua

SEQ ID NO: 1551949 - RNA, 19 nt, Artificial Sequence
  Description of Artificial Sequence: Synthetic oligonucleotide
  Antisense strand to SEQ ID NO: 1551948
uaagcccugugacuccauc

SEQ ID NO: 1551950 - RNA, 19 nt, Artificial Sequence
  Description of Artificial Sequence: Synthetic oligonucleotide
  Sense strand starting at position 1117 of SEQ ID NO: 1245297
ugcuaucaugagugaaaua

SEQ ID NO: 1551951 - RNA, 19 nt, Artificial Sequence
  Description of Artificial Sequence: Synthetic oligonucleotide
  Antisense strand to SEQ ID NO: 1551950
uauuucacucaugauagca

SEQ ID NO: 1551952 - RNA, 19 nt, Artificial Sequence
  Description of Artificial Sequence: Synthetic oligonucleotide
  Sense strand starting at position 1164 of SEQ ID NO: 1245297
aauagaaucuggcucaggu

SEQ ID NO: 1551953 - RNA, 19 nt, Artificial Sequence
  Description of Artificial Sequence: Synthetic oligonucleotide
  Antisense strand to SEQ ID NO: 1551952
accugagccagauucuauu

SEQ ID NO: 1551954 - RNA, 19 nt, Artificial Sequence
  Description of Artificial Sequence: Synthetic oligonucleotide
  Sense strand starting at position 1212 of SEQ ID NO: 1245297
aaggauagauugccaguga

SEQ ID NO: 1551955 - RNA, 19 nt, Artificial Sequence
  Description of Artificial Sequence: Synthetic oligonucleotide
  Antisense strand to SEQ ID NO: 1551954
ucacuggcaaucuauccuu

SEQ ID NO: 1551956 - RNA, 19 nt, Artificial Sequence
  Description of Artificial Sequence: Synthetic oligonucleotide
  Sense strand starting at position 1216 of SEQ ID NO: 1245297
auagauugccagugagagc

SEQ ID NO: 1551957 - RNA, 19 nt, Artificial Sequence
  Description of Artificial Sequence: Synthetic oligonucleotide
  Antisense strand to SEQ ID NO: 1551956
gcucucacuggcaaucuau

SEQ ID NO: 1551958 - RNA, 19 nt, Artificial Sequence
  Description of Artificial Sequence: Synthetic oligonucleotide
  Sense strand starting at position 1259 of SEQ ID NO: 1245297
gcaguauccaggugagaaa

SEQ ID NO: 1551959 - RNA, 19 nt, Artificial Sequence
  Description of Artificial Sequence: Synthetic oligonucleotide
  Antisense strand to SEQ ID NO: 1551958
uuucucaccuggauacugc

SEQ ID NO: 1551960 - RNA, 19 nt, Artificial Sequence
  Description of Artificial Sequence: Synthetic oligonucleotide
  Sense strand starting at position 1309 of SEQ ID NO: 1245297
gggagaagugccuggauua

SEQ ID NO: 1551961 - RNA, 19 nt, Artificial Sequence
  Description of Artificial Sequence: Synthetic oligonucleotide
  Antisense strand to SEQ ID NO: 1551960
uaauccaggcacuucuccc

SEQ ID NO: 1551962 - RNA, 19 nt, Artificial Sequence
  Description of Artificial Sequence: Synthetic oligonucleotide
  Sense strand starting at position 1310 of SEQ ID NO: 1245297
ggagaagugccuggauuau

SEQ ID NO: 1551963 - RNA, 19 nt, Artificial Sequence
  Description of Artificial Sequence: Synthetic oligonucleotide
  Antisense strand to SEQ ID NO: 1551962
auaauccaggcacuucucc

SEQ ID NO: 1551964 - RNA, 19 nt, Artificial Sequence
  Description of Artificial Sequence: Synthetic oligonucleotide
  Sense strand starting at position 1371 of SEQ ID NO: 1245297
ugugguauaaagugagaga

SEQ ID NO: 1551965 - RNA, 19 nt, Artificial Sequence
  Description of Artificial Sequence: Synthetic oligonucleotide
  Antisense strand to SEQ ID NO: 1551964
ucucucacuuuauaccaca

SEQ ID NO: 1551966 - RNA, 19 nt, Artificial Sequence
  Description of Artificial Sequence: Synthetic oligonucleotide
  Sense strand starting at position 1646 of SEQ ID NO: 1245297
uuaagaaugguaggaucga

SEQ ID NO: 1551967 - RNA, 19 nt, Artificial Sequence
  Description of Artificial Sequence: Synthetic oligonucleotide
  Antisense strand to SEQ ID NO: 1551966
ucgauccuaccauucuuaa

SEQ ID NO: 1551968 - RNA, 19 nt, Artificial Sequence
  Description of Artificial Sequence: Synthetic oligonucleotide
  Sense strand starting at position 1763 of SEQ ID NO: 1245297
gggauuagggucugacuuu

SEQ ID NO: 1551969 - RNA, 19 nt, Artificial Sequence
  Description of Artificial Sequence: Synthetic oligonucleotide
  Antisense strand to SEQ ID NO: 1551968
aaagucagacccuaauccc

SEQ ID NO: 1551970 - RNA, 19 nt, Artificial Sequence
  Description of Artificial Sequence: Synthetic oligonucleotide
  Sense strand starting at position 1824 of SEQ ID NO: 1245297
ggacacguaccucaucaau

SEQ ID NO: 1551971 - RNA, 19 nt, Artificial Sequence
  Description of Artificial Sequence: Synthetic oligonucleotide
  Antisense strand to SEQ ID NO: 1551970
auugaugagguacgugucc

SEQ ID NO: 1551972 - RNA, 19 nt, Artificial Sequence
  Description of Artificial Sequence: Synthetic oligonucleotide
  Sense strand starting at position 2182 of SEQ ID NO: 1245297
gguguugauauugauagac

SEQ ID NO: 1551973 - RNA, 19 nt, Artificial Sequence
  Description of Artificial Sequence: Synthetic oligonucleotide
  Antisense strand to SEQ ID NO: 1551972
gucuaucaauaucaacacc

SEQ ID NO: 1551974 - RNA, 19 nt, Artificial Sequence
  Description of Artificial Sequence: Synthetic oligonucleotide
  Sense strand starting at position 2274 of SEQ ID NO: 1245297
guuuaaauagcaggaguuu

SEQ ID NO: 1551975 - RNA, 19 nt, Artificial Sequence
  Description of Artificial Sequence: Synthetic oligonucleotide
  Antisense strand to SEQ ID NO: 1551974
aaacuccugcuauuuaaac

SEQ ID NO: 1551976 - RNA, 19 nt, Artificial Sequence
  Description of Artificial Sequence: Synthetic oligonucleotide
  Sense strand starting at position 2275 of SEQ ID NO: 1245297
uuuaaauagcaggaguuua

SEQ ID NO: 1551977 - RNA, 19 nt, Artificial Sequence
  Description of Artificial Sequence: Synthetic oligonucleotide
  Antisense strand to SEQ ID NO: 1551976
uaaacuccugcuauuuaaa

SEQ ID NO: 1551978 - RNA, 19 nt, Artificial Sequence
  Description of Artificial Sequence: Synthetic oligonucleotide
  Sense strand starting at position 2285 of SEQ ID NO: 1245297
aggaguuuauucucccaug

SEQ ID NO: 1551979 - RNA, 19 nt, Artificial Sequence
  Description of Artificial Sequence: Synthetic oligonucleotide
  Antisense strand to SEQ ID NO: 1551978
caugggagaauaaacuccu

SEQ ID NO: 1551980 - RNA, 19 nt, Artificial Sequence
  Description of Artificial Sequence: Synthetic oligonucleotide
  Sense strand starting at position 2409 of SEQ ID NO: 1245297
gccagcaaacuuugacauu

SEQ ID NO: 1551981 - RNA, 19 nt, Artificial Sequence
  Description of Artificial Sequence: Synthetic oligonucleotide
  Antisense strand to SEQ ID NO: 1551980
aaugucaaaguuugcuggc

SEQ ID NO: 1551982 - RNA, 19 nt, Artificial Sequence
  Description of Artificial Sequence: Synthetic oligonucleotide
  Sense strand starting at position 2437 of SEQ ID NO: 1245297
guagacaaaucacucaagu

SEQ ID NO: 1551983 - RNA, 19 nt, Artificial Sequence
  Description of Artificial Sequence: Synthetic oligonucleotide
  Antisense strand to SEQ ID NO: 1551982
acuugagugauuugucuac

SEQ ID NO: 1551984 - RNA, 19 nt, Artificial Sequence
  Description of Artificial Sequence: Synthetic oligonucleotide
  Sense strand starting at position 2480 of SEQ ID NO: 1245297
cucuuuauuguccauguau

SEQ ID NO: 1551985 - RNA, 19 nt, Artificial Sequence
  Description of Artificial Sequence: Synthetic oligonucleotide
  Antisense strand to SEQ ID NO: 1551984
auacauggacaauaaagag

SEQ ID NO: 1551986 - RNA, 19 nt, Artificial Sequence
  Description of Artificial Sequence: Synthetic oligonucleotide
  Sense strand starting at position 2491 of SEQ ID NO: 1245297
ccauguauguauccaaauu

SEQ ID NO: 1551987 - RNA, 19 nt, Artificial Sequence
  Description of Artificial Sequence: Synthetic oligonucleotide
  Antisense strand to SEQ ID NO: 1551986
aauuuggauacauacaugg

SEQ ID NO: 1551988 - RNA, 19 nt, Artificial Sequence
  Description of Artificial Sequence: Synthetic oligonucleotide
  Sense strand starting at position 2526 of SEQ ID NO: 1245297
gacagcagucacugaauua

SEQ ID NO: 1551989 - RNA, 19 nt, Artificial Sequence
  Description of Artificial Sequence: Synthetic oligonucleotide
  Antisense strand to SEQ ID NO: 1551988
uaauucagugacugcuguc

SEQ ID NO: 1551990 - RNA, 19 nt, Artificial Sequence
  Description of Artificial Sequence: Synthetic oligonucleotide
  Sense strand starting at position 2836 of SEQ ID NO: 1245297
ugcucugugacugaggaua

SEQ ID NO: 1551991 - RNA, 19 nt, Artificial Sequence
  Description of Artificial Sequence: Synthetic oligonucleotide
  Antisense strand to SEQ ID NO: 1551990
uauccucagucacagagca

SEQ ID NO: 1551992 - RNA, 19 nt, Artificial Sequence
  Description of Artificial Sequence: Synthetic oligonucleotide
  Sense strand starting at position 2847 of SEQ ID NO: 1245297
ugaggauaugcccagcaaa

SEQ ID NO: 1551993 - RNA, 19 nt, Artificial Sequence
  Description of Artificial Sequence: Synthetic oligonucleotide
  Antisense strand to SEQ ID NO: 1551992
uuugcugggcauauccuca

SEQ ID NO: 1551994 - RNA, 19 nt, Artificial Sequence
  Description of Artificial Sequence: Synthetic oligonucleotide
  Sense strand starting at position 2860 of SEQ ID NO: 1245297
agcaaauucccauggguca

SEQ ID NO: 1551995 - RNA, 19 nt, Artificial Sequence
  Description of Artificial Sequence: Synthetic oligonucleotide
  Antisense strand to SEQ ID NO: 1551994
ugacccaugggaauuugcu

SEQ ID NO: 1551996 - RNA, 19 nt, Artificial Sequence
  Description of Artificial Sequence: Synthetic oligonucleotide
  Sense strand starting at position 2861 of SEQ ID NO: 1245297
gcaaauucccaugggucau

SEQ ID NO: 1551997 - RNA, 19 nt, Artificial Sequence
  Description of Artificial Sequence: Synthetic oligonucleotide
  Antisense strand to SEQ ID NO: 1551996
augacccaugggaauuugc

SEQ ID NO: 1551998 - RNA, 19 nt, Artificial Sequence
  Description of Artificial Sequence: Synthetic oligonucleotide
  Sense strand starting at position 3002 of SEQ ID NO: 1245297
ucuugaugucaccaggugu

SEQ ID NO: 1551999 - RNA, 19 nt, Artificial Sequence
  Description of Artificial Sequence: Synthetic oligonucleotide
  Antisense strand to SEQ ID NO: 1551998
acaccuggugacaucaaga

SEQ ID NO: 1552000 - RNA, 19 nt, Artificial Sequence
  Description of Artificial Sequence: Synthetic oligonucleotide
  Sense strand starting at position 3343 of SEQ ID NO: 1245297
ggaucacaaugugugauga

SEQ ID NO: 1552001 - RNA, 19 nt, Artificial Sequence
  Description of Artificial Sequence: Synthetic oligonucleotide
  Antisense strand to SEQ ID NO: 1552000
ucaucacacauugugaucc

SEQ ID NO: 1552002 - RNA, 19 nt, Artificial Sequence
  Description of Artificial Sequence: Synthetic oligonucleotide
  Sense strand starting at position 3409 of SEQ ID NO: 1245297
ccucuuugacaguguagaa

SEQ ID NO: 1552003 - RNA, 19 nt, Artificial Sequence
  Description of Artificial Sequence: Synthetic oligonucleotide
  Antisense strand to SEQ ID NO: 1552002
uucuacacugucaaagagg

SEQ ID NO: 1552004 - RNA, 19 nt, Artificial Sequence
  Description of Artificial Sequence: Synthetic oligonucleotide
  Sense strand starting at position 3450 of SEQ ID NO: 1245297
gugagauagugacuuccua

SEQ ID NO: 1552005 - RNA, 19 nt, Artificial Sequence
  Description of Artificial Sequence: Synthetic oligonucleotide
  Antisense strand to SEQ ID NO: 1552004
uaggaagucacuaucucac

SEQ ID NO: 1552006 - RNA, 19 nt, Artificial Sequence
  Description of Artificial Sequence: Synthetic oligonucleotide
  Sense strand starting at position 3454 of SEQ ID NO: 1245297
gauagugacuuccuaagaa

SEQ ID NO: 1552007 - RNA, 19 nt, Artificial Sequence
  Description of Artificial Sequence: Synthetic oligonucleotide
  Antisense strand to SEQ ID NO: 1552006
uucuuaggaagucacuauc

SEQ ID NO: 1552008 - RNA, 19 nt, Artificial Sequence
  Description of Artificial Sequence: Synthetic oligonucleotide
  Sense strand starting at position 3573 of SEQ ID NO: 1245297
ugucucuuugccuauagau

SEQ ID NO: 1552009 - RNA, 19 nt, Artificial Sequence
  Description of Artificial Sequence: Synthetic oligonucleotide
  Antisense strand to SEQ ID NO: 1552008
aucuauaggcaaagagaca

SEQ ID NO: 1552010 - RNA, 19 nt, Artificial Sequence
  Description of Artificial Sequence: Synthetic oligonucleotide
  Sense strand starting at position 3683 of SEQ ID NO: 1245297
cauugaauggaauggugua

SEQ ID NO: 1552011 - RNA, 19 nt, Artificial Sequence
  Description of Artificial Sequence: Synthetic oligonucleotide
  Antisense strand to SEQ ID NO: 1552010
uacaccauuccauucaaug

SEQ ID NO: 1552012 - RNA, 19 nt, Artificial Sequence
  Description of Artificial Sequence: Synthetic oligonucleotide
  Sense strand starting at position 3684 of SEQ ID NO: 1245297
auugaauggaaugguguaa

SEQ ID NO: 1552013 - RNA, 19 nt, Artificial Sequence
  Description of Artificial Sequence: Synthetic oligonucleotide
  Antisense strand to SEQ ID NO: 1552012
uuacaccauuccauucaau

SEQ ID NO: 1552014 - RNA, 19 nt, Artificial Sequence
  Description of Artificial Sequence: Synthetic oligonucleotide
  Sense strand starting at position 3836 of SEQ ID NO: 1245297
ccuacaacucugcaaggua

SEQ ID NO: 1552015 - RNA, 19 nt, Artificial Sequence
  Description of Artificial Sequence: Synthetic oligonucleotide
  Antisense strand to SEQ ID NO: 1552014
uaccuugcagaguuguagg

SEQ ID NO: 1552016 - RNA, 19 nt, Artificial Sequence
  Description of Artificial Sequence: Synthetic oligonucleotide
  Sense strand starting at position 3839 of SEQ ID NO: 1245297
acaacucugcaagguagau

SEQ ID NO: 1552017 - RNA, 19 nt, Artificial Sequence
  Description of Artificial Sequence: Synthetic oligonucleotide
  Antisense strand to SEQ ID NO: 1552016
aucuaccuugcagaguugu

SEQ ID NO: 1552018 - RNA, 19 nt, Artificial Sequence
  Description of Artificial Sequence: Synthetic oligonucleotide
  Sense strand starting at position 138 of SEQ ID NO: 1245298
ggcuuauguguuccugugu

SEQ ID NO: 1552019 - RNA, 19 nt, Artificial Sequence
  Description of Artificial Sequence: Synthetic oligonucleotide
  Antisense strand to SEQ ID NO: 1552018
acacaggaacacauaagcc

SEQ ID NO: 1552020 - RNA, 19 nt, Artificial Sequence
  Description of Artificial Sequence: Synthetic oligonucleotide
  Sense strand starting at position 204 of SEQ ID NO: 1245298
uuccauaaguacuuggaca

SEQ ID NO: 1552021 - RNA, 19 nt, Artificial Sequence
  Description of Artificial Sequence: Synthetic oligonucleotide
  Antisense strand to SEQ ID NO: 1552020
uguccaaguacuuauggaa

SEQ ID NO: 1552022 - RNA, 19 nt, Artificial Sequence
  Description of Artificial Sequence: Synthetic oligonucleotide
  Sense strand starting at position 301 of SEQ ID NO: 1245298
gagggcuuuccugauagac

SEQ ID NO: 1552023 - RNA, 19 nt, Artificial Sequence
  Description of Artificial Sequence: Synthetic oligonucleotide
  Antisense strand to SEQ ID NO: 1552022
gucuaucaggaaagcccuc

SEQ ID NO: 1552024 - RNA, 19 nt, Artificial Sequence
  Description of Artificial Sequence: Synthetic oligonucleotide
  Sense strand starting at position 365 of SEQ ID NO: 1245298
ggucaagaagagcguauuu

SEQ ID NO: 1552025 - RNA, 19 nt, Artificial Sequence
  Description of Artificial Sequence: Synthetic oligonucleotide
  Antisense strand to SEQ ID NO: 1552024
aaauacgcucuucuugacc

SEQ ID NO: 1552026 - RNA, 19 nt, Artificial Sequence
  Description of Artificial Sequence: Synthetic oligonucleotide
  Sense strand starting at position 640 of SEQ ID NO: 1245298
uuuagcgagaccuagaaua

SEQ ID NO: 1552027 - RNA, 19 nt, Artificial Sequence
  Description of Artificial Sequence: Synthetic oligonucleotide
  Antisense strand to SEQ ID NO: 1552026
uauucuaggucucgcuaaa

SEQ ID NO: 1552028 - RNA, 19 nt, Artificial Sequence
  Description of Artificial Sequence: Synthetic oligonucleotide
  Sense strand starting at position 706 of SEQ ID NO: 1245298
ggaauccuuucugcuucua

SEQ ID NO: 1552029 - RNA, 19 nt, Artificial Sequence
  Description of Artificial Sequence: Synthetic oligonucleotide
  Antisense strand to SEQ ID NO: 1552028
uagaagcagaaaggauucc

SEQ ID NO: 1552030 - RNA, 19 nt, Artificial Sequence
  Description of Artificial Sequence: Synthetic oligonucleotide
  Sense strand starting at position 735 of SEQ ID NO: 1245298
ugcaucgauccggaauaca

SEQ ID NO: 1552031 - RNA, 19 nt, Artificial Sequence
  Description of Artificial Sequence: Synthetic oligonucleotide
  Antisense strand to SEQ ID NO: 1552030
uguauuccggaucgaugca

SEQ ID NO: 1552032 - RNA, 19 nt, Artificial Sequence
  Description of Artificial Sequence: Synthetic oligonucleotide
  Sense strand starting at position 814 of SEQ ID NO: 1245298
cuucucuugcugggagaca

SEQ ID NO: 1552033 - RNA, 19 nt, Artificial Sequence
  Description of Artificial Sequence: Synthetic oligonucleotide
  Antisense strand to SEQ ID NO: 1552032
ugucucccagcaagagaag

SEQ ID NO: 1552034 - RNA, 19 nt, Artificial Sequence
  Description of Artificial Sequence: Synthetic oligonucleotide
  Sense strand starting at position 1122 of SEQ ID NO: 1245298
uaauuaagccgagacuuga

SEQ ID NO: 1552035 - RNA, 19 nt, Artificial Sequence
  Description of Artificial Sequence: Synthetic oligonucleotide
  Antisense strand to SEQ ID NO: 1552034
ucaagucucggcuuaauua

SEQ ID NO: 1552036 - RNA, 19 nt, Artificial Sequence
  Description of Artificial Sequence: Synthetic oligonucleotide
  Sense strand starting at position 1240 of SEQ ID NO: 1245298
acuugacucugggcugaau

SEQ ID NO: 1552037 - RNA, 19 nt, Artificial Sequence
  Description of Artificial Sequence: Synthetic oligonucleotide
  Antisense strand to SEQ ID NO: 1552036
auucagcccagagucaagu

SEQ ID NO: 1552038 - RNA, 19 nt, Artificial Sequence
  Description of Artificial Sequence: Synthetic oligonucleotide
  Sense strand starting at position 1274 of SEQ ID NO: 1245298
accacauaucucuggucau

SEQ ID NO: 1552039 - RNA, 19 nt, Artificial Sequence
  Description of Artificial Sequence: Synthetic oligonucleotide
  Antisense strand to SEQ ID NO: 1552038
augaccagagauauguggu

SEQ ID NO: 1552040 - RNA, 19 nt, Artificial Sequence
  Description of Artificial Sequence: Synthetic oligonucleotide
  Sense strand starting at position 1277 of SEQ ID NO: 1245298
acauaucucuggucaugaa

SEQ ID NO: 1552041 - RNA, 19 nt, Artificial Sequence
  Description of Artificial Sequence: Synthetic oligonucleotide
  Antisense strand to SEQ ID NO: 1552040
uucaugaccagagauaugu

SEQ ID NO: 1552042 - RNA, 19 nt, Artificial Sequence
  Description of Artificial Sequence: Synthetic oligonucleotide
  Sense strand starting at position 1841 of SEQ ID NO: 1245298
aagaacuuaccucggguuu

SEQ ID NO: 1552043 - RNA, 19 nt, Artificial Sequence
  Description of Artificial Sequence: Synthetic oligonucleotide
  Antisense strand to SEQ ID NO: 1552042
aaacccgagguaaguucuu

SEQ ID NO: 1552044 - RNA, 19 nt, Artificial Sequence
  Description of Artificial Sequence: Synthetic oligonucleotide
  Sense strand starting at position 2043 of SEQ ID NO: 1245298
ucagcaucucucgagugga

SEQ ID NO: 1552045 - RNA, 19 nt, Artificial Sequence
  Description of Artificial Sequence: Synthetic oligonucleotide
  Antisense strand to SEQ ID NO: 1552044
uccacucgagagaugcuga

SEQ ID NO: 1552046 - RNA, 19 nt, Artificial Sequence
  Description of Artificial Sequence: Synthetic oligonucleotide
  Sense strand starting at position 2115 of SEQ ID NO: 1245298
cugggaaccaaagguguau

SEQ ID NO: 1552047 - RNA, 19 nt, Artificial Sequence
  Description of Artificial Sequence: Synthetic oligonucleotide
  Antisense strand to SEQ ID NO: 1552046
auacaccuuugguucccag

SEQ ID NO: 1552048 - RNA, 19 nt, Artificial Sequence
  Description of Artificial Sequence: Synthetic oligonucleotide
  Sense strand starting at position 2126 of SEQ ID NO: 1245298
agguguauagccugaugaa

SEQ ID NO: 1552049 - RNA, 19 nt, Artificial Sequence
  Description of Artificial Sequence: Synthetic oligonucleotide
  Antisense strand to SEQ ID NO: 1552048
uucaucaggcuauacaccu

SEQ ID NO: 1552050 - RNA, 19 nt, Artificial Sequence
  Description of Artificial Sequence: Synthetic oligonucleotide
  Sense strand starting at position 2127 of SEQ ID NO: 1245298
gguguauagccugaugaac

SEQ ID NO: 1552051 - RNA, 19 nt, Artificial Sequence
  Description of Artificial Sequence: Synthetic oligonucleotide
  Antisense strand to SEQ ID NO: 1552050
guucaucaggcuauacacc

SEQ ID NO: 1552052 - RNA, 19 nt, Artificial Sequence
  Description of Artificial Sequence: Synthetic oligonucleotide
  Sense strand starting at position 2199 of SEQ ID NO: 1245298
acaagucauucucuguaac

SEQ ID NO: 1552053 - RNA, 19 nt, Artificial Sequence
  Description of Artificial Sequence: Synthetic oligonucleotide
  Antisense strand to SEQ ID NO: 1552052
guuacagagaaugacuugu

SEQ ID NO: 1552054 - RNA, 19 nt, Artificial Sequence
  Description of Artificial Sequence: Synthetic oligonucleotide
  Sense strand starting at position 2202 of SEQ ID NO: 1245298
agucauucucuguaacaga

SEQ ID NO: 1552055 - RNA, 19 nt, Artificial Sequence
  Description of Artificial Sequence: Synthetic oligonucleotide
  Antisense strand to SEQ ID NO: 1552054
ucuguuacagagaaugacu

SEQ ID NO: 1552056 - RNA, 19 nt, Artificial Sequence
  Description of Artificial Sequence: Synthetic oligonucleotide
  Sense strand starting at position 2250 of SEQ ID NO: 1245298
ugccaaaugccaggaagaa

SEQ ID NO: 1552057 - RNA, 19 nt, Artificial Sequence
  Description of Artificial Sequence: Synthetic oligonucleotide
  Antisense strand to SEQ ID NO: 1552056
uucuuccuggcauuuggca

SEQ ID NO: 1552058 - RNA, 19 nt, Artificial Sequence
  Description of Artificial Sequence: Synthetic oligonucleotide
  Sense strand starting at position 2640 of SEQ ID NO: 1245298
aagaaacugugcuuggauu

SEQ ID NO: 1552059 - RNA, 19 nt, Artificial Sequence
  Description of Artificial Sequence: Synthetic oligonucleotide
  Antisense strand to SEQ ID NO: 1552058
aauccaagcacaguuucuu

SEQ ID NO: 1552060 - RNA, 19 nt, Artificial Sequence
  Description of Artificial Sequence: Synthetic oligonucleotide
  Sense strand starting at position 2641 of SEQ ID NO: 1245298
agaaacugugcuuggauua

SEQ ID NO: 1552061 - RNA, 19 nt, Artificial Sequence
  Description of Artificial Sequence: Synthetic oligonucleotide
  Antisense strand to SEQ ID NO: 1552060
uaauccaagcacaguuucu

SEQ ID NO: 1552062 - RNA, 19 nt, Artificial Sequence
  Description of Artificial Sequence: Synthetic oligonucleotide
  Sense strand starting at position 2654 of SEQ ID NO: 1245298
ggauuagucuuagcuuuaa

SEQ ID NO: 1552063 - RNA, 19 nt, Artificial Sequence
  Description of Artificial Sequence: Synthetic oligonucleotide
  Antisense strand to SEQ ID NO: 1552062
uuaaagcuaagacuaaucc

SEQ ID NO: 1552064 - RNA, 19 nt, Artificial Sequence
  Description of Artificial Sequence: Synthetic oligonucleotide
  Sense strand starting at position 2691 of SEQ ID NO: 1245298
gagauuugccaucguugcu

SEQ ID NO: 1552065 - RNA, 19 nt, Artificial Sequence
  Description of Artificial Sequence: Synthetic oligonucleotide
  Antisense strand to SEQ ID NO: 1552064
agcaacgauggcaaaucuc

SEQ ID NO: 1552066 - RNA, 19 nt, Artificial Sequence
  Description of Artificial Sequence: Synthetic oligonucleotide
  Sense strand starting at position 2719 of SEQ ID NO: 1245298
cuccuagaagggugucuua

SEQ ID NO: 1552067 - RNA, 19 nt, Artificial Sequence
  Description of Artificial Sequence: Synthetic oligonucleotide
  Antisense strand to SEQ ID NO: 1552066
uaagacacccuucuaggag

SEQ ID NO: 1552068 - RNA, 19 nt, Artificial Sequence
  Description of Artificial Sequence: Synthetic oligonucleotide
  Sense strand starting at position 2741 of SEQ ID NO: 1245298
cuuccuucugccuagagga

SEQ ID NO: 1552069 - RNA, 19 nt, Artificial Sequence
  Description of Artificial Sequence: Synthetic oligonucleotide
  Antisense strand to SEQ ID NO: 1552068
uccucuaggcagaaggaag

SEQ ID NO: 1552070 - RNA, 19 nt, Artificial Sequence
  Description of Artificial Sequence: Synthetic oligonucleotide
  Sense strand starting at position 2787 of SEQ ID NO: 1245298
gggcauaugggucaugugu

SEQ ID NO: 1552071 - RNA, 19 nt, Artificial Sequence
  Description of Artificial Sequence: Synthetic oligonucleotide
  Antisense strand to SEQ ID NO: 1552070
acacaugacccauaugccc

SEQ ID NO: 1552072 - RNA, 19 nt, Artificial Sequence
  Description of Artificial Sequence: Synthetic oligonucleotide
  Sense strand starting at position 2899 of SEQ ID NO: 1245298
uuuaauaggcacugagaau

SEQ ID NO: 1552073 - RNA, 19 nt, Artificial Sequence
  Description of Artificial Sequence: Synthetic oligonucleotide
  Antisense strand to SEQ ID NO: 1552072
auucucagugccuauuaaa

SEQ ID NO: 1552074 - RNA, 19 nt, Artificial Sequence
  Description of Artificial Sequence: Synthetic oligonucleotide
  Sense strand starting at position 2919 of SEQ ID NO: 1245298
uugcaaauugaguaagguu

SEQ ID NO: 1552075 - RNA, 19 nt, Artificial Sequence
  Description of Artificial Sequence: Synthetic oligonucleotide
  Antisense strand to SEQ ID NO: 1552074
aaccuuacucaauuugcaa

SEQ ID NO: 1552076 - RNA, 19 nt, Artificial Sequence
  Description of Artificial Sequence: Synthetic oligonucleotide
  Sense strand starting at position 2963 of SEQ ID NO: 1245298
ccuggaugccagugaaaug

SEQ ID NO: 1552077 - RNA, 19 nt, Artificial Sequence
  Description of Artificial Sequence: Synthetic oligonucleotide
  Antisense strand to SEQ ID NO: 1552076
cauuucacuggcauccagg

SEQ ID NO: 1552078 - RNA, 19 nt, Artificial Sequence
  Description of Artificial Sequence: Synthetic oligonucleotide
  Sense strand starting at position 2968 of SEQ ID NO: 1245298
augccagugaaauggaaau

SEQ ID NO: 1552079 - RNA, 19 nt, Artificial Sequence
  Description of Artificial Sequence: Synthetic oligonucleotide
  Antisense strand to SEQ ID NO: 1552078
auuuccauuucacuggcau

SEQ ID NO: 1552080 - RNA, 19 nt, Artificial Sequence
  Description of Artificial Sequence: Synthetic oligonucleotide
  Sense strand starting at position 2974 of SEQ ID NO: 1245298
gugaaauggaaauguuagu

SEQ ID NO: 1552081 - RNA, 19 nt, Artificial Sequence
  Description of Artificial Sequence: Synthetic oligonucleotide
  Antisense strand to SEQ ID NO: 1552080
acuaacauuuccauuucac

SEQ ID NO: 1552082 - RNA, 19 nt, Artificial Sequence
  Description of Artificial Sequence: Synthetic oligonucleotide
  Sense strand starting at position 3013 of SEQ ID NO: 1245298
cucugagucggccauaaug

SEQ ID NO: 1552083 - RNA, 19 nt, Artificial Sequence
  Description of Artificial Sequence: Synthetic oligonucleotide
  Antisense strand to SEQ ID NO: 1552082
cauuauggccgacucagag

SEQ ID NO: 1552084 - RNA, 19 nt, Artificial Sequence
  Description of Artificial Sequence: Synthetic oligonucleotide
  Sense strand starting at position 3180 of SEQ ID NO: 1245298
cuggcauguccugaggacu

SEQ ID NO: 1552085 - RNA, 19 nt, Artificial Sequence
  Description of Artificial Sequence: Synthetic oligonucleotide
  Antisense strand to SEQ ID NO: 1552084
aguccucaggacaugccag

SEQ ID NO: 1552086 - RNA, 19 nt, Artificial Sequence
  Description of Artificial Sequence: Synthetic oligonucleotide
  Sense strand starting at position 3183 of SEQ ID NO: 1245298
gcauguccugaggacuacu

SEQ ID NO: 1552087 - RNA, 19 nt, Artificial Sequence
  Description of Artificial Sequence: Synthetic oligonucleotide
  Antisense strand to SEQ ID NO: 1552086
aguaguccucaggacaugc

SEQ ID NO: 1552088 - RNA, 19 nt, Artificial Sequence
  Description of Artificial Sequence: Synthetic oligonucleotide
  Sense strand starting at position 3546 of SEQ ID NO: 1245298
ccuccaucuggugacagau

SEQ ID NO: 1552089 - RNA, 19 nt, Artificial Sequence
  Description of Artificial Sequence: Synthetic oligonucleotide
  Antisense strand to SEQ ID NO: 1552088
aucugucaccagauggagg

SEQ ID NO: 1552090 - RNA, 19 nt, Artificial Sequence
  Description of Artificial Sequence: Synthetic oligonucleotide
  Sense strand starting at position 3681 of SEQ ID NO: 1245298
gguggaauauauguugaug

SEQ ID NO: 1552091 - RNA, 19 nt, Artificial Sequence
  Description of Artificial Sequence: Synthetic oligonucleotide
  Antisense strand to SEQ ID NO: 1552090
caucaacauauauuccacc

SEQ ID NO: 1552092 - RNA, 19 nt, Artificial Sequence
  Description of Artificial Sequence: Synthetic oligonucleotide
  Sense strand starting at position 3720 of SEQ ID NO: 1245298
ugauuucuaugcuaacaag

SEQ ID NO: 1552093 - RNA, 19 nt, Artificial Sequence
  Description of Artificial Sequence: Synthetic oligonucleotide
  Antisense strand to SEQ ID NO: 1552092
cuuguuagcauagaaauca

SEQ ID NO: 1552094 - RNA, 19 nt, Artificial Sequence
  Description of Artificial Sequence: Synthetic oligonucleotide
  Sense strand starting at position 3759 of SEQ ID NO: 1245298
ccugaagcagaguauugau

SEQ ID NO: 1552095 - RNA, 19 nt, Artificial Sequence
  Description of Artificial Sequence: Synthetic oligonucleotide
  Antisense strand to SEQ ID NO: 1552094
aucaauacucugcuucagg

SEQ ID NO: 1552096 - RNA, 19 nt, Artificial Sequence
  Description of Artificial Sequence: Synthetic oligonucleotide
  Sense strand starting at position 3768 of SEQ ID NO: 1245298
gaguauugauagguuccca

SEQ ID NO: 1552097 - RNA, 19 nt, Artificial Sequence
  Description of Artificial Sequence: Synthetic oligonucleotide
  Antisense strand to SEQ ID NO: 1552096
ugggaaccuaucaauacuc

SEQ ID NO: 1552098 - RNA, 19 nt, Artificial Sequence
  Description of Artificial Sequence: Synthetic oligonucleotide
  Sense strand starting at position 201 of SEQ ID NO: 1245299
accuaaauacgugauucuu

SEQ ID NO: 1552099 - RNA, 19 nt, Artificial Sequence
  Description of Artificial Sequence: Synthetic oligonucleotide
  Antisense strand to SEQ ID NO: 1552098
aagaaucacguauuuaggu

SEQ ID NO: 1552100 - RNA, 19 nt, Artificial Sequence
  Description of Artificial Sequence: Synthetic oligonucleotide
  Sense strand starting at position 230 of SEQ ID NO: 1245299
cauaccggauucuuuguaa

SEQ ID NO: 1552101 - RNA, 19 nt, Artificial Sequence
  Description of Artificial Sequence: Synthetic oligonucleotide
  Antisense strand to SEQ ID NO: 1552100
uuacaaagaauccgguaug

SEQ ID NO: 1552102 - RNA, 19 nt, Artificial Sequence
  Description of Artificial Sequence: Synthetic oligonucleotide
  Sense strand starting at position 233 of SEQ ID NO: 1245299
accggauucuuuguaacaa

SEQ ID NO: 1552103 - RNA, 19 nt, Artificial Sequence
  Description of Artificial Sequence: Synthetic oligonucleotide
  Antisense strand to SEQ ID NO: 1552102
uuguuacaaagaauccggu

SEQ ID NO: 1552104 - RNA, 19 nt, Artificial Sequence
  Description of Artificial Sequence: Synthetic oligonucleotide
  Sense strand starting at position 302 of SEQ ID NO: 1245299
acagaaaguucuguuaaua

SEQ ID NO: 1552105 - RNA, 19 nt, Artificial Sequence
  Description of Artificial Sequence: Synthetic oligonucleotide
  Antisense strand to SEQ ID NO: 1552104
uauuaacagaacuuucugu

SEQ ID NO: 1552106 - RNA, 19 nt, Artificial Sequence
  Description of Artificial Sequence: Synthetic oligonucleotide
  Sense strand starting at position 525 of SEQ ID NO: 1245299
auaauuaccuguccaguaa

SEQ ID NO: 1552107 - RNA, 19 nt, Artificial Sequence
  Description of Artificial Sequence: Synthetic oligonucleotide
  Antisense strand to SEQ ID NO: 1552106
uuacuggacagguaauuau

SEQ ID NO: 1552108 - RNA, 19 nt, Artificial Sequence
  Description of Artificial Sequence: Synthetic oligonucleotide
  Sense strand starting at position 536 of SEQ ID NO: 1245299
uccaguaaggcuuaguaau

SEQ ID NO: 1552109 - RNA, 19 nt, Artificial Sequence
  Description of Artificial Sequence: Synthetic oligonucleotide
  Antisense strand to SEQ ID NO: 1552108
auuacuaagccuuacugga

SEQ ID NO: 1552110 - RNA, 19 nt, Artificial Sequence
  Description of Artificial Sequence: Synthetic oligonucleotide
  Sense strand starting at position 669 of SEQ ID NO: 1245299
ucaaauaaggucugagagu

SEQ ID NO: 1552111 - RNA, 19 nt, Artificial Sequence
  Description of Artificial Sequence: Synthetic oligonucleotide
  Antisense strand to SEQ ID NO: 1552110
acucucagaccuuauuuga

SEQ ID NO: 1552112 - RNA, 19 nt, Artificial Sequence
  Description of Artificial Sequence: Synthetic oligonucleotide
  Sense strand starting at position 739 of SEQ ID NO: 1245299
cucagauaaggccauacuu

SEQ ID NO: 1552113 - RNA, 19 nt, Artificial Sequence
  Description of Artificial Sequence: Synthetic oligonucleotide
  Antisense strand to SEQ ID NO: 1552112
aaguauggccuuaucugag

SEQ ID NO: 1552114 - RNA, 19 nt, Artificial Sequence
  Description of Artificial Sequence: Synthetic oligonucleotide
  Sense strand starting at position 749 of SEQ ID NO: 1245299
gccauacuuuauguuugaa

SEQ ID NO: 1552115 - RNA, 19 nt, Artificial Sequence
  Description of Artificial Sequence: Synthetic oligonucleotide
  Antisense strand to SEQ ID NO: 1552114
uucaaacauaaaguauggc

SEQ ID NO: 1552116 - RNA, 19 nt, Artificial Sequence
  Description of Artificial Sequence: Synthetic oligonucleotide
  Sense strand starting at position 921 of SEQ ID NO: 1245299
uuaauaguauuacugggau

SEQ ID NO: 1552117 - RNA, 19 nt, Artificial Sequence
  Description of Artificial Sequence: Synthetic oligonucleotide
  Antisense strand to SEQ ID NO: 1552116
aucccaguaauacuauuaa

SEQ ID NO: 1552118 - RNA, 19 nt, Artificial Sequence
  Description of Artificial Sequence: Synthetic oligonucleotide
  Sense strand starting at position 927 of SEQ ID NO: 1245299
guauuacugggaugaauua

SEQ ID NO: 1552119 - RNA, 19 nt, Artificial Sequence
  Description of Artificial Sequence: Synthetic oligonucleotide
  Antisense strand to SEQ ID NO: 1552118
uaauucaucccaguaauac

SEQ ID NO: 1552120 - RNA, 19 nt, Artificial Sequence
  Description of Artificial Sequence: Synthetic oligonucleotide
  Sense strand starting at position 948 of SEQ ID NO: 1245299
gggaguaauaugcaggguu

SEQ ID NO: 1552121 - RNA, 19 nt, Artificial Sequence
  Description of Artificial Sequence: Synthetic oligonucleotide
  Antisense strand to SEQ ID NO: 1552120
aacccugcauauuacuccc

SEQ ID NO: 1552122 - RNA, 19 nt, Artificial Sequence
  Description of Artificial Sequence: Synthetic oligonucleotide
  Sense strand starting at position 1043 of SEQ ID NO: 1245299
ggaagaauuugggaggagu

SEQ ID NO: 1552123 - RNA, 19 nt, Artificial Sequence
  Description of Artificial Sequence: Synthetic oligonucleotide
  Antisense strand to SEQ ID NO: 1552122
acuccucccaaauucuucc

SEQ ID NO: 1552124 - RNA, 19 nt, Artificial Sequence
  Description of Artificial Sequence: Synthetic oligonucleotide
  Sense strand starting at position 1102 of SEQ ID NO: 1245299
ggauguuagauuggaguuu

SEQ ID NO: 1552125 - RNA, 19 nt, Artificial Sequence
  Description of Artificial Sequence: Synthetic oligonucleotide
  Antisense strand to SEQ ID NO: 1552124
aaacuccaaucuaacaucc

SEQ ID NO: 1552126 - RNA, 19 nt, Artificial Sequence
  Description of Artificial Sequence: Synthetic oligonucleotide
  Sense strand starting at position 1365 of SEQ ID NO: 1245299
acuacuuuggcugauuauu

SEQ ID NO: 1552127 - RNA, 19 nt, Artificial Sequence
  Description of Artificial Sequence: Synthetic oligonucleotide
  Antisense strand to SEQ ID NO: 1552126
aauaaucagccaaaguagu

SEQ ID NO: 1552128 - RNA, 19 nt, Artificial Sequence
  Description of Artificial Sequence: Synthetic oligonucleotide
  Sense strand starting at position 1617 of SEQ ID NO: 1245299
guagcuaguagagaacaua

SEQ ID NO: 1552129 - RNA, 19 nt, Artificial Sequence
  Description of Artificial Sequence: Synthetic oligonucleotide
  Antisense strand to SEQ ID NO: 1552128
uauguucucuacuagcuac

SEQ ID NO: 1552130 - RNA, 19 nt, Artificial Sequence
  Description of Artificial Sequence: Synthetic oligonucleotide
  Sense strand starting at position 1692 of SEQ ID NO: 1245299
ugguuaaugcuacaaaggu

SEQ ID NO: 1552131 - RNA, 19 nt, Artificial Sequence
  Description of Artificial Sequence: Synthetic oligonucleotide
  Antisense strand to SEQ ID NO: 1552130
accuuuguagcauuaacca

SEQ ID NO: 1552132 - RNA, 19 nt, Artificial Sequence
  Description of Artificial Sequence: Synthetic oligonucleotide
  Sense strand starting at position 1708 of SEQ ID NO: 1245299
gguauuuguuggcuucuga

SEQ ID NO: 1552133 - RNA, 19 nt, Artificial Sequence
  Description of Artificial Sequence: Synthetic oligonucleotide
  Antisense strand to SEQ ID NO: 1552132
ucagaagccaacaaauacc

SEQ ID NO: 1552134 - RNA, 19 nt, Artificial Sequence
  Description of Artificial Sequence: Synthetic oligonucleotide
  Sense strand starting at position 1926 of SEQ ID NO: 1245299
auugaaauaccugguuguu

SEQ ID NO: 1552135 - RNA, 19 nt, Artificial Sequence
  Description of Artificial Sequence: Synthetic oligonucleotide
  Antisense strand to SEQ ID NO: 1552134
aacaaccagguauuucaau

SEQ ID NO: 1552136 - RNA, 19 nt, Artificial Sequence
  Description of Artificial Sequence: Synthetic oligonucleotide
  Sense strand starting at position 2135 of SEQ ID NO: 1245299
gaaauacuuguuuguaaag

SEQ ID NO: 1552137 - RNA, 19 nt, Artificial Sequence
  Description of Artificial Sequence: Synthetic oligonucleotide
  Antisense strand to SEQ ID NO: 1552136
cuuuacaaacaaguauuuc

SEQ ID NO: 1552138 - RNA, 19 nt, Artificial Sequence
  Description of Artificial Sequence: Synthetic oligonucleotide
  Sense strand starting at position 2146 of SEQ ID NO: 1245299
uuguaaaggcaugguuuaa

SEQ ID NO: 1552139 - RNA, 19 nt, Artificial Sequence
  Description of Artificial Sequence: Synthetic oligonucleotide
  Antisense strand to SEQ ID NO: 1552138
uuaaaccaugccuuuacaa

SEQ ID NO: 1552140 - RNA, 19 nt, Artificial Sequence
  Description of Artificial Sequence: Synthetic oligonucleotide
  Sense strand starting at position 2216 of SEQ ID NO: 1245299
ucuacacaugccugugaaa

SEQ ID NO: 1552141 - RNA, 19 nt, Artificial Sequence
  Description of Artificial Sequence: Synthetic oligonucleotide
  Antisense strand to SEQ ID NO: 1552140
uuucacaggcauguguaga

SEQ ID NO: 1552142 - RNA, 19 nt, Artificial Sequence
  Description of Artificial Sequence: Synthetic oligonucleotide
  Sense strand starting at position 2225 of SEQ ID NO: 1245299
gccugugaaaguuagcuaa

SEQ ID NO: 1552143 - RNA, 19 nt, Artificial Sequence
  Description of Artificial Sequence: Synthetic oligonucleotide
  Antisense strand to SEQ ID NO: 1552142
uuagcuaacuuucacaggc

SEQ ID NO: 1552144 - RNA, 19 nt, Artificial Sequence
  Description of Artificial Sequence: Synthetic oligonucleotide
  Sense strand starting at position 2277 of SEQ ID NO: 1245299
cuauacuugugcucaagga

SEQ ID NO: 1552145 - RNA, 19 nt, Artificial Sequence
  Description of Artificial Sequence: Synthetic oligonucleotide
  Antisense strand to SEQ ID NO: 1552144
uccuugagcacaaguauag

SEQ ID NO: 1552146 - RNA, 19 nt, Artificial Sequence
  Description of Artificial Sequence: Synthetic oligonucleotide
  Sense strand starting at position 2278 of SEQ ID NO: 1245299
uauacuugugcucaaggau

SEQ ID NO: 1552147 - RNA, 19 nt, Artificial Sequence
  Description of Artificial Sequence: Synthetic oligonucleotide
  Antisense strand to SEQ ID NO: 1552146
auccuugagcacaaguaua

SEQ ID NO: 1552148 - RNA, 19 nt, Artificial Sequence
  Description of Artificial Sequence: Synthetic oligonucleotide
  Sense strand starting at position 2317 of SEQ ID NO: 1245299
uucuucuagcuuuggacaa

SEQ ID NO: 1552149 - RNA, 19 nt, Artificial Sequence
  Description of Artificial Sequence: Synthetic oligonucleotide
  Antisense strand to SEQ ID NO: 1552148
uuguccaaagcuagaagaa

SEQ ID NO: 1552150 - RNA, 19 nt, Artificial Sequence
  Description of Artificial Sequence: Synthetic oligonucleotide
  Sense strand starting at position 2506 of SEQ ID NO: 1245299
ucgaaauaacucggauucu

SEQ ID NO: 1552151 - RNA, 19 nt, Artificial Sequence
  Description of Artificial Sequence: Synthetic oligonucleotide
  Antisense strand to SEQ ID NO: 1552150
agaauccgaguuauuucga

SEQ ID NO: 1552152 - RNA, 19 nt, Artificial Sequence
  Description of Artificial Sequence: Synthetic oligonucleotide
  Sense strand starting at position 2515 of SEQ ID NO: 1245299
cucggauucuacccuaaua

SEQ ID NO: 1552153 - RNA, 19 nt, Artificial Sequence
  Description of Artificial Sequence: Synthetic oligonucleotide
  Antisense strand to SEQ ID NO: 1552152
uauuaggguagaauccgag

SEQ ID NO: 1552154 - RNA, 19 nt, Artificial Sequence
  Description of Artificial Sequence: Synthetic oligonucleotide
  Sense strand starting at position 2517 of SEQ ID NO: 1245299
cggauucuacccuaauauc

SEQ ID NO: 1552155 - RNA, 19 nt, Artificial Sequence
  Description of Artificial Sequence: Synthetic oligonucleotide
  Antisense strand to SEQ ID NO: 1552154
gauauuaggguagaauccg

SEQ ID NO: 1552156 - RNA, 19 nt, Artificial Sequence
  Description of Artificial Sequence: Synthetic oligonucleotide
  Sense strand starting at position 3044 of SEQ ID NO: 1245299
ucugguaaugucuauguga

SEQ ID NO: 1552157 - RNA, 19 nt, Artificial Sequence
  Description of Artificial Sequence: Synthetic oligonucleotide
  Antisense strand to SEQ ID NO: 1552156
ucacauagacauuaccaga

SEQ ID NO: 1552158 - RNA, 19 nt, Artificial Sequence
  Description of Artificial Sequence: Synthetic oligonucleotide
  Sense strand starting at position 3047 of SEQ ID NO: 1245299
gguaaugucuaugugacca

SEQ ID NO: 1552159 - RNA, 19 nt, Artificial Sequence
  Description of Artificial Sequence: Synthetic oligonucleotide
  Antisense strand to SEQ ID NO: 1552158
uggucacauagacauuacc

SEQ ID NO: 1552160 - RNA, 19 nt, Artificial Sequence
  Description of Artificial Sequence: Synthetic oligonucleotide
  Sense strand starting at position 3052 of SEQ ID NO: 1245299
ugucuaugugaccaaccau

SEQ ID NO: 1552161 - RNA, 19 nt, Artificial Sequence
  Description of Artificial Sequence: Synthetic oligonucleotide
  Antisense strand to SEQ ID NO: 1552160
augguuggucacauagaca

SEQ ID NO: 1552162 - RNA, 19 nt, Artificial Sequence
  Description of Artificial Sequence: Synthetic oligonucleotide
  Sense strand starting at position 3596 of SEQ ID NO: 1245299
ccauaacuuccauggaguc

SEQ ID NO: 1552163 - RNA, 19 nt, Artificial Sequence
  Description of Artificial Sequence: Synthetic oligonucleotide
  Antisense strand to SEQ ID NO: 1552162
gacuccauggaaguuaugg

SEQ ID NO: 1552164 - RNA, 19 nt, Artificial Sequence
  Description of Artificial Sequence: Synthetic oligonucleotide
  Sense strand starting at position 3637 of SEQ ID NO: 1245299
agugaacuucuacguagaa

SEQ ID NO: 1552165 - RNA, 19 nt, Artificial Sequence
  Description of Artificial Sequence: Synthetic oligonucleotide
  Antisense strand to SEQ ID NO: 1552164
uucuacguagaaguucacu

SEQ ID NO: 1552166 - RNA, 19 nt, Artificial Sequence
  Description of Artificial Sequence: Synthetic oligonucleotide
  Sense strand starting at position 3638 of SEQ ID NO: 1245299
gugaacuucuacguagaac

SEQ ID NO: 1552167 - RNA, 19 nt, Artificial Sequence
  Description of Artificial Sequence: Synthetic oligonucleotide
  Antisense strand to SEQ ID NO: 1552166
guucuacguagaaguucac

SEQ ID NO: 1552168 - RNA, 19 nt, Artificial Sequence
  Description of Artificial Sequence: Synthetic oligonucleotide
  Sense strand starting at position 3666 of SEQ ID NO: 1245299
cagaguucaggauguggua

SEQ ID NO: 1552169 - RNA, 19 nt, Artificial Sequence
  Description of Artificial Sequence: Synthetic oligonucleotide
  Antisense strand to SEQ ID NO: 1552168
uaccacauccugaacucug

SEQ ID NO: 1552170 - RNA, 19 nt, Artificial Sequence
  Description of Artificial Sequence: Synthetic oligonucleotide
  Sense strand starting at position 3675 of SEQ ID NO: 1245299
ggaugugguauaggaaucu

SEQ ID NO: 1552171 - RNA, 19 nt, Artificial Sequence
  Description of Artificial Sequence: Synthetic oligonucleotide
  Antisense strand to SEQ ID NO: 1552170
agauuccuauaccacaucc

SEQ ID NO: 1552172 - RNA, 19 nt, Artificial Sequence
  Description of Artificial Sequence: Synthetic oligonucleotide
  Sense strand starting at position 3702 of SEQ ID NO: 1245299
cugacaguaucaucugagu

SEQ ID NO: 1552173 - RNA, 19 nt, Artificial Sequence
  Description of Artificial Sequence: Synthetic oligonucleotide
  Antisense strand to SEQ ID NO: 1552172
acucagaugauacugucag

SEQ ID NO: 1552174 - RNA, 19 nt, Artificial Sequence
  Description of Artificial Sequence: Synthetic oligonucleotide
  Sense strand starting at position 3812 of SEQ ID NO: 1245299
gguggaguaacaugcuaaa

SEQ ID NO: 1552175 - RNA, 19 nt, Artificial Sequence
  Description of Artificial Sequence: Synthetic oligonucleotide
  Antisense strand to SEQ ID NO: 1552174
uuuagcauguuacuccacc

SEQ ID NO: 1552176 - RNA, 19 nt, Artificial Sequence
  Description of Artificial Sequence: Synthetic oligonucleotide
  Sense strand starting at position 3918 of SEQ ID NO: 1245299
gccauuuacuaguuguaua

SEQ ID NO: 1552177 - RNA, 19 nt, Artificial Sequence
  Description of Artificial Sequence: Synthetic oligonucleotide
  Antisense strand to SEQ ID NO: 1552176
uauacaacuaguaaauggc

SEQ ID NO: 1552178 - RNA, 19 nt, Artificial Sequence
  Description of Artificial Sequence: Synthetic oligonucleotide
  Sense strand starting at position 13 of SEQ ID NO: 1245300
cacauugacugaucuguga

SEQ ID NO: 1552179 - RNA, 19 nt, Artificial Sequence
  Description of Artificial Sequence: Synthetic oligonucleotide
  Antisense strand to SEQ ID NO: 1552178
ucacagaucagucaaugug

SEQ ID NO: 1552180 - RNA, 19 nt, Artificial Sequence
  Description of Artificial Sequence: Synthetic oligonucleotide
  Sense strand starting at position 17 of SEQ ID NO: 1245300
uugacugaucugugacugu

SEQ ID NO: 1552181 - RNA, 19 nt, Artificial Sequence
  Description of Artificial Sequence: Synthetic oligonucleotide
  Antisense strand to SEQ ID NO: 1552180
acagucacagaucagucaa

SEQ ID NO: 1552182 - RNA, 19 nt, Artificial Sequence
  Description of Artificial Sequence: Synthetic oligonucleotide
  Sense strand starting at position 27 of SEQ ID NO: 1245300
ugugacuguuuccucauga

SEQ ID NO: 1552183 - RNA, 19 nt, Artificial Sequence
  Description of Artificial Sequence: Synthetic oligonucleotide
  Antisense strand to SEQ ID NO: 1552182
ucaugaggaaacagucaca

SEQ ID NO: 1552184 - RNA, 19 nt, Artificial Sequence
  Description of Artificial Sequence: Synthetic oligonucleotide
  Sense strand starting at position 28 of SEQ ID NO: 1245300
gugacuguuuccucaugau

SEQ ID NO: 1552185 - RNA, 19 nt, Artificial Sequence
  Description of Artificial Sequence: Synthetic oligonucleotide
  Antisense strand to SEQ ID NO: 1552184
aucaugaggaaacagucac

SEQ ID NO: 1552186 - RNA, 19 nt, Artificial Sequence
  Description of Artificial Sequence: Synthetic oligonucleotide
  Sense strand starting at position 31 of SEQ ID NO: 1245300
acuguuuccucaugauggu

SEQ ID NO: 1552187 - RNA, 19 nt, Artificial Sequence
  Description of Artificial Sequence: Synthetic oligonucleotide
  Antisense strand to SEQ ID NO: 1552186
accaucaugaggaaacagu

SEQ ID NO: 1552188 - RNA, 19 nt, Artificial Sequence
  Description of Artificial Sequence: Synthetic oligonucleotide
  Sense strand starting at position 69 of SEQ ID NO: 1245300
gagugugugccagguacau

SEQ ID NO: 1552189 - RNA, 19 nt, Artificial Sequence
  Description of Artificial Sequence: Synthetic oligonucleotide
  Antisense strand to SEQ ID NO: 1552188
auguaccuggcacacacuc

SEQ ID NO: 1552190 - RNA, 19 nt, Artificial Sequence
  Description of Artificial Sequence: Synthetic oligonucleotide
  Sense strand starting at position 95 of SEQ ID NO: 1245300
gacuuuacauggguaacuu

SEQ ID NO: 1552191 - RNA, 19 nt, Artificial Sequence
  Description of Artificial Sequence: Synthetic oligonucleotide
  Antisense strand to SEQ ID NO: 1552190
aaguuacccauguaaaguc

SEQ ID NO: 1552192 - RNA, 19 nt, Artificial Sequence
  Description of Artificial Sequence: Synthetic oligonucleotide
  Sense strand starting at position 96 of SEQ ID NO: 1245300
acuuuacauggguaacuuu

SEQ ID NO: 1552193 - RNA, 19 nt, Artificial Sequence
  Description of Artificial Sequence: Synthetic oligonucleotide
  Antisense strand to SEQ ID NO: 1552192
aaaguuacccauguaaagu

SEQ ID NO: 1552194 - RNA, 19 nt, Artificial Sequence
  Description of Artificial Sequence: Synthetic oligonucleotide
  Sense strand starting at position 105 of SEQ ID NO: 1245300
ggguaacuuuaagucuuua

SEQ ID NO: 1552195 - RNA, 19 nt, Artificial Sequence
  Description of Artificial Sequence: Synthetic oligonucleotide
  Antisense strand to SEQ ID NO: 1552194
uaaagacuuaaaguuaccc

SEQ ID NO: 1552196 - RNA, 19 nt, Artificial Sequence
  Description of Artificial Sequence: Synthetic oligonucleotide
  Sense strand starting at position 322 of SEQ ID NO: 1245300
uugugcuuauuccucuuua

SEQ ID NO: 1552197 - RNA, 19 nt, Artificial Sequence
  Description of Artificial Sequence: Synthetic oligonucleotide
  Antisense strand to SEQ ID NO: 1552196
uaaagaggaauaagcacaa

SEQ ID NO: 1552198 - RNA, 19 nt, Artificial Sequence
  Description of Artificial Sequence: Synthetic oligonucleotide
  Sense strand starting at position 323 of SEQ ID NO: 1245300
ugugcuuauuccucuuuau

SEQ ID NO: 1552199 - RNA, 19 nt, Artificial Sequence
  Description of Artificial Sequence: Synthetic oligonucleotide
  Antisense strand to SEQ ID NO: 1552198
auaaagaggaauaagcaca

SEQ ID NO: 1552200 - RNA, 19 nt, Artificial Sequence
  Description of Artificial Sequence: Synthetic oligonucleotide
  Sense strand starting at position 373 of SEQ ID NO: 1245300
uugcaacauuauugugauu

SEQ ID NO: 1552201 - RNA, 19 nt, Artificial Sequence
  Description of Artificial Sequence: Synthetic oligonucleotide
  Antisense strand to SEQ ID NO: 1552200
aaucacaauaauguugcaa

SEQ ID NO: 1552202 - RNA, 19 nt, Artificial Sequence
  Description of Artificial Sequence: Synthetic oligonucleotide
  Sense strand starting at position 375 of SEQ ID NO: 1245300
gcaacauuauugugauuag

SEQ ID NO: 1552203 - RNA, 19 nt, Artificial Sequence
  Description of Artificial Sequence: Synthetic oligonucleotide
  Antisense strand to SEQ ID NO: 1552202
cuaaucacaauaauguugc

SEQ ID NO: 1552204 - RNA, 19 nt, Artificial Sequence
  Description of Artificial Sequence: Synthetic oligonucleotide
  Sense strand starting at position 449 of SEQ ID NO: 1245300
aaggcaauguuguaaacau

SEQ ID NO: 1552205 - RNA, 19 nt, Artificial Sequence
  Description of Artificial Sequence: Synthetic oligonucleotide
  Antisense strand to SEQ ID NO: 1552204
auguuuacaacauugccuu

SEQ ID NO: 1552206 - RNA, 19 nt, Artificial Sequence
  Description of Artificial Sequence: Synthetic oligonucleotide
  Sense strand starting at position 483 of SEQ ID NO: 1245300
uguauugagucagauuucu

SEQ ID NO: 1552207 - RNA, 19 nt, Artificial Sequence
  Description of Artificial Sequence: Synthetic oligonucleotide
  Antisense strand to SEQ ID NO: 1552206
agaaaucugacucaauaca

SEQ ID NO: 1552208 - RNA, 19 nt, Artificial Sequence
  Description of Artificial Sequence: Synthetic oligonucleotide
  Sense strand starting at position 543 of SEQ ID NO: 1245300
agcaguuguguccugcuca

SEQ ID NO: 1552209 - RNA, 19 nt, Artificial Sequence
  Description of Artificial Sequence: Synthetic oligonucleotide
  Antisense strand to SEQ ID NO: 1552208
ugagcaggacacaacugcu

SEQ ID NO: 1552210 - RNA, 19 nt, Artificial Sequence
  Description of Artificial Sequence: Synthetic oligonucleotide
  Sense strand starting at position 546 of SEQ ID NO: 1245300
aguuguguccugcucaugu

SEQ ID NO: 1552211 - RNA, 19 nt, Artificial Sequence
  Description of Artificial Sequence: Synthetic oligonucleotide
  Antisense strand to SEQ ID NO: 1552210
acaugagcaggacacaacu

SEQ ID NO: 1552212 - RNA, 19 nt, Artificial Sequence
  Description of Artificial Sequence: Synthetic oligonucleotide
  Sense strand starting at position 754 of SEQ ID NO: 1245300
uuucuuaguuucugugaag

SEQ ID NO: 1552213 - RNA, 19 nt, Artificial Sequence
  Description of Artificial Sequence: Synthetic oligonucleotide
  Antisense strand to SEQ ID NO: 1552212
cuucacagaaacuaagaaa

SEQ ID NO: 1552214 - RNA, 19 nt, Artificial Sequence
  Description of Artificial Sequence: Synthetic oligonucleotide
  Sense strand starting at position 755 of SEQ ID NO: 1245300
uucuuaguuucugugaagu

SEQ ID NO: 1552215 - RNA, 19 nt, Artificial Sequence
  Description of Artificial Sequence: Synthetic oligonucleotide
  Antisense strand to SEQ ID NO: 1552214
acuucacagaaacuaagaa

SEQ ID NO: 1552216 - RNA, 19 nt, Artificial Sequence
  Description of Artificial Sequence: Synthetic oligonucleotide
  Sense strand starting at position 757 of SEQ ID NO: 1245300
cuuaguuucugugaaguuc

SEQ ID NO: 1552217 - RNA, 19 nt, Artificial Sequence
  Description of Artificial Sequence: Synthetic oligonucleotide
  Antisense strand to SEQ ID NO: 1552216
gaacuucacagaaacuaag

SEQ ID NO: 1552218 - RNA, 19 nt, Artificial Sequence
  Description of Artificial Sequence: Synthetic oligonucleotide
  Sense strand starting at position 954 of SEQ ID NO: 1245300
gucucacaguuacgggaau

SEQ ID NO: 1552219 - RNA, 19 nt, Artificial Sequence
  Description of Artificial Sequence: Synthetic oligonucleotide
  Antisense strand to SEQ ID NO: 1552218
auucccguaacugugagac

SEQ ID NO: 1552220 - RNA, 19 nt, Artificial Sequence
  Description of Artificial Sequence: Synthetic oligonucleotide
  Sense strand starting at position 1077 of SEQ ID NO: 1245300
gcugauagcuaccuucuua

SEQ ID NO: 1552221 - RNA, 19 nt, Artificial Sequence
  Description of Artificial Sequence: Synthetic oligonucleotide
  Antisense strand to SEQ ID NO: 1552220
uaagaagguagcuaucagc

SEQ ID NO: 1552222 - RNA, 19 nt, Artificial Sequence
  Description of Artificial Sequence: Synthetic oligonucleotide
  Sense strand starting at position 1202 of SEQ ID NO: 1245300
guuggaacaggucgaacau

SEQ ID NO: 1552223 - RNA, 19 nt, Artificial Sequence
  Description of Artificial Sequence: Synthetic oligonucleotide
  Antisense strand to SEQ ID NO: 1552222
auguucgaccuguuccaac

SEQ ID NO: 1552224 - RNA, 19 nt, Artificial Sequence
  Description of Artificial Sequence: Synthetic oligonucleotide
  Sense strand starting at position 1357 of SEQ ID NO: 1245300
auuauauaucuguguugug

SEQ ID NO: 1552225 - RNA, 19 nt, Artificial Sequence
  Description of Artificial Sequence: Synthetic oligonucleotide
  Antisense strand to SEQ ID NO: 1552224
cacaacacagauauauaau

SEQ ID NO: 1552226 - RNA, 19 nt, Artificial Sequence
  Description of Artificial Sequence: Synthetic oligonucleotide
  Sense strand starting at position 1358 of SEQ ID NO: 1245300
uuauauaucuguguuguga

SEQ ID NO: 1552227 - RNA, 19 nt, Artificial Sequence
  Description of Artificial Sequence: Synthetic oligonucleotide
  Antisense strand to SEQ ID NO: 1552226
ucacaacacagauauauaa

SEQ ID NO: 1552228 - RNA, 19 nt, Artificial Sequence
  Description of Artificial Sequence: Synthetic oligonucleotide
  Sense strand starting at position 1360 of SEQ ID NO: 1245300
auauaucuguguugugaga

SEQ ID NO: 1552229 - RNA, 19 nt, Artificial Sequence
  Description of Artificial Sequence: Synthetic oligonucleotide
  Antisense strand to SEQ ID NO: 1552228
ucucacaacacagauauau

SEQ ID NO: 1552230 - RNA, 19 nt, Artificial Sequence
  Description of Artificial Sequence: Synthetic oligonucleotide
  Sense strand starting at position 1980 of SEQ ID NO: 1245300
cucccucugugguuaguau

SEQ ID NO: 1552231 - RNA, 19 nt, Artificial Sequence
  Description of Artificial Sequence: Synthetic oligonucleotide
  Antisense strand to SEQ ID NO: 1552230
auacuaaccacagagggag

SEQ ID NO: 1552232 - RNA, 19 nt, Artificial Sequence
  Description of Artificial Sequence: Synthetic oligonucleotide
  Sense strand starting at position 2438 of SEQ ID NO: 1245300
ggaauauagugcuaauucu

SEQ ID NO: 1552233 - RNA, 19 nt, Artificial Sequence
  Description of Artificial Sequence: Synthetic oligonucleotide
  Antisense strand to SEQ ID NO: 1552232
agaauuagcacuauauucc

SEQ ID NO: 1552234 - RNA, 19 nt, Artificial Sequence
  Description of Artificial Sequence: Synthetic oligonucleotide
  Sense strand starting at position 2801 of SEQ ID NO: 1245300
gagauccaauggguuuauu

SEQ ID NO: 1552235 - RNA, 19 nt, Artificial Sequence
  Description of Artificial Sequence: Synthetic oligonucleotide
  Antisense strand to SEQ ID NO: 1552234
aauaaacccauuggaucuc

SEQ ID NO: 1552236 - RNA, 19 nt, Artificial Sequence
  Description of Artificial Sequence: Synthetic oligonucleotide
  Sense strand starting at position 2951 of SEQ ID NO: 1245300
uuccuaaucucagguaugu

SEQ ID NO: 1552237 - RNA, 19 nt, Artificial Sequence
  Description of Artificial Sequence: Synthetic oligonucleotide
  Antisense strand to SEQ ID NO: 1552236
acauaccugagauuaggaa

SEQ ID NO: 1552238 - RNA, 19 nt, Artificial Sequence
  Description of Artificial Sequence: Synthetic oligonucleotide
  Sense strand starting at position 3173 of SEQ ID NO: 1245300
uccaguguuuccucuggaa

SEQ ID NO: 1552239 - RNA, 19 nt, Artificial Sequence
  Description of Artificial Sequence: Synthetic oligonucleotide
  Antisense strand to SEQ ID NO: 1552238
uuccagaggaaacacugga

SEQ ID NO: 1552240 - RNA, 19 nt, Artificial Sequence
  Description of Artificial Sequence: Synthetic oligonucleotide
  Sense strand starting at position 3175 of SEQ ID NO: 1245300
caguguuuccucuggaaua

SEQ ID NO: 1552241 - RNA, 19 nt, Artificial Sequence
  Description of Artificial Sequence: Synthetic oligonucleotide
  Antisense strand to SEQ ID NO: 1552240
uauuccagaggaaacacug

SEQ ID NO: 1552242 - RNA, 19 nt, Artificial Sequence
  Description of Artificial Sequence: Synthetic oligonucleotide
  Sense strand starting at position 3177 of SEQ ID NO: 1245300
guguuuccucuggaauauc

SEQ ID NO: 1552243 - RNA, 19 nt, Artificial Sequence
  Description of Artificial Sequence: Synthetic oligonucleotide
  Antisense strand to SEQ ID NO: 1552242
gauauuccagaggaaacac

SEQ ID NO: 1552244 - RNA, 19 nt, Artificial Sequence
  Description of Artificial Sequence: Synthetic oligonucleotide
  Sense strand starting at position 3185 of SEQ ID NO: 1245300
ucuggaauaucuuguaauc

SEQ ID NO: 1552245 - RNA, 19 nt, Artificial Sequence
  Description of Artificial Sequence: Synthetic oligonucleotide
  Antisense strand to SEQ ID NO: 1552244
gauuacaagauauuccaga

SEQ ID NO: 1552246 - RNA, 19 nt, Artificial Sequence
  Description of Artificial Sequence: Synthetic oligonucleotide
  Sense strand starting at position 3444 of SEQ ID NO: 1245300
guucuucccuuacucgaga

SEQ ID NO: 1552247 - RNA, 19 nt, Artificial Sequence
  Description of Artificial Sequence: Synthetic oligonucleotide
  Antisense strand to SEQ ID NO: 1552246
ucucgaguaagggaagaac

SEQ ID NO: 1552248 - RNA, 19 nt, Artificial Sequence
  Description of Artificial Sequence: Synthetic oligonucleotide
  Sense strand starting at position 3472 of SEQ ID NO: 1245300
ccaguaaucuaccuccugu

SEQ ID NO: 1552249 - RNA, 19 nt, Artificial Sequence
  Description of Artificial Sequence: Synthetic oligonucleotide
  Antisense strand to SEQ ID NO: 1552248
acaggagguagauuacugg

SEQ ID NO: 1552250 - RNA, 19 nt, Artificial Sequence
  Description of Artificial Sequence: Synthetic oligonucleotide
  Sense strand starting at position 3584 of SEQ ID NO: 1245300
aagguuuguccacgucauu

SEQ ID NO: 1552251 - RNA, 19 nt, Artificial Sequence
  Description of Artificial Sequence: Synthetic oligonucleotide
  Antisense strand to SEQ ID NO: 1552250
aaugacguggacaaaccuu

SEQ ID NO: 1552252 - RNA, 19 nt, Artificial Sequence
  Description of Artificial Sequence: Synthetic oligonucleotide
  Sense strand starting at position 3594 of SEQ ID NO: 1245300
cacgucauugcauggauca

SEQ ID NO: 1552253 - RNA, 19 nt, Artificial Sequence
  Description of Artificial Sequence: Synthetic oligonucleotide
  Antisense strand to SEQ ID NO: 1552252
ugauccaugcaaugacgug

SEQ ID NO: 1552254 - RNA, 19 nt, Artificial Sequence
  Description of Artificial Sequence: Synthetic oligonucleotide
  Sense strand starting at position 3596 of SEQ ID NO: 1245300
cgucauugcauggaucagu

SEQ ID NO: 1552255 - RNA, 19 nt, Artificial Sequence
  Description of Artificial Sequence: Synthetic oligonucleotide
  Antisense strand to SEQ ID NO: 1552254
acugauccaugcaaugacg

SEQ ID NO: 1552256 - RNA, 19 nt, Artificial Sequence
  Description of Artificial Sequence: Synthetic oligonucleotide
  Sense strand starting at position 3890 of SEQ ID NO: 1245300
auuccaaccgacugugaau

SEQ ID NO: 1552257 - RNA, 19 nt, Artificial Sequence
  Description of Artificial Sequence: Synthetic oligonucleotide
  Antisense strand to SEQ ID NO: 1552256
auucacagucgguuggaau

SEQ ID NO: 1552258 - RNA, 19 nt, Artificial Sequence
  Description of Artificial Sequence: Synthetic oligonucleotide
  Sense strand starting at position 1 of SEQ ID NO: 1245301
gcuauuaucuuguaggaca

SEQ ID NO: 1552259 - RNA, 19 nt, Artificial Sequence
  Description of Artificial Sequence: Synthetic oligonucleotide
  Antisense strand to SEQ ID NO: 1552258
uguccuacaagauaauagc

SEQ ID NO: 1552260 - RNA, 19 nt, Artificial Sequence
  Description of Artificial Sequence: Synthetic oligonucleotide
  Sense strand starting at position 4 of SEQ ID NO: 1245301
auuaucuuguaggacacau

SEQ ID NO: 1552261 - RNA, 19 nt, Artificial Sequence
  Description of Artificial Sequence: Synthetic oligonucleotide
  Antisense strand to SEQ ID NO: 1552260
auguguccuacaagauaau

SEQ ID NO: 1552262 - RNA, 19 nt, Artificial Sequence
  Description of Artificial Sequence: Synthetic oligonucleotide
  Sense strand starting at position 33 of SEQ ID NO: 1245301
guggcucuuuccucaugau

SEQ ID NO: 1552263 - RNA, 19 nt, Artificial Sequence
  Description of Artificial Sequence: Synthetic oligonucleotide
  Antisense strand to SEQ ID NO: 1552262
aucaugaggaaagagccac

SEQ ID NO: 1552264 - RNA, 19 nt, Artificial Sequence
  Description of Artificial Sequence: Synthetic oligonucleotide
  Sense strand starting at position 36 of SEQ ID NO: 1245301
gcucuuuccucaugauggu

SEQ ID NO: 1552265 - RNA, 19 nt, Artificial Sequence
  Description of Artificial Sequence: Synthetic oligonucleotide
  Antisense strand to SEQ ID NO: 1552264
accaucaugaggaaagagc

SEQ ID NO: 1552266 - RNA, 19 nt, Artificial Sequence
  Description of Artificial Sequence: Synthetic oligonucleotide
  Sense strand starting at position 67 of SEQ ID NO: 1245301
guaagaagaguguaugcca

SEQ ID NO: 1552267 - RNA, 19 nt, Artificial Sequence
  Description of Artificial Sequence: Synthetic oligonucleotide
  Antisense strand to SEQ ID NO: 1552266
uggcauacacucuucuuac

SEQ ID NO: 1552268 - RNA, 19 nt, Artificial Sequence
  Description of Artificial Sequence: Synthetic oligonucleotide
  Sense strand starting at position 74 of SEQ ID NO: 1245301
gaguguaugccagguccau

SEQ ID NO: 1552269 - RNA, 19 nt, Artificial Sequence
  Description of Artificial Sequence: Synthetic oligonucleotide
  Antisense strand to SEQ ID NO: 1552268
auggaccuggcauacacuc

SEQ ID NO: 1552270 - RNA, 19 nt, Artificial Sequence
  Description of Artificial Sequence: Synthetic oligonucleotide
  Sense strand starting at position 329 of SEQ ID NO: 1245301
uugugcuuauuccucugaa

SEQ ID NO: 1552271 - RNA, 19 nt, Artificial Sequence
  Description of Artificial Sequence: Synthetic oligonucleotide
  Antisense strand to SEQ ID NO: 1552270
uucagaggaauaagcacaa

SEQ ID NO: 1552272 - RNA, 19 nt, Artificial Sequence
  Description of Artificial Sequence: Synthetic oligonucleotide
  Sense strand starting at position 330 of SEQ ID NO: 1245301
ugugcuuauuccucugaau

SEQ ID NO: 1552273 - RNA, 19 nt, Artificial Sequence
  Description of Artificial Sequence: Synthetic oligonucleotide
  Antisense strand to SEQ ID NO: 1552272
auucagaggaauaagcaca

SEQ ID NO: 1552274 - RNA, 19 nt, Artificial Sequence
  Description of Artificial Sequence: Synthetic oligonucleotide
  Sense strand starting at position 454 of SEQ ID NO: 1245301
aaggcacuguuguaaacau

SEQ ID NO: 1552275 - RNA, 19 nt, Artificial Sequence
  Description of Artificial Sequence: Synthetic oligonucleotide
  Antisense strand to SEQ ID NO: 1552274
auguuuacaacagugccuu

SEQ ID NO: 1552276 - RNA, 19 nt, Artificial Sequence
  Description of Artificial Sequence: Synthetic oligonucleotide
  Sense strand starting at position 551 of SEQ ID NO: 1245301
aguuguguccugcucuuau

SEQ ID NO: 1552277 - RNA, 19 nt, Artificial Sequence
  Description of Artificial Sequence: Synthetic oligonucleotide
  Antisense strand to SEQ ID NO: 1552276
auaagagcaggacacaacu

SEQ ID NO: 1552278 - RNA, 19 nt, Artificial Sequence
  Description of Artificial Sequence: Synthetic oligonucleotide
  Sense strand starting at position 656 of SEQ ID NO: 1245301
uuuaguaacgcagaaauga

SEQ ID NO: 1552279 - RNA, 19 nt, Artificial Sequence
  Description of Artificial Sequence: Synthetic oligonucleotide
  Antisense strand to SEQ ID NO: 1552278
ucauuucugcguuacuaaa

SEQ ID NO: 1552280 - RNA, 19 nt, Artificial Sequence
  Description of Artificial Sequence: Synthetic oligonucleotide
  Sense strand starting at position 771 of SEQ ID NO: 1245301
ugugaaguuccagguuuaa

SEQ ID NO: 1552281 - RNA, 19 nt, Artificial Sequence
  Description of Artificial Sequence: Synthetic oligonucleotide
  Antisense strand to SEQ ID NO: 1552280
uuaaaccuggaacuucaca

SEQ ID NO: 1552282 - RNA, 19 nt, Artificial Sequence
  Description of Artificial Sequence: Synthetic oligonucleotide
  Sense strand starting at position 783 of SEQ ID NO: 1245301
gguuuaaacuaugaccugu

SEQ ID NO: 1552283 - RNA, 19 nt, Artificial Sequence
  Description of Artificial Sequence: Synthetic oligonucleotide
  Antisense strand to SEQ ID NO: 1552282
acaggucauaguuuaaacc

SEQ ID NO: 1552284 - RNA, 19 nt, Artificial Sequence
  Description of Artificial Sequence: Synthetic oligonucleotide
  Sense strand starting at position 957 of SEQ ID NO: 1245301
uggucucacaguuauggga

SEQ ID NO: 1552285 - RNA, 19 nt, Artificial Sequence
  Description of Artificial Sequence: Synthetic oligonucleotide
  Antisense strand to SEQ ID NO: 1552284
ucccauaacugugagacca

SEQ ID NO: 1552286 - RNA, 19 nt, Artificial Sequence
  Description of Artificial Sequence: Synthetic oligonucleotide
  Sense strand starting at position 959 of SEQ ID NO: 1245301
gucucacaguuaugggaau

SEQ ID NO: 1552287 - RNA, 19 nt, Artificial Sequence
  Description of Artificial Sequence: Synthetic oligonucleotide
  Antisense strand to SEQ ID NO: 1552286
auucccauaacugugagac

SEQ ID NO: 1552288 - RNA, 19 nt, Artificial Sequence
  Description of Artificial Sequence: Synthetic oligonucleotide
  Sense strand starting at position 960 of SEQ ID NO: 1245301
ucucacaguuaugggaauu

SEQ ID NO: 1552289 - RNA, 19 nt, Artificial Sequence
  Description of Artificial Sequence: Synthetic oligonucleotide
  Antisense strand to SEQ ID NO: 1552288
aauucccauaacugugaga

SEQ ID NO: 1552290 - RNA, 19 nt, Artificial Sequence
  Description of Artificial Sequence: Synthetic oligonucleotide
  Sense strand starting at position 1082 of SEQ ID NO: 1245301
gcugauagcuaccuugcua

SEQ ID NO: 1552291 - RNA, 19 nt, Artificial Sequence
  Description of Artificial Sequence: Synthetic oligonucleotide
  Antisense strand to SEQ ID NO: 1552290
uagcaagguagcuaucagc

SEQ ID NO: 1552292 - RNA, 19 nt, Artificial Sequence
  Description of Artificial Sequence: Synthetic oligonucleotide
  Sense strand starting at position 1199 of SEQ ID NO: 1245301
ucugaacuguuggaacaga

SEQ ID NO: 1552293 - RNA, 19 nt, Artificial Sequence
  Description of Artificial Sequence: Synthetic oligonucleotide
  Antisense strand to SEQ ID NO: 1552292
ucuguuccaacaguucaga

SEQ ID NO: 1552294 - RNA, 19 nt, Artificial Sequence
  Description of Artificial Sequence: Synthetic oligonucleotide
  Sense strand starting at position 1207 of SEQ ID NO: 1245301
guuggaacagaucgaacau

SEQ ID NO: 1552295 - RNA, 19 nt, Artificial Sequence
  Description of Artificial Sequence: Synthetic oligonucleotide
  Antisense strand to SEQ ID NO: 1552294
auguucgaucuguuccaac

SEQ ID NO: 1552296 - RNA, 19 nt, Artificial Sequence
  Description of Artificial Sequence: Synthetic oligonucleotide
  Sense strand starting at position 1361 of SEQ ID NO: 1245301
aaugauauaucuggguugu

SEQ ID NO: 1552297 - RNA, 19 nt, Artificial Sequence
  Description of Artificial Sequence: Synthetic oligonucleotide
  Antisense strand to SEQ ID NO: 1552296
acaacccagauauaucauu

SEQ ID NO: 1552298 - RNA, 19 nt, Artificial Sequence
  Description of Artificial Sequence: Synthetic oligonucleotide
  Sense strand starting at position 1362 of SEQ ID NO: 1245301
augauauaucuggguugug

SEQ ID NO: 1552299 - RNA, 19 nt, Artificial Sequence
  Description of Artificial Sequence: Synthetic oligonucleotide
  Antisense strand to SEQ ID NO: 1552298
cacaacccagauauaucau

SEQ ID NO: 1552300 - RNA, 19 nt, Artificial Sequence
  Description of Artificial Sequence: Synthetic oligonucleotide
  Sense strand starting at position 1363 of SEQ ID NO: 1245301
ugauauaucuggguuguga

SEQ ID NO: 1552301 - RNA, 19 nt, Artificial Sequence
  Description of Artificial Sequence: Synthetic oligonucleotide
  Antisense strand to SEQ ID NO: 1552300
ucacaacccagauauauca

SEQ ID NO: 1552302 - RNA, 19 nt, Artificial Sequence
  Description of Artificial Sequence: Synthetic oligonucleotide
  Sense strand starting at position 1367 of SEQ ID NO: 1245301
auaucuggguugugagauu

SEQ ID NO: 1552303 - RNA, 19 nt, Artificial Sequence
  Description of Artificial Sequence: Synthetic oligonucleotide
  Antisense strand to SEQ ID NO: 1552302
aaucucacaacccagauau

SEQ ID NO: 1552304 - RNA, 19 nt, Artificial Sequence
  Description of Artificial Sequence: Synthetic oligonucleotide
  Sense strand starting at position 1562 of SEQ ID NO: 1245301
guaggauggcuuuacaaug

SEQ ID NO: 1552305 - RNA, 19 nt, Artificial Sequence
  Description of Artificial Sequence: Synthetic oligonucleotide
  Antisense strand to SEQ ID NO: 1552304
cauuguaaagccauccuac

SEQ ID NO: 1552306 - RNA, 19 nt, Artificial Sequence
  Description of Artificial Sequence: Synthetic oligonucleotide
  Sense strand starting at position 1983 of SEQ ID NO: 1245301
gccuuucccucugugguua

SEQ ID NO: 1552307 - RNA, 19 nt, Artificial Sequence
  Description of Artificial Sequence: Synthetic oligonucleotide
  Antisense strand to SEQ ID NO: 1552306
uaaccacagagggaaaggc

SEQ ID NO: 1552308 - RNA, 19 nt, Artificial Sequence
  Description of Artificial Sequence: Synthetic oligonucleotide
  Sense strand starting at position 1987 of SEQ ID NO: 1245301
uucccucugugguuaguau

SEQ ID NO: 1552309 - RNA, 19 nt, Artificial Sequence
  Description of Artificial Sequence: Synthetic oligonucleotide
  Antisense strand to SEQ ID NO: 1552308
auacuaaccacagagggaa

SEQ ID NO: 1552310 - RNA, 19 nt, Artificial Sequence
  Description of Artificial Sequence: Synthetic oligonucleotide
  Sense strand starting at position 2433 of SEQ ID NO: 1245301
ucuguauaacaaggaaugu

SEQ ID NO: 1552311 - RNA, 19 nt, Artificial Sequence
  Description of Artificial Sequence: Synthetic oligonucleotide
  Antisense strand to SEQ ID NO: 1552310
acauuccuuguuauacaga

SEQ ID NO: 1552312 - RNA, 19 nt, Artificial Sequence
  Description of Artificial Sequence: Synthetic oligonucleotide
  Sense strand starting at position 2442 of SEQ ID NO: 1245301
caaggaauguagugcuaau

SEQ ID NO: 1552313 - RNA, 19 nt, Artificial Sequence
  Description of Artificial Sequence: Synthetic oligonucleotide
  Antisense strand to SEQ ID NO: 1552312
auuagcacuacauuccuug

SEQ ID NO: 1552314 - RNA, 19 nt, Artificial Sequence
  Description of Artificial Sequence: Synthetic oligonucleotide
  Sense strand starting at position 2806 of SEQ ID NO: 1245301
aggagauccgauggguuua

SEQ ID NO: 1552315 - RNA, 19 nt, Artificial Sequence
  Description of Artificial Sequence: Synthetic oligonucleotide
  Antisense strand to SEQ ID NO: 1552314
uaaacccaucggaucuccu

SEQ ID NO: 1552316 - RNA, 19 nt, Artificial Sequence
  Description of Artificial Sequence: Synthetic oligonucleotide
  Sense strand starting at position 2807 of SEQ ID NO: 1245301
ggagauccgauggguuuau

SEQ ID NO: 1552317 - RNA, 19 nt, Artificial Sequence
  Description of Artificial Sequence: Synthetic oligonucleotide
  Antisense strand to SEQ ID NO: 1552316
auaaacccaucggaucucc

SEQ ID NO: 1552318 - RNA, 19 nt, Artificial Sequence
  Description of Artificial Sequence: Synthetic oligonucleotide
  Sense strand starting at position 2925 of SEQ ID NO: 1245301
guggaacucuaagcccaau

SEQ ID NO: 1552319 - RNA, 19 nt, Artificial Sequence
  Description of Artificial Sequence: Synthetic oligonucleotide
  Antisense strand to SEQ ID NO: 1552318
auugggcuuagaguuccac

SEQ ID NO: 1552320 - RNA, 19 nt, Artificial Sequence
  Description of Artificial Sequence: Synthetic oligonucleotide
  Sense strand starting at position 2960 of SEQ ID NO: 1245301
gccagucucagguauguuu

SEQ ID NO: 1552321 - RNA, 19 nt, Artificial Sequence
  Description of Artificial Sequence: Synthetic oligonucleotide
  Antisense strand to SEQ ID NO: 1552320
aaacauaccugagacuggc

SEQ ID NO: 1552322 - RNA, 19 nt, Artificial Sequence
  Description of Artificial Sequence: Synthetic oligonucleotide
  Sense strand starting at position 3120 of SEQ ID NO: 1245301
cugucaggaucacaacauu

SEQ ID NO: 1552323 - RNA, 19 nt, Artificial Sequence
  Description of Artificial Sequence: Synthetic oligonucleotide
  Antisense strand to SEQ ID NO: 1552322
aauguugugauccugacag

SEQ ID NO: 1552324 - RNA, 19 nt, Artificial Sequence
  Description of Artificial Sequence: Synthetic oligonucleotide
  Sense strand starting at position 3192 of SEQ ID NO: 1245301
ccuggaauaucuuguaauc

SEQ ID NO: 1552325 - RNA, 19 nt, Artificial Sequence
  Description of Artificial Sequence: Synthetic oligonucleotide
  Antisense strand to SEQ ID NO: 1552324
gauuacaagauauuccagg

SEQ ID NO: 1552326 - RNA, 19 nt, Artificial Sequence
  Description of Artificial Sequence: Synthetic oligonucleotide
  Sense strand starting at position 3388 of SEQ ID NO: 1245301
gugcuaucaucaucaugau

SEQ ID NO: 1552327 - RNA, 19 nt, Artificial Sequence
  Description of Artificial Sequence: Synthetic oligonucleotide
  Antisense strand to SEQ ID NO: 1552326
aucaugaugaugauagcac

SEQ ID NO: 1552328 - RNA, 19 nt, Artificial Sequence
  Description of Artificial Sequence: Synthetic oligonucleotide
  Sense strand starting at position 3562 of SEQ ID NO: 1245301
gugacuggcuucuuuaauc

SEQ ID NO: 1552329 - RNA, 19 nt, Artificial Sequence
  Description of Artificial Sequence: Synthetic oligonucleotide
  Antisense strand to SEQ ID NO: 1552328
gauuaaagaagccagucac

SEQ ID NO: 1552330 - RNA, 19 nt, Artificial Sequence
  Description of Artificial Sequence: Synthetic oligonucleotide
  Sense strand starting at position 3594 of SEQ ID NO: 1245301
augguuuguccacaucauu

SEQ ID NO: 1552331 - RNA, 19 nt, Artificial Sequence
  Description of Artificial Sequence: Synthetic oligonucleotide
  Antisense strand to SEQ ID NO: 1552330
aaugauguggacaaaccau

SEQ ID NO: 1552332 - RNA, 19 nt, Artificial Sequence
  Description of Artificial Sequence: Synthetic oligonucleotide
  Sense strand starting at position 3681 of SEQ ID NO: 1245301
cuuuaaucauaaguugaug

SEQ ID NO: 1552333 - RNA, 19 nt, Artificial Sequence
  Description of Artificial Sequence: Synthetic oligonucleotide
  Antisense strand to SEQ ID NO: 1552332
caucaacuuaugauuaaag

SEQ ID NO: 1552334 - RNA, 19 nt, Artificial Sequence
  Description of Artificial Sequence: Synthetic oligonucleotide
  Sense strand starting at position 3686 of SEQ ID NO: 1245301
aucauaaguugauggacau

SEQ ID NO: 1552335 - RNA, 19 nt, Artificial Sequence
  Description of Artificial Sequence: Synthetic oligonucleotide
  Antisense strand to SEQ ID NO: 1552334
auguccaucaacuuaugau

SEQ ID NO: 1552336 - RNA, 19 nt, Artificial Sequence
  Description of Artificial Sequence: Synthetic oligonucleotide
  Sense strand starting at position 3737 of SEQ ID NO: 1245301
uaaugauguugugaccuuu

SEQ ID NO: 1552337 - RNA, 19 nt, Artificial Sequence
  Description of Artificial Sequence: Synthetic oligonucleotide
  Antisense strand to SEQ ID NO: 1552336
aaaggucacaacaucauua

SEQ ID NO: 1552338 - RNA, 19 nt, Artificial Sequence
  Description of Artificial Sequence: Synthetic oligonucleotide
  Sense strand starting at position 171 of SEQ ID NO: 1245302
cagaguaucguagauauca

SEQ ID NO: 1552339 - RNA, 19 nt, Artificial Sequence
  Description of Artificial Sequence: Synthetic oligonucleotide
  Antisense strand to SEQ ID NO: 1552338
ugauaucuacgauacucug

SEQ ID NO: 1552340 - RNA, 19 nt, Artificial Sequence
  Description of Artificial Sequence: Synthetic oligonucleotide
  Sense strand starting at position 281 of SEQ ID NO: 1245302
ugagaaaccuugccuauua

SEQ ID NO: 1552341 - RNA, 19 nt, Artificial Sequence
  Description of Artificial Sequence: Synthetic oligonucleotide
  Antisense strand to SEQ ID NO: 1552340
uaauaggcaagguuucuca

SEQ ID NO: 1552342 - RNA, 19 nt, Artificial Sequence
  Description of Artificial Sequence: Synthetic oligonucleotide
  Sense strand starting at position 305 of SEQ ID NO: 1245302
ucaguaauggaaugccaaa

SEQ ID NO: 1552343 - RNA, 19 nt, Artificial Sequence
  Description of Artificial Sequence: Synthetic oligonucleotide
  Antisense strand to SEQ ID NO: 1552342
uuuggcauuccauuacuga

SEQ ID NO: 1552344 - RNA, 19 nt, Artificial Sequence
  Description of Artificial Sequence: Synthetic oligonucleotide
  Sense strand starting at position 345 of SEQ ID NO: 1245302
cauucuaagucuuugagga

SEQ ID NO: 1552345 - RNA, 19 nt, Artificial Sequence
  Description of Artificial Sequence: Synthetic oligonucleotide
  Antisense strand to SEQ ID NO: 1552344
uccucaaagacuuagaaug

SEQ ID NO: 1552346 - RNA, 19 nt, Artificial Sequence
  Description of Artificial Sequence: Synthetic oligonucleotide
  Sense strand starting at position 346 of SEQ ID NO: 1245302
auucuaagucuuugaggag

SEQ ID NO: 1552347 - RNA, 19 nt, Artificial Sequence
  Description of Artificial Sequence: Synthetic oligonucleotide
  Antisense strand to SEQ ID NO: 1552346
cuccucaaagacuuagaau

SEQ ID NO: 1552348 - RNA, 19 nt, Artificial Sequence
  Description of Artificial Sequence: Synthetic oligonucleotide
  Sense strand starting at position 366 of SEQ ID NO: 1245302
aaaggaugugcaggauuaa

SEQ ID NO: 1552349 - RNA, 19 nt, Artificial Sequence
  Description of Artificial Sequence: Synthetic oligonucleotide
  Antisense strand to SEQ ID NO: 1552348
uuaauccugcacauccuuu

SEQ ID NO: 1552350 - RNA, 19 nt, Artificial Sequence
  Description of Artificial Sequence: Synthetic oligonucleotide
  Sense strand starting at position 437 of SEQ ID NO: 1245302
cgaagugauuaagugaauc

SEQ ID NO: 1552351 - RNA, 19 nt, Artificial Sequence
  Description of Artificial Sequence: Synthetic oligonucleotide
  Antisense strand to SEQ ID NO: 1552350
gauucacuuaaucacuucg

SEQ ID NO: 1552352 - RNA, 19 nt, Artificial Sequence
  Description of Artificial Sequence: Synthetic oligonucleotide
  Sense strand starting at position 473 of SEQ ID NO: 1245302
cuuugugggcaagaaagua

SEQ ID NO: 1552353 - RNA, 19 nt, Artificial Sequence
  Description of Artificial Sequence: Synthetic oligonucleotide
  Antisense strand to SEQ ID NO: 1552352
uacuuucuugcccacaaag

SEQ ID NO: 1552354 - RNA, 19 nt, Artificial Sequence
  Description of Artificial Sequence: Synthetic oligonucleotide
  Sense strand starting at position 578 of SEQ ID NO: 1245302
uuagaagccugaucuugac

SEQ ID NO: 1552355 - RNA, 19 nt, Artificial Sequence
  Description of Artificial Sequence: Synthetic oligonucleotide
  Antisense strand to SEQ ID NO: 1552354
gucaagaucaggcuucuaa

SEQ ID NO: 1552356 - RNA, 19 nt, Artificial Sequence
  Description of Artificial Sequence: Synthetic oligonucleotide
  Sense strand starting at position 707 of SEQ ID NO: 1245302
gagggauugaaguggcaca

SEQ ID NO: 1552357 - RNA, 19 nt, Artificial Sequence
  Description of Artificial Sequence: Synthetic oligonucleotide
  Antisense strand to SEQ ID NO: 1552356
ugugccacuucaaucccuc

SEQ ID NO: 1552358 - RNA, 19 nt, Artificial Sequence
  Description of Artificial Sequence: Synthetic oligonucleotide
  Sense strand starting at position 732 of SEQ ID NO: 1245302
ggcguuaggaagcaaagau

SEQ ID NO: 1552359 - RNA, 19 nt, Artificial Sequence
  Description of Artificial Sequence: Synthetic oligonucleotide
  Antisense strand to SEQ ID NO: 1552358
aucuuugcuuccuaacgcc

SEQ ID NO: 1552360 - RNA, 19 nt, Artificial Sequence
  Description of Artificial Sequence: Synthetic oligonucleotide
  Sense strand starting at position 776 of SEQ ID NO: 1245302
ggagacuccuuuccucaga

SEQ ID NO: 1552361 - RNA, 19 nt, Artificial Sequence
  Description of Artificial Sequence: Synthetic oligonucleotide
  Antisense strand to SEQ ID NO: 1552360
ucugaggaaaggagucucc

SEQ ID NO: 1552362 - RNA, 19 nt, Artificial Sequence
  Description of Artificial Sequence: Synthetic oligonucleotide
  Sense strand starting at position 1060 of SEQ ID NO: 1245302
ugggcugaaauaugucuaa

SEQ ID NO: 1552363 - RNA, 19 nt, Artificial Sequence
  Description of Artificial Sequence: Synthetic oligonucleotide
  Antisense strand to SEQ ID NO: 1552362
uuagacauauuucagccca

SEQ ID NO: 1552364 - RNA, 19 nt, Artificial Sequence
  Description of Artificial Sequence: Synthetic oligonucleotide
  Sense strand starting at position 1063 of SEQ ID NO: 1245302
gcugaaauaugucuaagag

SEQ ID NO: 1552365 - RNA, 19 nt, Artificial Sequence
  Description of Artificial Sequence: Synthetic oligonucleotide
  Antisense strand to SEQ ID NO: 1552364
cucuuagacauauuucagc

SEQ ID NO: 1552366 - RNA, 19 nt, Artificial Sequence
  Description of Artificial Sequence: Synthetic oligonucleotide
  Sense strand starting at position 1064 of SEQ ID NO: 1245302
cugaaauaugucuaagagc

SEQ ID NO: 1552367 - RNA, 19 nt, Artificial Sequence
  Description of Artificial Sequence: Synthetic oligonucleotide
  Antisense strand to SEQ ID NO: 1552366
gcucuuagacauauuucag

SEQ ID NO: 1552368 - RNA, 19 nt, Artificial Sequence
  Description of Artificial Sequence: Synthetic oligonucleotide
  Sense strand starting at position 1092 of SEQ ID NO: 1245302
ugaggaucugguuacaagu

SEQ ID NO: 1552369 - RNA, 19 nt, Artificial Sequence
  Description of Artificial Sequence: Synthetic oligonucleotide
  Antisense strand to SEQ ID NO: 1552368
acuuguaaccagauccuca

SEQ ID NO: 1552370 - RNA, 19 nt, Artificial Sequence
  Description of Artificial Sequence: Synthetic oligonucleotide
  Sense strand starting at position 1101 of SEQ ID NO: 1245302
gguuacaagucucuggaau

SEQ ID NO: 1552371 - RNA, 19 nt, Artificial Sequence
  Description of Artificial Sequence: Synthetic oligonucleotide
  Antisense strand to SEQ ID NO: 1552370
auuccagagacuuguaacc

SEQ ID NO: 1552372 - RNA, 19 nt, Artificial Sequence
  Description of Artificial Sequence: Synthetic oligonucleotide
  Sense strand starting at position 1102 of SEQ ID NO: 1245302
guuacaagucucuggaaua

SEQ ID NO: 1552373 - RNA, 19 nt, Artificial Sequence
  Description of Artificial Sequence: Synthetic oligonucleotide
  Antisense strand to SEQ ID NO: 1552372
uauuccagagacuuguaac

SEQ ID NO: 1552374 - RNA, 19 nt, Artificial Sequence
  Description of Artificial Sequence: Synthetic oligonucleotide
  Sense strand starting at position 1141 of SEQ ID NO: 1245302
guaugauaugcuuaaauga

SEQ ID NO: 1552375 - RNA, 19 nt, Artificial Sequence
  Description of Artificial Sequence: Synthetic oligonucleotide
  Antisense strand to SEQ ID NO: 1552374
ucauuuaagcauaucauac

SEQ ID NO: 1552376 - RNA, 19 nt, Artificial Sequence
  Description of Artificial Sequence: Synthetic oligonucleotide
  Sense strand starting at position 1177 of SEQ ID NO: 1245302
uacagcauaugaguaagaa

SEQ ID NO: 1552377 - RNA, 19 nt, Artificial Sequence
  Description of Artificial Sequence: Synthetic oligonucleotide
  Antisense strand to SEQ ID NO: 1552376
uucuuacucauaugcugua

SEQ ID NO: 1552378 - RNA, 19 nt, Artificial Sequence
  Description of Artificial Sequence: Synthetic oligonucleotide
  Sense strand starting at position 1237 of SEQ ID NO: 1245302
aucugaaauguguaacuug

SEQ ID NO: 1552379 - RNA, 19 nt, Artificial Sequence
  Description of Artificial Sequence: Synthetic oligonucleotide
  Antisense strand to SEQ ID NO: 1552378
caaguuacacauuucagau

SEQ ID NO: 1552380 - RNA, 19 nt, Artificial Sequence
  Description of Artificial Sequence: Synthetic oligonucleotide
  Sense strand starting at position 1670 of SEQ ID NO: 1245302
aggguugggagcuggaaau

SEQ ID NO: 1552381 - RNA, 19 nt, Artificial Sequence
  Description of Artificial Sequence: Synthetic oligonucleotide
  Antisense strand to SEQ ID NO: 1552380
auuuccagcucccaacccu

SEQ ID NO: 1552382 - RNA, 19 nt, Artificial Sequence
  Description of Artificial Sequence: Synthetic oligonucleotide
  Sense strand starting at position 2230 of SEQ ID NO: 1245302
aggugaaauauucgaugaa

SEQ ID NO: 1552383 - RNA, 19 nt, Artificial Sequence
  Description of Artificial Sequence: Synthetic oligonucleotide
  Antisense strand to SEQ ID NO: 1552382
uucaucgaauauuucaccu

SEQ ID NO: 1552384 - RNA, 19 nt, Artificial Sequence
  Description of Artificial Sequence: Synthetic oligonucleotide
  Sense strand starting at position 2359 of SEQ ID NO: 1245302
gcuagaugccaagagaggu

SEQ ID NO: 1552385 - RNA, 19 nt, Artificial Sequence
  Description of Artificial Sequence: Synthetic oligonucleotide
  Antisense strand to SEQ ID NO: 1552384
accucucuuggcaucuagc

SEQ ID NO: 1552386 - RNA, 19 nt, Artificial Sequence
  Description of Artificial Sequence: Synthetic oligonucleotide
  Sense strand starting at position 2719 of SEQ ID NO: 1245302
ggucccaguuacuuggaaa

SEQ ID NO: 1552387 - RNA, 19 nt, Artificial Sequence
  Description of Artificial Sequence: Synthetic oligonucleotide
  Antisense strand to SEQ ID NO: 1552386
uuuccaaguaacugggacc

SEQ ID NO: 1552388 - RNA, 19 nt, Artificial Sequence
  Description of Artificial Sequence: Synthetic oligonucleotide
  Sense strand starting at position 3119 of SEQ ID NO: 1245302
caccaaagcuugguacaga

SEQ ID NO: 1552389 - RNA, 19 nt, Artificial Sequence
  Description of Artificial Sequence: Synthetic oligonucleotide
  Antisense strand to SEQ ID NO: 1552388
ucuguaccaagcuuuggug

SEQ ID NO: 1552390 - RNA, 19 nt, Artificial Sequence
  Description of Artificial Sequence: Synthetic oligonucleotide
  Sense strand starting at position 3128 of SEQ ID NO: 1245302
uugguacagaccugaugua

SEQ ID NO: 1552391 - RNA, 19 nt, Artificial Sequence
  Description of Artificial Sequence: Synthetic oligonucleotide
  Antisense strand to SEQ ID NO: 1552390
uacaucaggucuguaccaa

SEQ ID NO: 1552392 - RNA, 19 nt, Artificial Sequence
  Description of Artificial Sequence: Synthetic oligonucleotide
  Sense strand starting at position 3185 of SEQ ID NO: 1245302
agagcaacucgcuauauua

SEQ ID NO: 1552393 - RNA, 19 nt, Artificial Sequence
  Description of Artificial Sequence: Synthetic oligonucleotide
  Antisense strand to SEQ ID NO: 1552392
uaauauagcgaguugcucu

SEQ ID NO: 1552394 - RNA, 19 nt, Artificial Sequence
  Description of Artificial Sequence: Synthetic oligonucleotide
  Sense strand starting at position 3278 of SEQ ID NO: 1245302
gucauaaacuaagugaacu

SEQ ID NO: 1552395 - RNA, 19 nt, Artificial Sequence
  Description of Artificial Sequence: Synthetic oligonucleotide
  Antisense strand to SEQ ID NO: 1552394
aguucacuuaguuuaugac

SEQ ID NO: 1552396 - RNA, 19 nt, Artificial Sequence
  Description of Artificial Sequence: Synthetic oligonucleotide
  Sense strand starting at position 3358 of SEQ ID NO: 1245302
guggaaggaugcuucuuaa

SEQ ID NO: 1552397 - RNA, 19 nt, Artificial Sequence
  Description of Artificial Sequence: Synthetic oligonucleotide
  Antisense strand to SEQ ID NO: 1552396
uuaagaagcauccuuccac

SEQ ID NO: 1552398 - RNA, 19 nt, Artificial Sequence
  Description of Artificial Sequence: Synthetic oligonucleotide
  Sense strand starting at position 3407 of SEQ ID NO: 1245302
augagaauuugggagcaga

SEQ ID NO: 1552399 - RNA, 19 nt, Artificial Sequence
  Description of Artificial Sequence: Synthetic oligonucleotide
  Antisense strand to SEQ ID NO: 1552398
ucugcucccaaauucucau

SEQ ID NO: 1552400 - RNA, 19 nt, Artificial Sequence
  Description of Artificial Sequence: Synthetic oligonucleotide
  Sense strand starting at position 3451 of SEQ ID NO: 1245302
accacucauugcuugagaa

SEQ ID NO: 1552401 - RNA, 19 nt, Artificial Sequence
  Description of Artificial Sequence: Synthetic oligonucleotide
  Antisense strand to SEQ ID NO: 1552400
uucucaagcaaugaguggu

SEQ ID NO: 1552402 - RNA, 19 nt, Artificial Sequence
  Description of Artificial Sequence: Synthetic oligonucleotide
  Sense strand starting at position 3452 of SEQ ID NO: 1245302
ccacucauugcuugagaaa

SEQ ID NO: 1552403 - RNA, 19 nt, Artificial Sequence
  Description of Artificial Sequence: Synthetic oligonucleotide
  Antisense strand to SEQ ID NO: 1552402
uuucucaagcaaugagugg

SEQ ID NO: 1552404 - RNA, 19 nt, Artificial Sequence
  Description of Artificial Sequence: Synthetic oligonucleotide
  Sense strand starting at position 3546 of SEQ ID NO: 1245302
ugucaauaagaucgauaaa

SEQ ID NO: 1552405 - RNA, 19 nt, Artificial Sequence
  Description of Artificial Sequence: Synthetic oligonucleotide
  Antisense strand to SEQ ID NO: 1552404
uuuaucgaucuuauugaca

SEQ ID NO: 1552406 - RNA, 19 nt, Artificial Sequence
  Description of Artificial Sequence: Synthetic oligonucleotide
  Sense strand starting at position 3696 of SEQ ID NO: 1245302
aagacuggagcauguuauu

SEQ ID NO: 1552407 - RNA, 19 nt, Artificial Sequence
  Description of Artificial Sequence: Synthetic oligonucleotide
  Antisense strand to SEQ ID NO: 1552406
aauaacaugcuccagucuu

SEQ ID NO: 1552408 - RNA, 19 nt, Artificial Sequence
  Description of Artificial Sequence: Synthetic oligonucleotide
  Sense strand starting at position 3708 of SEQ ID NO: 1245302
uguuauugacauugaauuc

SEQ ID NO: 1552409 - RNA, 19 nt, Artificial Sequence
  Description of Artificial Sequence: Synthetic oligonucleotide
  Antisense strand to SEQ ID NO: 1552408
gaauucaaugucaauaaca

SEQ ID NO: 1552410 - RNA, 19 nt, Artificial Sequence
  Description of Artificial Sequence: Synthetic oligonucleotide
  Sense strand starting at position 3936 of SEQ ID NO: 1245302
augccuuugggugauucua

SEQ ID NO: 1552411 - RNA, 19 nt, Artificial Sequence
  Description of Artificial Sequence: Synthetic oligonucleotide
  Antisense strand to SEQ ID NO: 1552410
uagaaucacccaaaggcau

SEQ ID NO: 1552412 - RNA, 19 nt, Artificial Sequence
  Description of Artificial Sequence: Synthetic oligonucleotide
  Sense strand starting at position 3945 of SEQ ID NO: 1245302
ggugauucuaacuggguga

SEQ ID NO: 1552413 - RNA, 19 nt, Artificial Sequence
  Description of Artificial Sequence: Synthetic oligonucleotide
  Antisense strand to SEQ ID NO: 1552412
ucacccaguuagaaucacc

SEQ ID NO: 1552414 - RNA, 19 nt, Artificial Sequence
  Description of Artificial Sequence: Synthetic oligonucleotide
  Sense strand starting at position 3946 of SEQ ID NO: 1245302
gugauucuaacugggugaa

SEQ ID NO: 1552415 - RNA, 19 nt, Artificial Sequence
  Description of Artificial Sequence: Synthetic oligonucleotide
  Antisense strand to SEQ ID NO: 1552414
uucacccaguuagaaucac

SEQ ID NO: 1552416 - RNA, 19 nt, Artificial Sequence
  Description of Artificial Sequence: Synthetic oligonucleotide
  Sense strand starting at position 3947 of SEQ ID NO: 1245302
ugauucuaacugggugaaa

SEQ ID NO: 1552417 - RNA, 19 nt, Artificial Sequence
  Description of Artificial Sequence: Synthetic oligonucleotide
  Antisense strand to SEQ ID NO: 1552416
uuucacccaguuagaauca

SEQ ID NO: 1552418 - RNA, 19 nt, Artificial Sequence
  Description of Artificial Sequence: Synthetic oligonucleotide
  Sense strand starting at position 232 of SEQ ID NO: 1245303
caaaguccgugaucuagaa

SEQ ID NO: 1552419 - RNA, 19 nt, Artificial Sequence
  Description of Artificial Sequence: Synthetic oligonucleotide
  Antisense strand to SEQ ID NO: 1552418
uucuagaucacggacuuug

SEQ ID NO: 1552420 - RNA, 19 nt, Artificial Sequence
  Description of Artificial Sequence: Synthetic oligonucleotide
  Sense strand starting at position 236 of SEQ ID NO: 1245303
guccgugaucuagaaauaa

SEQ ID NO: 1552421 - RNA, 19 nt, Artificial Sequence
  Description of Artificial Sequence: Synthetic oligonucleotide
  Antisense strand to SEQ ID NO: 1552420
uuauuucuagaucacggac

SEQ ID NO: 1552422 - RNA, 19 nt, Artificial Sequence
  Description of Artificial Sequence: Synthetic oligonucleotide
  Sense strand starting at position 263 of SEQ ID NO: 1245303
aucagacuacagugugaaa

SEQ ID NO: 1552423 - RNA, 19 nt, Artificial Sequence
  Description of Artificial Sequence: Synthetic oligonucleotide
  Antisense strand to SEQ ID NO: 1552422
uuucacacuguagucugau

SEQ ID NO: 1552424 - RNA, 19 nt, Artificial Sequence
  Description of Artificial Sequence: Synthetic oligonucleotide
  Sense strand starting at position 281 of SEQ ID NO: 1245303
aacagugaugguggaagua

SEQ ID NO: 1552425 - RNA, 19 nt, Artificial Sequence
  Description of Artificial Sequence: Synthetic oligonucleotide
  Antisense strand to SEQ ID NO: 1552424
uacuuccaccaucacuguu

SEQ ID NO: 1552426 - RNA, 19 nt, Artificial Sequence
  Description of Artificial Sequence: Synthetic oligonucleotide
  Sense strand starting at position 300 of SEQ ID NO: 1245303
uuucuaaagugcuugaaga

SEQ ID NO: 1552427 - RNA, 19 nt, Artificial Sequence
  Description of Artificial Sequence: Synthetic oligonucleotide
  Antisense strand to SEQ ID NO: 1552426
ucuucaagcacuuuagaaa

SEQ ID NO: 1552428 - RNA, 19 nt, Artificial Sequence
  Description of Artificial Sequence: Synthetic oligonucleotide
  Sense strand starting at position 301 of SEQ ID NO: 1245303
uucuaaagugcuugaagaa

SEQ ID NO: 1552429 - RNA, 19 nt, Artificial Sequence
  Description of Artificial Sequence: Synthetic oligonucleotide
  Antisense strand to SEQ ID NO: 1552428
uucuucaagcacuuuagaa

SEQ ID NO: 1552430 - RNA, 19 nt, Artificial Sequence
  Description of Artificial Sequence: Synthetic oligonucleotide
  Sense strand starting at position 313 of SEQ ID NO: 1245303
ugaagaagugcuugagaaa

SEQ ID NO: 1552431 - RNA, 19 nt, Artificial Sequence
  Description of Artificial Sequence: Synthetic oligonucleotide
  Antisense strand to SEQ ID NO: 1552430
uuucucaagcacuucuuca

SEQ ID NO: 1552432 - RNA, 19 nt, Artificial Sequence
  Description of Artificial Sequence: Synthetic oligonucleotide
  Sense strand starting at position 329 of SEQ ID NO: 1245303
aaagcuucggaguggaaau

SEQ ID NO: 1552433 - RNA, 19 nt, Artificial Sequence
  Description of Artificial Sequence: Synthetic oligonucleotide
  Antisense strand to SEQ ID NO: 1552432
auuuccacuccgaagcuuu

SEQ ID NO: 1552434 - RNA, 19 nt, Artificial Sequence
  Description of Artificial Sequence: Synthetic oligonucleotide
  Sense strand starting at position 547 of SEQ ID NO: 1245303
agggcucguaccuacuaaa

SEQ ID NO: 1552435 - RNA, 19 nt, Artificial Sequence
  Description of Artificial Sequence: Synthetic oligonucleotide
  Antisense strand to SEQ ID NO: 1552434
uuuaguagguacgagcccu

SEQ ID NO: 1552436 - RNA, 19 nt, Artificial Sequence
  Description of Artificial Sequence: Synthetic oligonucleotide
  Sense strand starting at position 650 of SEQ ID NO: 1245303
cugauuaguucuccaagaa

SEQ ID NO: 1552437 - RNA, 19 nt, Artificial Sequence
  Description of Artificial Sequence: Synthetic oligonucleotide
  Antisense strand to SEQ ID NO: 1552436
uucuuggagaacuaaucag

SEQ ID NO: 1552438 - RNA, 19 nt, Artificial Sequence
  Description of Artificial Sequence: Synthetic oligonucleotide
  Sense strand starting at position 874 of SEQ ID NO: 1245303
ucaagaaaucaaugcgauu

SEQ ID NO: 1552439 - RNA, 19 nt, Artificial Sequence
  Description of Artificial Sequence: Synthetic oligonucleotide
  Antisense strand to SEQ ID NO: 1552438
aaucgcauugauuucuuga

SEQ ID NO: 1552440 - RNA, 19 nt, Artificial Sequence
  Description of Artificial Sequence: Synthetic oligonucleotide
  Sense strand starting at position 946 of SEQ ID NO: 1245303
ugccaaagacuuuggauga

SEQ ID NO: 1552441 - RNA, 19 nt, Artificial Sequence
  Description of Artificial Sequence: Synthetic oligonucleotide
  Antisense strand to SEQ ID NO: 1552440
ucauccaaagucuuuggca

SEQ ID NO: 1552442 - RNA, 19 nt, Artificial Sequence
  Description of Artificial Sequence: Synthetic oligonucleotide
  Sense strand starting at position 1109 of SEQ ID NO: 1245303
cagagaugucaagguugua

SEQ ID NO: 1552443 - RNA, 19 nt, Artificial Sequence
  Description of Artificial Sequence: Synthetic oligonucleotide
  Antisense strand to SEQ ID NO: 1552442
uacaaccuugacaucucug

SEQ ID NO: 1552444 - RNA, 19 nt, Artificial Sequence
  Description of Artificial Sequence: Synthetic oligonucleotide
  Sense strand starting at position 1129 of SEQ ID NO: 1245303
gucauuguagaagacaguu

SEQ ID NO: 1552445 - RNA, 19 nt, Artificial Sequence
  Description of Artificial Sequence: Synthetic oligonucleotide
  Antisense strand to SEQ ID NO: 1552444
aacugucuucuacaaugac

SEQ ID NO: 1552446 - RNA, 19 nt, Artificial Sequence
  Description of Artificial Sequence: Synthetic oligonucleotide
  Sense strand starting at position 1142 of SEQ ID NO: 1245303
acaguuauaagauggaguu

SEQ ID NO: 1552447 - RNA, 19 nt, Artificial Sequence
  Description of Artificial Sequence: Synthetic oligonucleotide
  Antisense strand to SEQ ID NO: 1552446
aacuccaucuuauaacugu

SEQ ID NO: 1552448 - RNA, 19 nt, Artificial Sequence
  Description of Artificial Sequence: Synthetic oligonucleotide
  Sense strand starting at position 1143 of SEQ ID NO: 1245303
caguuauaagauggaguua

SEQ ID NO: 1552449 - RNA, 19 nt, Artificial Sequence
  Description of Artificial Sequence: Synthetic oligonucleotide
  Antisense strand to SEQ ID NO: 1552448
uaacuccaucuuauaacug

SEQ ID NO: 1552450 - RNA, 19 nt, Artificial Sequence
  Description of Artificial Sequence: Synthetic oligonucleotide
  Sense strand starting at position 1175 of SEQ ID NO: 1245303
cuauacauaguuugggauu

SEQ ID NO: 1552451 - RNA, 19 nt, Artificial Sequence
  Description of Artificial Sequence: Synthetic oligonucleotide
  Antisense strand to SEQ ID NO: 1552450
aaucccaaacuauguauag

SEQ ID NO: 1552452 - RNA, 19 nt, Artificial Sequence
  Description of Artificial Sequence: Synthetic oligonucleotide
  Sense strand starting at position 1359 of SEQ ID NO: 1245303
agggaauuaucaucauggu

SEQ ID NO: 1552453 - RNA, 19 nt, Artificial Sequence
  Description of Artificial Sequence: Synthetic oligonucleotide
  Antisense strand to SEQ ID NO: 1552452
accaugaugauaauucccu

SEQ ID NO: 1552454 - RNA, 19 nt, Artificial Sequence
  Description of Artificial Sequence: Synthetic oligonucleotide
  Sense strand starting at position 1535 of SEQ ID NO: 1245303
acagguaguagauauaguu

SEQ ID NO: 1552455 - RNA, 19 nt, Artificial Sequence
  Description of Artificial Sequence: Synthetic oligonucleotide
  Antisense strand to SEQ ID NO: 1552454
aacuauaucuacuaccugu

SEQ ID NO: 1552456 - RNA, 19 nt, Artificial Sequence
  Description of Artificial Sequence: Synthetic oligonucleotide
  Sense strand starting at position 1585 of SEQ ID NO: 1245303
gucuauucagccgucagua

SEQ ID NO: 1552457 - RNA, 19 nt, Artificial Sequence
  Description of Artificial Sequence: Synthetic oligonucleotide
  Antisense strand to SEQ ID NO: 1552456
uacugacggcugaauagac

SEQ ID NO: 1552458 - RNA, 19 nt, Artificial Sequence
  Description of Artificial Sequence: Synthetic oligonucleotide
  Sense strand starting at position 1649 of SEQ ID NO: 1245303
auuaaauauguuggccaau

SEQ ID NO: 1552459 - RNA, 19 nt, Artificial Sequence
  Description of Artificial Sequence: Synthetic oligonucleotide
  Antisense strand to SEQ ID NO: 1552458
auuggccaacauauuuaau

SEQ ID NO: 1552460 - RNA, 19 nt, Artificial Sequence
  Description of Artificial Sequence: Synthetic oligonucleotide
  Sense strand starting at position 1652 of SEQ ID NO: 1245303
aaauauguuggccaauguu

SEQ ID NO: 1552461 - RNA, 19 nt, Artificial Sequence
  Description of Artificial Sequence: Synthetic oligonucleotide
  Antisense strand to SEQ ID NO: 1552460
aacauuggccaacauauuu

SEQ ID NO: 1552462 - RNA, 19 nt, Artificial Sequence
  Description of Artificial Sequence: Synthetic oligonucleotide
  Sense strand starting at position 1776 of SEQ ID NO: 1245303
gccagaaucccagaugcca

SEQ ID NO: 1552463 - RNA, 19 nt, Artificial Sequence
  Description of Artificial Sequence: Synthetic oligonucleotide
  Antisense strand to SEQ ID NO: 1552462
uggcaucugggauucuggc

SEQ ID NO: 1552464 - RNA, 19 nt, Artificial Sequence
  Description of Artificial Sequence: Synthetic oligonucleotide
  Sense strand starting at position 1807 of SEQ ID NO: 1245303
uuacuuugacagcagguaa

SEQ ID NO: 1552465 - RNA, 19 nt, Artificial Sequence
  Description of Artificial Sequence: Synthetic oligonucleotide
  Antisense strand to SEQ ID NO: 1552464
uuaccugcugucaaaguaa

SEQ ID NO: 1552466 - RNA, 19 nt, Artificial Sequence
  Description of Artificial Sequence: Synthetic oligonucleotide
  Sense strand starting at position 2522 of SEQ ID NO: 1245303
gcagucauugacuaggguu

SEQ ID NO: 1552467 - RNA, 19 nt, Artificial Sequence
  Description of Artificial Sequence: Synthetic oligonucleotide
  Antisense strand to SEQ ID NO: 1552466
aacccuagucaaugacugc

SEQ ID NO: 1552468 - RNA, 19 nt, Artificial Sequence
  Description of Artificial Sequence: Synthetic oligonucleotide
  Sense strand starting at position 2584 of SEQ ID NO: 1245303
ucaugauaaguuugcaaca

SEQ ID NO: 1552469 - RNA, 19 nt, Artificial Sequence
  Description of Artificial Sequence: Synthetic oligonucleotide
  Antisense strand to SEQ ID NO: 1552468
uguugcaaacuuaucauga

SEQ ID NO: 1552470 - RNA, 19 nt, Artificial Sequence
  Description of Artificial Sequence: Synthetic oligonucleotide
  Sense strand starting at position 2894 of SEQ ID NO: 1245303
uaacgucaugguuaagagu

SEQ ID NO: 1552471 - RNA, 19 nt, Artificial Sequence
  Description of Artificial Sequence: Synthetic oligonucleotide
  Antisense strand to SEQ ID NO: 1552470
acucuuaaccaugacguua

SEQ ID NO: 1552472 - RNA, 19 nt, Artificial Sequence
  Description of Artificial Sequence: Synthetic oligonucleotide
  Sense strand starting at position 2908 of SEQ ID NO: 1245303
agaguauuauagguaacau

SEQ ID NO: 1552473 - RNA, 19 nt, Artificial Sequence
  Description of Artificial Sequence: Synthetic oligonucleotide
  Antisense strand to SEQ ID NO: 1552472
auguuaccuauaauacucu

SEQ ID NO: 1552474 - RNA, 19 nt, Artificial Sequence
  Description of Artificial Sequence: Synthetic oligonucleotide
  Sense strand starting at position 2952 of SEQ ID NO: 1245303
acuugauaaguguagcuau

SEQ ID NO: 1552475 - RNA, 19 nt, Artificial Sequence
  Description of Artificial Sequence: Synthetic oligonucleotide
  Antisense strand to SEQ ID NO: 1552474
auagcuacacuuaucaagu

SEQ ID NO: 1552476 - RNA, 19 nt, Artificial Sequence
  Description of Artificial Sequence: Synthetic oligonucleotide
  Sense strand starting at position 3008 of SEQ ID NO: 1245303
guaugaguacuccaccuau

SEQ ID NO: 1552477 - RNA, 19 nt, Artificial Sequence
  Description of Artificial Sequence: Synthetic oligonucleotide
  Antisense strand to SEQ ID NO: 1552476
auagguggaguacucauac

SEQ ID NO: 1552478 - RNA, 19 nt, Artificial Sequence
  Description of Artificial Sequence: Synthetic oligonucleotide
  Sense strand starting at position 3087 of SEQ ID NO: 1245303
uuauuaugagccuauauug

SEQ ID NO: 1552479 - RNA, 19 nt, Artificial Sequence
  Description of Artificial Sequence: Synthetic oligonucleotide
  Antisense strand to SEQ ID NO: 1552478
caauauaggcucauaauaa

SEQ ID NO: 1552480 - RNA, 19 nt, Artificial Sequence
  Description of Artificial Sequence: Synthetic oligonucleotide
  Sense strand starting at position 3274 of SEQ ID NO: 1245303
cuacauuguguugaacaua

SEQ ID NO: 1552481 - RNA, 19 nt, Artificial Sequence
  Description of Artificial Sequence: Synthetic oligonucleotide
  Antisense strand to SEQ ID NO: 1552480
uauguucaacacaauguag

SEQ ID NO: 1552482 - RNA, 19 nt, Artificial Sequence
  Description of Artificial Sequence: Synthetic oligonucleotide
  Sense strand starting at position 3304 of SEQ ID NO: 1245303
cugguaagcacuugauaag

SEQ ID NO: 1552483 - RNA, 19 nt, Artificial Sequence
  Description of Artificial Sequence: Synthetic oligonucleotide
  Antisense strand to SEQ ID NO: 1552482
cuuaucaagugcuuaccag

SEQ ID NO: 1552484 - RNA, 19 nt, Artificial Sequence
  Description of Artificial Sequence: Synthetic oligonucleotide
  Sense strand starting at position 3319 of SEQ ID NO: 1245303
uaaguaggugcuuaauuaa

SEQ ID NO: 1552485 - RNA, 19 nt, Artificial Sequence
  Description of Artificial Sequence: Synthetic oligonucleotide
  Antisense strand to SEQ ID NO: 1552484
uuaauuaagcaccuacuua

SEQ ID NO: 1552486 - RNA, 19 nt, Artificial Sequence
  Description of Artificial Sequence: Synthetic oligonucleotide
  Sense strand starting at position 3358 of SEQ ID NO: 1245303
uggguuggucaugaugaua

SEQ ID NO: 1552487 - RNA, 19 nt, Artificial Sequence
  Description of Artificial Sequence: Synthetic oligonucleotide
  Antisense strand to SEQ ID NO: 1552486
uaucaucaugaccaaccca

SEQ ID NO: 1552488 - RNA, 19 nt, Artificial Sequence
  Description of Artificial Sequence: Synthetic oligonucleotide
  Sense strand starting at position 3385 of SEQ ID NO: 1245303
uuguaaacaccuuaacagu

SEQ ID NO: 1552489 - RNA, 19 nt, Artificial Sequence
  Description of Artificial Sequence: Synthetic oligonucleotide
  Antisense strand to SEQ ID NO: 1552488
acuguuaagguguuuacaa

SEQ ID NO: 1552490 - RNA, 19 nt, Artificial Sequence
  Description of Artificial Sequence: Synthetic oligonucleotide
  Sense strand starting at position 3447 of SEQ ID NO: 1245303
ccuccaucaucuguaugga

SEQ ID NO: 1552491 - RNA, 19 nt, Artificial Sequence
  Description of Artificial Sequence: Synthetic oligonucleotide
  Antisense strand to SEQ ID NO: 1552490
uccauacagaugauggagg

SEQ ID NO: 1552492 - RNA, 19 nt, Artificial Sequence
  Description of Artificial Sequence: Synthetic oligonucleotide
  Sense strand starting at position 3448 of SEQ ID NO: 1245303
cuccaucaucuguauggaa

SEQ ID NO: 1552493 - RNA, 19 nt, Artificial Sequence
  Description of Artificial Sequence: Synthetic oligonucleotide
  Antisense strand to SEQ ID NO: 1552492
uuccauacagaugauggag

SEQ ID NO: 1552494 - RNA, 19 nt, Artificial Sequence
  Description of Artificial Sequence: Synthetic oligonucleotide
  Sense strand starting at position 3731 of SEQ ID NO: 1245303
ggaauaaugucaguaccag

SEQ ID NO: 1552495 - RNA, 19 nt, Artificial Sequence
  Description of Artificial Sequence: Synthetic oligonucleotide
  Antisense strand to SEQ ID NO: 1552494
cugguacugacauuauucc

SEQ ID NO: 1552496 - RNA, 19 nt, Artificial Sequence
  Description of Artificial Sequence: Synthetic oligonucleotide
  Sense strand starting at position 3893 of SEQ ID NO: 1245303
gcaagaccgaccgagaaua

SEQ ID NO: 1552497 - RNA, 19 nt, Artificial Sequence
  Description of Artificial Sequence: Synthetic oligonucleotide
  Antisense strand to SEQ ID NO: 1552496
uauucucggucggucuugc

SEQ ID NO: 1552498 - RNA, 19 nt, Artificial Sequence
  Description of Artificial Sequence: Synthetic oligonucleotide
  Sense strand starting at position 4 of SEQ ID NO: 1245304
caugguaaauuauugauga

SEQ ID NO: 1552499 - RNA, 19 nt, Artificial Sequence
  Description of Artificial Sequence: Synthetic oligonucleotide
  Antisense strand to SEQ ID NO: 1552498
ucaucaauaauuuaccaug

SEQ ID NO: 1552500 - RNA, 19 nt, Artificial Sequence
  Description of Artificial Sequence: Synthetic oligonucleotide
  Sense strand starting at position 218 of SEQ ID NO: 1245304
aggugauacuaacuagcau

SEQ ID NO: 1552501 - RNA, 19 nt, Artificial Sequence
  Description of Artificial Sequence: Synthetic oligonucleotide
  Antisense strand to SEQ ID NO: 1552500
augcuaguuaguaucaccu

SEQ ID NO: 1552502 - RNA, 19 nt, Artificial Sequence
  Description of Artificial Sequence: Synthetic oligonucleotide
  Sense strand starting at position 348 of SEQ ID NO: 1245304
guuuaaguuccaggaauaa

SEQ ID NO: 1552503 - RNA, 19 nt, Artificial Sequence
  Description of Artificial Sequence: Synthetic oligonucleotide
  Antisense strand to SEQ ID NO: 1552502
uuauuccuggaacuuaaac

SEQ ID NO: 1552504 - RNA, 19 nt, Artificial Sequence
  Description of Artificial Sequence: Synthetic oligonucleotide
  Sense strand starting at position 391 of SEQ ID NO: 1245304
ugauauaaagucugauucu

SEQ ID NO: 1552505 - RNA, 19 nt, Artificial Sequence
  Description of Artificial Sequence: Synthetic oligonucleotide
  Antisense strand to SEQ ID NO: 1552504
agaaucagacuuuauauca

SEQ ID NO: 1552506 - RNA, 19 nt, Artificial Sequence
  Description of Artificial Sequence: Synthetic oligonucleotide
  Sense strand starting at position 403 of SEQ ID NO: 1245304
ugauucuuauuggcaaaua

SEQ ID NO: 1552507 - RNA, 19 nt, Artificial Sequence
  Description of Artificial Sequence: Synthetic oligonucleotide
  Antisense strand to SEQ ID NO: 1552506
uauuugccaauaagaauca

SEQ ID NO: 1552508 - RNA, 19 nt, Artificial Sequence
  Description of Artificial Sequence: Synthetic oligonucleotide
  Sense strand starting at position 691 of SEQ ID NO: 1245304
agaagaugucagugugaca

SEQ ID NO: 1552509 - RNA, 19 nt, Artificial Sequence
  Description of Artificial Sequence: Synthetic oligonucleotide
  Antisense strand to SEQ ID NO: 1552508
ugucacacugacaucuucu

SEQ ID NO: 1552510 - RNA, 19 nt, Artificial Sequence
  Description of Artificial Sequence: Synthetic oligonucleotide
  Sense strand starting at position 1377 of SEQ ID NO: 1245304
ugaauaaucccuugaaugu

SEQ ID NO: 1552511 - RNA, 19 nt, Artificial Sequence
  Description of Artificial Sequence: Synthetic oligonucleotide
  Antisense strand to SEQ ID NO: 1552510
acauucaagggauuauuca

SEQ ID NO: 1552512 - RNA, 19 nt, Artificial Sequence
  Description of Artificial Sequence: Synthetic oligonucleotide
  Sense strand starting at position 1914 of SEQ ID NO: 1245304
cuggccagacuuuaaauua

SEQ ID NO: 1552513 - RNA, 19 nt, Artificial Sequence
  Description of Artificial Sequence: Synthetic oligonucleotide
  Antisense strand to SEQ ID NO: 1552512
uaauuuaaagucuggccag

SEQ ID NO: 1552514 - RNA, 19 nt, Artificial Sequence
  Description of Artificial Sequence: Synthetic oligonucleotide
  Sense strand starting at position 2064 of SEQ ID NO: 1245304
uaugauggccaugauaguu

SEQ ID NO: 1552515 - RNA, 19 nt, Artificial Sequence
  Description of Artificial Sequence: Synthetic oligonucleotide
  Antisense strand to SEQ ID NO: 1552514
aacuaucauggccaucaua

SEQ ID NO: 1552516 - RNA, 19 nt, Artificial Sequence
  Description of Artificial Sequence: Synthetic oligonucleotide
  Sense strand starting at position 2144 of SEQ ID NO: 1245304
uguagaauauuagcuauag

SEQ ID NO: 1552517 - RNA, 19 nt, Artificial Sequence
  Description of Artificial Sequence: Synthetic oligonucleotide
  Antisense strand to SEQ ID NO: 1552516
cuauagcuaauauucuaca

SEQ ID NO: 1552518 - RNA, 19 nt, Artificial Sequence
  Description of Artificial Sequence: Synthetic oligonucleotide
  Sense strand starting at position 2302 of SEQ ID NO: 1245304
uucuuacauguggaaaugu

SEQ ID NO: 1552519 - RNA, 19 nt, Artificial Sequence
  Description of Artificial Sequence: Synthetic oligonucleotide
  Antisense strand to SEQ ID NO: 1552518
acauuuccacauguaagaa

SEQ ID NO: 1552520 - RNA, 19 nt, Artificial Sequence
  Description of Artificial Sequence: Synthetic oligonucleotide
  Sense strand starting at position 2479 of SEQ ID NO: 1245304
agcaaagugcuauagaaua

SEQ ID NO: 1552521 - RNA, 19 nt, Artificial Sequence
  Description of Artificial Sequence: Synthetic oligonucleotide
  Antisense strand to SEQ ID NO: 1552520
uauucuauagcacuuugcu

SEQ ID NO: 1552522 - RNA, 19 nt, Artificial Sequence
  Description of Artificial Sequence: Synthetic oligonucleotide
  Sense strand starting at position 2593 of SEQ ID NO: 1245304
uguguauaaucacuaacau

SEQ ID NO: 1552523 - RNA, 19 nt, Artificial Sequence
  Description of Artificial Sequence: Synthetic oligonucleotide
  Antisense strand to SEQ ID NO: 1552522
auguuagugauuauacaca

SEQ ID NO: 1552524 - RNA, 19 nt, Artificial Sequence
  Description of Artificial Sequence: Synthetic oligonucleotide
  Sense strand starting at position 2594 of SEQ ID NO: 1245304
guguauaaucacuaacaug

SEQ ID NO: 1552525 - RNA, 19 nt, Artificial Sequence
  Description of Artificial Sequence: Synthetic oligonucleotide
  Antisense strand to SEQ ID NO: 1552524
cauguuagugauuauacac

SEQ ID NO: 1552526 - RNA, 19 nt, Artificial Sequence
  Description of Artificial Sequence: Synthetic oligonucleotide
  Sense strand starting at position 2609 of SEQ ID NO: 1245304
caugguauuuaugcuguau

SEQ ID NO: 1552527 - RNA, 19 nt, Artificial Sequence
  Description of Artificial Sequence: Synthetic oligonucleotide
  Antisense strand to SEQ ID NO: 1552526
auacagcauaaauaccaug

SEQ ID NO: 1552528 - RNA, 19 nt, Artificial Sequence
  Description of Artificial Sequence: Synthetic oligonucleotide
  Sense strand starting at position 2663 of SEQ ID NO: 1245304
ugucccucucaagagaagu

SEQ ID NO: 1552529 - RNA, 19 nt, Artificial Sequence
  Description of Artificial Sequence: Synthetic oligonucleotide
  Antisense strand to SEQ ID NO: 1552528
acuucucuugagagggaca

SEQ ID NO: 1552530 - RNA, 19 nt, Artificial Sequence
  Description of Artificial Sequence: Synthetic oligonucleotide
  Sense strand starting at position 2842 of SEQ ID NO: 1245304
ugcguuagaauauauugaa

SEQ ID NO: 1552531 - RNA, 19 nt, Artificial Sequence
  Description of Artificial Sequence: Synthetic oligonucleotide
  Antisense strand to SEQ ID NO: 1552530
uucaauauauucuaacgca

SEQ ID NO: 1552532 - RNA, 19 nt, Artificial Sequence
  Description of Artificial Sequence: Synthetic oligonucleotide
  Sense strand starting at position 2974 of SEQ ID NO: 1245304
gaaagcuuacauugugaaa

SEQ ID NO: 1552533 - RNA, 19 nt, Artificial Sequence
  Description of Artificial Sequence: Synthetic oligonucleotide
  Antisense strand to SEQ ID NO: 1552532
uuucacaauguaagcuuuc

SEQ ID NO: 1552534 - RNA, 19 nt, Artificial Sequence
  Description of Artificial Sequence: Synthetic oligonucleotide
  Sense strand starting at position 3096 of SEQ ID NO: 1245304
cuucccuuugucuaccaga

SEQ ID NO: 1552535 - RNA, 19 nt, Artificial Sequence
  Description of Artificial Sequence: Synthetic oligonucleotide
  Antisense strand to SEQ ID NO: 1552534
ucugguagacaaagggaag

SEQ ID NO: 1552536 - RNA, 19 nt, Artificial Sequence
  Description of Artificial Sequence: Synthetic oligonucleotide
  Sense strand starting at position 3132 of SEQ ID NO: 1245304
guuuaucuaguauacccaa

SEQ ID NO: 1552537 - RNA, 19 nt, Artificial Sequence
  Description of Artificial Sequence: Synthetic oligonucleotide
  Antisense strand to SEQ ID NO: 1552536
uuggguauacuagauaaac

SEQ ID NO: 1552538 - RNA, 19 nt, Artificial Sequence
  Description of Artificial Sequence: Synthetic oligonucleotide
  Sense strand starting at position 3205 of SEQ ID NO: 1245304
acaagaagguuucugacca

SEQ ID NO: 1552539 - RNA, 19 nt, Artificial Sequence
  Description of Artificial Sequence: Synthetic oligonucleotide
  Antisense strand to SEQ ID NO: 1552538
uggucagaaaccuucuugu

SEQ ID NO: 1552540 - RNA, 19 nt, Artificial Sequence
  Description of Artificial Sequence: Synthetic oligonucleotide
  Sense strand starting at position 3209 of SEQ ID NO: 1245304
gaagguuucugaccacaaa

SEQ ID NO: 1552541 - RNA, 19 nt, Artificial Sequence
  Description of Artificial Sequence: Synthetic oligonucleotide
  Antisense strand to SEQ ID NO: 1552540
uuuguggucagaaaccuuc

SEQ ID NO: 1552542 - RNA, 19 nt, Artificial Sequence
  Description of Artificial Sequence: Synthetic oligonucleotide
  Sense strand starting at position 3243 of SEQ ID NO: 1245304
ucucaagacugucugaaau

SEQ ID NO: 1552543 - RNA, 19 nt, Artificial Sequence
  Description of Artificial Sequence: Synthetic oligonucleotide
  Antisense strand to SEQ ID NO: 1552542
auuucagacagucuugaga

SEQ ID NO: 1552544 - RNA, 19 nt, Artificial Sequence
  Description of Artificial Sequence: Synthetic oligonucleotide
  Sense strand starting at position 3253 of SEQ ID NO: 1245304
gucugaaaucaccacagca

SEQ ID NO: 1552545 - RNA, 19 nt, Artificial Sequence
  Description of Artificial Sequence: Synthetic oligonucleotide
  Antisense strand to SEQ ID NO: 1552544
ugcuguggugauuucagac

SEQ ID NO: 1552546 - RNA, 19 nt, Artificial Sequence
  Description of Artificial Sequence: Synthetic oligonucleotide
  Sense strand starting at position 3255 of SEQ ID NO: 1245304
cugaaaucaccacagcagu

SEQ ID NO: 1552547 - RNA, 19 nt, Artificial Sequence
  Description of Artificial Sequence: Synthetic oligonucleotide
  Antisense strand to SEQ ID NO: 1552546
acugcuguggugauuucag

SEQ ID NO: 1552548 - RNA, 19 nt, Artificial Sequence
  Description of Artificial Sequence: Synthetic oligonucleotide
  Sense strand starting at position 3288 of SEQ ID NO: 1245304
acgccacugauagaaguaa

SEQ ID NO: 1552549 - RNA, 19 nt, Artificial Sequence
  Description of Artificial Sequence: Synthetic oligonucleotide
  Antisense strand to SEQ ID NO: 1552548
uuacuucuaucaguggcgu

SEQ ID NO: 1552550 - RNA, 19 nt, Artificial Sequence
  Description of Artificial Sequence: Synthetic oligonucleotide
  Sense strand starting at position 3304 of SEQ ID NO: 1245304
uaagguuuagaaggcaaau

SEQ ID NO: 1552551 - RNA, 19 nt, Artificial Sequence
  Description of Artificial Sequence: Synthetic oligonucleotide
  Antisense strand to SEQ ID NO: 1552550
auuugccuucuaaaccuua

SEQ ID NO: 1552552 - RNA, 19 nt, Artificial Sequence
  Description of Artificial Sequence: Synthetic oligonucleotide
  Sense strand starting at position 3321 of SEQ ID NO: 1245304
auaaaucaggcacgaaaga

SEQ ID NO: 1552553 - RNA, 19 nt, Artificial Sequence
  Description of Artificial Sequence: Synthetic oligonucleotide
  Antisense strand to SEQ ID NO: 1552552
ucuuucgugccugauuuau

SEQ ID NO: 1552554 - RNA, 19 nt, Artificial Sequence
  Description of Artificial Sequence: Synthetic oligonucleotide
  Sense strand starting at position 3401 of SEQ ID NO: 1245304
augcuuacauggguggaua

SEQ ID NO: 1552555 - RNA, 19 nt, Artificial Sequence
  Description of Artificial Sequence: Synthetic oligonucleotide
  Antisense strand to SEQ ID NO: 1552554
uauccacccauguaagcau

SEQ ID NO: 1552556 - RNA, 19 nt, Artificial Sequence
  Description of Artificial Sequence: Synthetic oligonucleotide
  Sense strand starting at position 3418 of SEQ ID NO: 1245304
uagacuaagccacggauau

SEQ ID NO: 1552557 - RNA, 19 nt, Artificial Sequence
  Description of Artificial Sequence: Synthetic oligonucleotide
  Antisense strand to SEQ ID NO: 1552556
auauccguggcuuagucua

SEQ ID NO: 1552558 - RNA, 19 nt, Artificial Sequence
  Description of Artificial Sequence: Synthetic oligonucleotide
  Sense strand starting at position 3419 of SEQ ID NO: 1245304
agacuaagccacggauaua

SEQ ID NO: 1552559 - RNA, 19 nt, Artificial Sequence
  Description of Artificial Sequence: Synthetic oligonucleotide
  Antisense strand to SEQ ID NO: 1552558
uauauccguggcuuagucu

SEQ ID NO: 1552560 - RNA, 19 nt, Artificial Sequence
  Description of Artificial Sequence: Synthetic oligonucleotide
  Sense strand starting at position 3628 of SEQ ID NO: 1245304
accuaaugccucugggaua

SEQ ID NO: 1552561 - RNA, 19 nt, Artificial Sequence
  Description of Artificial Sequence: Synthetic oligonucleotide
  Antisense strand to SEQ ID NO: 1552560
uaucccagaggcauuaggu

SEQ ID NO: 1552562 - RNA, 19 nt, Artificial Sequence
  Description of Artificial Sequence: Synthetic oligonucleotide
  Sense strand starting at position 3648 of SEQ ID NO: 1245304
ggucauggcgcauugugua

SEQ ID NO: 1552563 - RNA, 19 nt, Artificial Sequence
  Description of Artificial Sequence: Synthetic oligonucleotide
  Antisense strand to SEQ ID NO: 1552562
uacacaaugcgccaugacc

SEQ ID NO: 1552564 - RNA, 19 nt, Artificial Sequence
  Description of Artificial Sequence: Synthetic oligonucleotide
  Sense strand starting at position 3676 of SEQ ID NO: 1245304
auugaucuauuccugauag

SEQ ID NO: 1552565 - RNA, 19 nt, Artificial Sequence
  Description of Artificial Sequence: Synthetic oligonucleotide
  Antisense strand to SEQ ID NO: 1552564
cuaucaggaauagaucaau

SEQ ID NO: 1552566 - RNA, 19 nt, Artificial Sequence
  Description of Artificial Sequence: Synthetic oligonucleotide
  Sense strand starting at position 3678 of SEQ ID NO: 1245304
ugaucuauuccugauagca

SEQ ID NO: 1552567 - RNA, 19 nt, Artificial Sequence
  Description of Artificial Sequence: Synthetic oligonucleotide
  Antisense strand to SEQ ID NO: 1552566
ugcuaucaggaauagauca

SEQ ID NO: 1552568 - RNA, 19 nt, Artificial Sequence
  Description of Artificial Sequence: Synthetic oligonucleotide
  Sense strand starting at position 3739 of SEQ ID NO: 1245304
acaggcaucagugagguaa

SEQ ID NO: 1552569 - RNA, 19 nt, Artificial Sequence
  Description of Artificial Sequence: Synthetic oligonucleotide
  Antisense strand to SEQ ID NO: 1552568
uuaccucacugaugccugu

SEQ ID NO: 1552570 - RNA, 19 nt, Artificial Sequence
  Description of Artificial Sequence: Synthetic oligonucleotide
  Sense strand starting at position 3777 of SEQ ID NO: 1245304
guccaagacugacugacau

SEQ ID NO: 1552571 - RNA, 19 nt, Artificial Sequence
  Description of Artificial Sequence: Synthetic oligonucleotide
  Antisense strand to SEQ ID NO: 1552570
augucagucagucuuggac

SEQ ID NO: 1552572 - RNA, 19 nt, Artificial Sequence
  Description of Artificial Sequence: Synthetic oligonucleotide
  Sense strand starting at position 3853 of SEQ ID NO: 1245304
cacauuuguguauggugau

SEQ ID NO: 1552573 - RNA, 19 nt, Artificial Sequence
  Description of Artificial Sequence: Synthetic oligonucleotide
  Antisense strand to SEQ ID NO: 1552572
aucaccauacacaaaugug

SEQ ID NO: 1552574 - RNA, 19 nt, Artificial Sequence
  Description of Artificial Sequence: Synthetic oligonucleotide
  Sense strand starting at position 3937 of SEQ ID NO: 1245304
gcaugaucauuggccauuu

SEQ ID NO: 1552575 - RNA, 19 nt, Artificial Sequence
  Description of Artificial Sequence: Synthetic oligonucleotide
  Antisense strand to SEQ ID NO: 1552574
aaauggccaaugaucaugc

SEQ ID NO: 1552576 - RNA, 19 nt, Artificial Sequence
  Description of Artificial Sequence: Synthetic oligonucleotide
  Sense strand starting at position 3968 of SEQ ID NO: 1245304
agauucguuagugaacuua

SEQ ID NO: 1552577 - RNA, 19 nt, Artificial Sequence
  Description of Artificial Sequence: Synthetic oligonucleotide
  Antisense strand to SEQ ID NO: 1552576
uaaguucacuaacgaaucu

SEQ ID NO: 1552578 - RNA, 19 nt, Artificial Sequence
  Description of Artificial Sequence: Synthetic oligonucleotide
  Sense strand starting at position 77 of SEQ ID NO: 1245305
agcaaagugcuauagaaua

SEQ ID NO: 1552579 - RNA, 19 nt, Artificial Sequence
  Description of Artificial Sequence: Synthetic oligonucleotide
  Antisense strand to SEQ ID NO: 1552578
uauucuauagcacuuugcu

SEQ ID NO: 1552580 - RNA, 19 nt, Artificial Sequence
  Description of Artificial Sequence: Synthetic oligonucleotide
  Sense strand starting at position 192 of SEQ ID NO: 1245305
guguauaaucacuaacaug

SEQ ID NO: 1552581 - RNA, 19 nt, Artificial Sequence
  Description of Artificial Sequence: Synthetic oligonucleotide
  Antisense strand to SEQ ID NO: 1552580
cauguuagugauuauacac

SEQ ID NO: 1552582 - RNA, 19 nt, Artificial Sequence
  Description of Artificial Sequence: Synthetic oligonucleotide
  Sense strand starting at position 207 of SEQ ID NO: 1245305
caugguauuuaugcuguau

SEQ ID NO: 1552583 - RNA, 19 nt, Artificial Sequence
  Description of Artificial Sequence: Synthetic oligonucleotide
  Antisense strand to SEQ ID NO: 1552582
auacagcauaaauaccaug

SEQ ID NO: 1552584 - RNA, 19 nt, Artificial Sequence
  Description of Artificial Sequence: Synthetic oligonucleotide
  Sense strand starting at position 261 of SEQ ID NO: 1245305
ugucccucucaagagaagu

SEQ ID NO: 1552585 - RNA, 19 nt, Artificial Sequence
  Description of Artificial Sequence: Synthetic oligonucleotide
  Antisense strand to SEQ ID NO: 1552584
acuucucuugagagggaca

SEQ ID NO: 1552586 - RNA, 19 nt, Artificial Sequence
  Description of Artificial Sequence: Synthetic oligonucleotide
  Sense strand starting at position 440 of SEQ ID NO: 1245305
ugcguuagaauauauugaa

SEQ ID NO: 1552587 - RNA, 19 nt, Artificial Sequence
  Description of Artificial Sequence: Synthetic oligonucleotide
  Antisense strand to SEQ ID NO: 1552586
uucaauauauucuaacgca

SEQ ID NO: 1552588 - RNA, 19 nt, Artificial Sequence
  Description of Artificial Sequence: Synthetic oligonucleotide
  Sense strand starting at position 572 of SEQ ID NO: 1245305
gaaagcuuacauugugaaa

SEQ ID NO: 1552589 - RNA, 19 nt, Artificial Sequence
  Description of Artificial Sequence: Synthetic oligonucleotide
  Antisense strand to SEQ ID NO: 1552588
uuucacaauguaagcuuuc

SEQ ID NO: 1552590 - RNA, 19 nt, Artificial Sequence
  Description of Artificial Sequence: Synthetic oligonucleotide
  Sense strand starting at position 730 of SEQ ID NO: 1245305
guuuaucuaguauacccaa

SEQ ID NO: 1552591 - RNA, 19 nt, Artificial Sequence
  Description of Artificial Sequence: Synthetic oligonucleotide
  Antisense strand to SEQ ID NO: 1552590
uuggguauacuagauaaac

SEQ ID NO: 1552592 - RNA, 19 nt, Artificial Sequence
  Description of Artificial Sequence: Synthetic oligonucleotide
  Sense strand starting at position 803 of SEQ ID NO: 1245305
acaagaagguuucugacca

SEQ ID NO: 1552593 - RNA, 19 nt, Artificial Sequence
  Description of Artificial Sequence: Synthetic oligonucleotide
  Antisense strand to SEQ ID NO: 1552592
uggucagaaaccuucuugu

SEQ ID NO: 1552594 - RNA, 19 nt, Artificial Sequence
  Description of Artificial Sequence: Synthetic oligonucleotide
  Sense strand starting at position 807 of SEQ ID NO: 1245305
gaagguuucugaccacaaa

SEQ ID NO: 1552595 - RNA, 19 nt, Artificial Sequence
  Description of Artificial Sequence: Synthetic oligonucleotide
  Antisense strand to SEQ ID NO: 1552594
uuuguggucagaaaccuuc

SEQ ID NO: 1552596 - RNA, 19 nt, Artificial Sequence
  Description of Artificial Sequence: Synthetic oligonucleotide
  Sense strand starting at position 841 of SEQ ID NO: 1245305
ucucaagacugucugaaau

SEQ ID NO: 1552597 - RNA, 19 nt, Artificial Sequence
  Description of Artificial Sequence: Synthetic oligonucleotide
  Antisense strand to SEQ ID NO: 1552596
auuucagacagucuugaga

SEQ ID NO: 1552598 - RNA, 19 nt, Artificial Sequence
  Description of Artificial Sequence: Synthetic oligonucleotide
  Sense strand starting at position 851 of SEQ ID NO: 1245305
gucugaaaucaccacagca

SEQ ID NO: 1552599 - RNA, 19 nt, Artificial Sequence
  Description of Artificial Sequence: Synthetic oligonucleotide
  Antisense strand to SEQ ID NO: 1552598
ugcuguggugauuucagac

SEQ ID NO: 1552600 - RNA, 19 nt, Artificial Sequence
  Description of Artificial Sequence: Synthetic oligonucleotide
  Sense strand starting at position 853 of SEQ ID NO: 1245305
cugaaaucaccacagcagu

SEQ ID NO: 1552601 - RNA, 19 nt, Artificial Sequence
  Description of Artificial Sequence: Synthetic oligonucleotide
  Antisense strand to SEQ ID NO: 1552600
acugcuguggugauuucag

SEQ ID NO: 1552602 - RNA, 19 nt, Artificial Sequence
  Description of Artificial Sequence: Synthetic oligonucleotide
  Sense strand starting at position 886 of SEQ ID NO: 1245305
acgccacugauagaaguaa

SEQ ID NO: 1552603 - RNA, 19 nt, Artificial Sequence
  Description of Artificial Sequence: Synthetic oligonucleotide
  Antisense strand to SEQ ID NO: 1552602
uuacuucuaucaguggcgu

SEQ ID NO: 1552604 - RNA, 19 nt, Artificial Sequence
  Description of Artificial Sequence: Synthetic oligonucleotide
  Sense strand starting at position 902 of SEQ ID NO: 1245305
uaagguuuagaaggcaaau

SEQ ID NO: 1552605 - RNA, 19 nt, Artificial Sequence
  Description of Artificial Sequence: Synthetic oligonucleotide
  Antisense strand to SEQ ID NO: 1552604
auuugccuucuaaaccuua

SEQ ID NO: 1552606 - RNA, 19 nt, Artificial Sequence
  Description of Artificial Sequence: Synthetic oligonucleotide
  Sense strand starting at position 919 of SEQ ID NO: 1245305
auaaaucaggcacgaaaga

SEQ ID NO: 1552607 - RNA, 19 nt, Artificial Sequence
  Description of Artificial Sequence: Synthetic oligonucleotide
  Antisense strand to SEQ ID NO: 1552606
ucuuucgugccugauuuau

SEQ ID NO: 1552608 - RNA, 19 nt, Artificial Sequence
  Description of Artificial Sequence: Synthetic oligonucleotide
  Sense strand starting at position 1017 of SEQ ID NO: 1245305
agacuaagccacggauaua

SEQ ID NO: 1552609 - RNA, 19 nt, Artificial Sequence
  Description of Artificial Sequence: Synthetic oligonucleotide
  Antisense strand to SEQ ID NO: 1552608
uauauccguggcuuagucu

SEQ ID NO: 1552610 - RNA, 19 nt, Artificial Sequence
  Description of Artificial Sequence: Synthetic oligonucleotide
  Sense strand starting at position 1246 of SEQ ID NO: 1245305
ggucauggcgcauugugua

SEQ ID NO: 1552611 - RNA, 19 nt, Artificial Sequence
  Description of Artificial Sequence: Synthetic oligonucleotide
  Antisense strand to SEQ ID NO: 1552610
uacacaaugcgccaugacc

SEQ ID NO: 1552612 - RNA, 19 nt, Artificial Sequence
  Description of Artificial Sequence: Synthetic oligonucleotide
  Sense strand starting at position 1274 of SEQ ID NO: 1245305
auugaucuauuccugauag

SEQ ID NO: 1552613 - RNA, 19 nt, Artificial Sequence
  Description of Artificial Sequence: Synthetic oligonucleotide
  Antisense strand to SEQ ID NO: 1552612
cuaucaggaauagaucaau

SEQ ID NO: 1552614 - RNA, 19 nt, Artificial Sequence
  Description of Artificial Sequence: Synthetic oligonucleotide
  Sense strand starting at position 1276 of SEQ ID NO: 1245305
ugaucuauuccugauagca

SEQ ID NO: 1552615 - RNA, 19 nt, Artificial Sequence
  Description of Artificial Sequence: Synthetic oligonucleotide
  Antisense strand to SEQ ID NO: 1552614
ugcuaucaggaauagauca

SEQ ID NO: 1552616 - RNA, 19 nt, Artificial Sequence
  Description of Artificial Sequence: Synthetic oligonucleotide
  Sense strand starting at position 1337 of SEQ ID NO: 1245305
acaggcaucagugagguaa

SEQ ID NO: 1552617 - RNA, 19 nt, Artificial Sequence
  Description of Artificial Sequence: Synthetic oligonucleotide
  Antisense strand to SEQ ID NO: 1552616
uuaccucacugaugccugu

SEQ ID NO: 1552618 - RNA, 19 nt, Artificial Sequence
  Description of Artificial Sequence: Synthetic oligonucleotide
  Sense strand starting at position 1375 of SEQ ID NO: 1245305
guccaagacugacugacau

SEQ ID NO: 1552619 - RNA, 19 nt, Artificial Sequence
  Description of Artificial Sequence: Synthetic oligonucleotide
  Antisense strand to SEQ ID NO: 1552618
augucagucagucuuggac

SEQ ID NO: 1552620 - RNA, 19 nt, Artificial Sequence
  Description of Artificial Sequence: Synthetic oligonucleotide
  Sense strand starting at position 1451 of SEQ ID NO: 1245305
cacauuuguguauggugau

SEQ ID NO: 1552621 - RNA, 19 nt, Artificial Sequence
  Description of Artificial Sequence: Synthetic oligonucleotide
  Antisense strand to SEQ ID NO: 1552620
aucaccauacacaaaugug

SEQ ID NO: 1552622 - RNA, 19 nt, Artificial Sequence
  Description of Artificial Sequence: Synthetic oligonucleotide
  Sense strand starting at position 1535 of SEQ ID NO: 1245305
gcaugaucauuggccauuu

SEQ ID NO: 1552623 - RNA, 19 nt, Artificial Sequence
  Description of Artificial Sequence: Synthetic oligonucleotide
  Antisense strand to SEQ ID NO: 1552622
aaauggccaaugaucaugc

SEQ ID NO: 1552624 - RNA, 19 nt, Artificial Sequence
  Description of Artificial Sequence: Synthetic oligonucleotide
  Sense strand starting at position 1566 of SEQ ID NO: 1245305
agauucguuagugaacuua

SEQ ID NO: 1552625 - RNA, 19 nt, Artificial Sequence
  Description of Artificial Sequence: Synthetic oligonucleotide
  Antisense strand to SEQ ID NO: 1552624
uaaguucacuaacgaaucu

SEQ ID NO: 1552626 - RNA, 19 nt, Artificial Sequence
  Description of Artificial Sequence: Synthetic oligonucleotide
  Sense strand starting at position 1649 of SEQ ID NO: 1245305
aguguacucacgcuagcau

SEQ ID NO: 1552627 - RNA, 19 nt, Artificial Sequence
  Description of Artificial Sequence: Synthetic oligonucleotide
  Antisense strand to SEQ ID NO: 1552626
augcuagcgugaguacacu

SEQ ID NO: 1552628 - RNA, 19 nt, Artificial Sequence
  Description of Artificial Sequence: Synthetic oligonucleotide
  Sense strand starting at position 2057 of SEQ ID NO: 1245305
aauaguaucugacuaaggu

SEQ ID NO: 1552629 - RNA, 19 nt, Artificial Sequence
  Description of Artificial Sequence: Synthetic oligonucleotide
  Antisense strand to SEQ ID NO: 1552628
accuuagucagauacuauu

SEQ ID NO: 1552630 - RNA, 19 nt, Artificial Sequence
  Description of Artificial Sequence: Synthetic oligonucleotide
  Sense strand starting at position 2221 of SEQ ID NO: 1245305
acauacucuucugugagaa

SEQ ID NO: 1552631 - RNA, 19 nt, Artificial Sequence
  Description of Artificial Sequence: Synthetic oligonucleotide
  Antisense strand to SEQ ID NO: 1552630
uucucacagaagaguaugu

SEQ ID NO: 1552632 - RNA, 19 nt, Artificial Sequence
  Description of Artificial Sequence: Synthetic oligonucleotide
  Sense strand starting at position 2376 of SEQ ID NO: 1245305
uguguaaauuucccuagca

SEQ ID NO: 1552633 - RNA, 19 nt, Artificial Sequence
  Description of Artificial Sequence: Synthetic oligonucleotide
  Antisense strand to SEQ ID NO: 1552632
ugcuagggaaauuuacaca

SEQ ID NO: 1552634 - RNA, 19 nt, Artificial Sequence
  Description of Artificial Sequence: Synthetic oligonucleotide
  Sense strand starting at position 2377 of SEQ ID NO: 1245305
guguaaauuucccuagcau

SEQ ID NO: 1552635 - RNA, 19 nt, Artificial Sequence
  Description of Artificial Sequence: Synthetic oligonucleotide
  Antisense strand to SEQ ID NO: 1552634
augcuagggaaauuuacac

SEQ ID NO: 1552636 - RNA, 19 nt, Artificial Sequence
  Description of Artificial Sequence: Synthetic oligonucleotide
  Sense strand starting at position 2731 of SEQ ID NO: 1245305
uauaauacaggcuagaguu

SEQ ID NO: 1552637 - RNA, 19 nt, Artificial Sequence
  Description of Artificial Sequence: Synthetic oligonucleotide
  Antisense strand to SEQ ID NO: 1552636
aacucuagccuguauuaua

SEQ ID NO: 1552638 - RNA, 19 nt, Artificial Sequence
  Description of Artificial Sequence: Synthetic oligonucleotide
  Sense strand starting at position 2922 of SEQ ID NO: 1245305
cugcuaugcauggaaauga

SEQ ID NO: 1552639 - RNA, 19 nt, Artificial Sequence
  Description of Artificial Sequence: Synthetic oligonucleotide
  Antisense strand to SEQ ID NO: 1552638
ucauuuccaugcauagcag

SEQ ID NO: 1552640 - RNA, 19 nt, Artificial Sequence
  Description of Artificial Sequence: Synthetic oligonucleotide
  Sense strand starting at position 3056 of SEQ ID NO: 1245305
aguugcucgccucucaauu

SEQ ID NO: 1552641 - RNA, 19 nt, Artificial Sequence
  Description of Artificial Sequence: Synthetic oligonucleotide
  Antisense strand to SEQ ID NO: 1552640
aauugagaggcgagcaacu

SEQ ID NO: 1552642 - RNA, 19 nt, Artificial Sequence
  Description of Artificial Sequence: Synthetic oligonucleotide
  Sense strand starting at position 3161 of SEQ ID NO: 1245305
gauuguuuaugaguagaau

SEQ ID NO: 1552643 - RNA, 19 nt, Artificial Sequence
  Description of Artificial Sequence: Synthetic oligonucleotide
  Antisense strand to SEQ ID NO: 1552642
auucuacucauaaacaauc

SEQ ID NO: 1552644 - RNA, 19 nt, Artificial Sequence
  Description of Artificial Sequence: Synthetic oligonucleotide
  Sense strand starting at position 3256 of SEQ ID NO: 1245305
aggagaagguuguuguuaa

SEQ ID NO: 1552645 - RNA, 19 nt, Artificial Sequence
  Description of Artificial Sequence: Synthetic oligonucleotide
  Antisense strand to SEQ ID NO: 1552644
uuaacaacaaccuucuccu

SEQ ID NO: 1552646 - RNA, 19 nt, Artificial Sequence
  Description of Artificial Sequence: Synthetic oligonucleotide
  Sense strand starting at position 3456 of SEQ ID NO: 1245305
acuggauaaucuucuugga

SEQ ID NO: 1552647 - RNA, 19 nt, Artificial Sequence
  Description of Artificial Sequence: Synthetic oligonucleotide
  Antisense strand to SEQ ID NO: 1552646
uccaagaagauuauccagu

SEQ ID NO: 1552648 - RNA, 19 nt, Artificial Sequence
  Description of Artificial Sequence: Synthetic oligonucleotide
  Sense strand starting at position 3811 of SEQ ID NO: 1245305
ucaggauuacacgaggugu

SEQ ID NO: 1552649 - RNA, 19 nt, Artificial Sequence
  Description of Artificial Sequence: Synthetic oligonucleotide
  Antisense strand to SEQ ID NO: 1552648
acaccucguguaauccuga

SEQ ID NO: 1552650 - RNA, 19 nt, Artificial Sequence
  Description of Artificial Sequence: Synthetic oligonucleotide
  Sense strand starting at position 3844 of SEQ ID NO: 1245305
gugaacucugguuacauag

SEQ ID NO: 1552651 - RNA, 19 nt, Artificial Sequence
  Description of Artificial Sequence: Synthetic oligonucleotide
  Antisense strand to SEQ ID NO: 1552650
cuauguaaccagaguucac

SEQ ID NO: 1552652 - RNA, 19 nt, Artificial Sequence
  Description of Artificial Sequence: Synthetic oligonucleotide
  Sense strand starting at position 3868 of SEQ ID NO: 1245305
uguaguuaggcugaagaua

SEQ ID NO: 1552653 - RNA, 19 nt, Artificial Sequence
  Description of Artificial Sequence: Synthetic oligonucleotide
  Antisense strand to SEQ ID NO: 1552652
uaucuucagccuaacuaca

SEQ ID NO: 1552654 - RNA, 19 nt, Artificial Sequence
  Description of Artificial Sequence: Synthetic oligonucleotide
  Sense strand starting at position 3886 of SEQ ID NO: 1245305
auaagaauucuuuggugac

SEQ ID NO: 1552655 - RNA, 19 nt, Artificial Sequence
  Description of Artificial Sequence: Synthetic oligonucleotide
  Antisense strand to SEQ ID NO: 1552654
gucaccaaagaauucuuau

SEQ ID NO: 1552656 - RNA, 19 nt, Artificial Sequence
  Description of Artificial Sequence: Synthetic oligonucleotide
  Sense strand starting at position 3890 of SEQ ID NO: 1245305
gaauucuuuggugaccgaa

SEQ ID NO: 1552657 - RNA, 19 nt, Artificial Sequence
  Description of Artificial Sequence: Synthetic oligonucleotide
  Antisense strand to SEQ ID NO: 1552656
uucggucaccaaagaauuc

SEQ ID NO: 1552658 - RNA, 19 nt, Artificial Sequence
  Description of Artificial Sequence: Synthetic oligonucleotide
  Sense strand starting at position 229 of SEQ ID NO: 1245306
ggaguuugaacuugagauu

SEQ ID NO: 1552659 - RNA, 19 nt, Artificial Sequence
  Description of Artificial Sequence: Synthetic oligonucleotide
  Antisense strand to SEQ ID NO: 1552658
aaucucaaguucaaacucc

SEQ ID NO: 1552660 - RNA, 19 nt, Artificial Sequence
  Description of Artificial Sequence: Synthetic oligonucleotide
  Sense strand starting at position 240 of SEQ ID NO: 1245306
uugagauuauggucuggaa

SEQ ID NO: 1552661 - RNA, 19 nt, Artificial Sequence
  Description of Artificial Sequence: Synthetic oligonucleotide
  Antisense strand to SEQ ID NO: 1552660
uuccagaccauaaucucaa

SEQ ID NO: 1552662 - RNA, 19 nt, Artificial Sequence
  Description of Artificial Sequence: Synthetic oligonucleotide
  Sense strand starting at position 284 of SEQ ID NO: 1245306
gucucauaugagugcauug

SEQ ID NO: 1552663 - RNA, 19 nt, Artificial Sequence
  Description of Artificial Sequence: Synthetic oligonucleotide
  Antisense strand to SEQ ID NO: 1552662
caaugcacucauaugagac

SEQ ID NO: 1552664 - RNA, 19 nt, Artificial Sequence
  Description of Artificial Sequence: Synthetic oligonucleotide
  Sense strand starting at position 325 of SEQ ID NO: 1245306
cucaguauuugguaugaaa

SEQ ID NO: 1552665 - RNA, 19 nt, Artificial Sequence
  Description of Artificial Sequence: Synthetic oligonucleotide
  Antisense strand to SEQ ID NO: 1552664
uuucauaccaaauacugag

SEQ ID NO: 1552666 - RNA, 19 nt, Artificial Sequence
  Description of Artificial Sequence: Synthetic oligonucleotide
  Sense strand starting at position 401 of SEQ ID NO: 1245306
gagggauugucugcaauag

SEQ ID NO: 1552667 - RNA, 19 nt, Artificial Sequence
  Description of Artificial Sequence: Synthetic oligonucleotide
  Antisense strand to SEQ ID NO: 1552666
cuauugcagacaaucccuc

SEQ ID NO: 1552668 - RNA, 19 nt, Artificial Sequence
  Description of Artificial Sequence: Synthetic oligonucleotide
  Sense strand starting at position 443 of SEQ ID NO: 1245306
ggcagugacugcucacaua

SEQ ID NO: 1552669 - RNA, 19 nt, Artificial Sequence
  Description of Artificial Sequence: Synthetic oligonucleotide
  Antisense strand to SEQ ID NO: 1552668
uaugugagcagucacugcc

SEQ ID NO: 1552670 - RNA, 19 nt, Artificial Sequence
  Description of Artificial Sequence: Synthetic oligonucleotide
  Sense strand starting at position 491 of SEQ ID NO: 1245306
aggcgccuagcuguuauaa

SEQ ID NO: 1552671 - RNA, 19 nt, Artificial Sequence
  Description of Artificial Sequence: Synthetic oligonucleotide
  Antisense strand to SEQ ID NO: 1552670
uuauaacagcuaggcgccu

SEQ ID NO: 1552672 - RNA, 19 nt, Artificial Sequence
  Description of Artificial Sequence: Synthetic oligonucleotide
  Sense strand starting at position 492 of SEQ ID NO: 1245306
ggcgccuagcuguuauaaa

SEQ ID NO: 1552673 - RNA, 19 nt, Artificial Sequence
  Description of Artificial Sequence: Synthetic oligonucleotide
  Antisense strand to SEQ ID NO: 1552672
uuuauaacagcuaggcgcc

SEQ ID NO: 1552674 - RNA, 19 nt, Artificial Sequence
  Description of Artificial Sequence: Synthetic oligonucleotide
  Sense strand starting at position 571 of SEQ ID NO: 1245306
gggaauaugacuuguucca

SEQ ID NO: 1552675 - RNA, 19 nt, Artificial Sequence
  Description of Artificial Sequence: Synthetic oligonucleotide
  Antisense strand to SEQ ID NO: 1552674
uggaacaagucauauuccc

SEQ ID NO: 1552676 - RNA, 19 nt, Artificial Sequence
  Description of Artificial Sequence: Synthetic oligonucleotide
  Sense strand starting at position 591 of SEQ ID NO: 1245306
uugagaugcguggaacaca

SEQ ID NO: 1552677 - RNA, 19 nt, Artificial Sequence
  Description of Artificial Sequence: Synthetic oligonucleotide
  Antisense strand to SEQ ID NO: 1552676
uguguuccacgcaucucaa

SEQ ID NO: 1552678 - RNA, 19 nt, Artificial Sequence
  Description of Artificial Sequence: Synthetic oligonucleotide
  Sense strand starting at position 638 of SEQ ID NO: 1245306
agccaaggauguuuguaaa

SEQ ID NO: 1552679 - RNA, 19 nt, Artificial Sequence
  Description of Artificial Sequence: Synthetic oligonucleotide
  Antisense strand to SEQ ID NO: 1552678
uuuacaaacauccuuggcu

SEQ ID NO: 1552680 - RNA, 19 nt, Artificial Sequence
  Description of Artificial Sequence: Synthetic oligonucleotide
  Sense strand starting at position 670 of SEQ ID NO: 1245306
ggaugaguagacugucuag

SEQ ID NO: 1552681 - RNA, 19 nt, Artificial Sequence
  Description of Artificial Sequence: Synthetic oligonucleotide
  Antisense strand to SEQ ID NO: 1552680
cuagacagucuacucaucc

SEQ ID NO: 1552682 - RNA, 19 nt, Artificial Sequence
  Description of Artificial Sequence: Synthetic oligonucleotide
  Sense strand starting at position 714 of SEQ ID NO: 1245306
ucccgauuccgagagguuc

SEQ ID NO: 1552683 - RNA, 19 nt, Artificial Sequence
  Description of Artificial Sequence: Synthetic oligonucleotide
  Antisense strand to SEQ ID NO: 1552682
gaaccucucggaaucggga

SEQ ID NO: 1552684 - RNA, 19 nt, Artificial Sequence
  Description of Artificial Sequence: Synthetic oligonucleotide
  Sense strand starting at position 790 of SEQ ID NO: 1245306
accuauuucuguggaauuu

SEQ ID NO: 1552685 - RNA, 19 nt, Artificial Sequence
  Description of Artificial Sequence: Synthetic oligonucleotide
  Antisense strand to SEQ ID NO: 1552684
aaauuccacagaaauaggu

SEQ ID NO: 1552686 - RNA, 19 nt, Artificial Sequence
  Description of Artificial Sequence: Synthetic oligonucleotide
  Sense strand starting at position 809 of SEQ ID NO: 1245306
ccaauaucuggagguagua

SEQ ID NO: 1552687 - RNA, 19 nt, Artificial Sequence
  Description of Artificial Sequence: Synthetic oligonucleotide
  Antisense strand to SEQ ID NO: 1552686
uacuaccuccagauauugg

SEQ ID NO: 1552688 - RNA, 19 nt, Artificial Sequence
  Description of Artificial Sequence: Synthetic oligonucleotide
  Sense strand starting at position 1065 of SEQ ID NO: 1245306
gacugagagugucuggaaa

SEQ ID NO: 1552689 - RNA, 19 nt, Artificial Sequence
  Description of Artificial Sequence: Synthetic oligonucleotide
  Antisense strand to SEQ ID NO: 1552688
uuuccagacacucucaguc

SEQ ID NO: 1552690 - RNA, 19 nt, Artificial Sequence
  Description of Artificial Sequence: Synthetic oligonucleotide
  Sense strand starting at position 1185 of SEQ ID NO: 1245306
agaagagaauaugaaagau

SEQ ID NO: 1552691 - RNA, 19 nt, Artificial Sequence
  Description of Artificial Sequence: Synthetic oligonucleotide
  Antisense strand to SEQ ID NO: 1552690
aucuuucauauucucuucu

SEQ ID NO: 1552692 - RNA, 19 nt, Artificial Sequence
  Description of Artificial Sequence: Synthetic oligonucleotide
  Sense strand starting at position 2000 of SEQ ID NO: 1245306
ugugcaaucccugauucuu

SEQ ID NO: 1552693 - RNA, 19 nt, Artificial Sequence
  Description of Artificial Sequence: Synthetic oligonucleotide
  Antisense strand to SEQ ID NO: 1552692
aagaaucagggauugcaca

SEQ ID NO: 1552694 - RNA, 19 nt, Artificial Sequence
  Description of Artificial Sequence: Synthetic oligonucleotide
  Sense strand starting at position 2133 of SEQ ID NO: 1245306
cacguuugacuccacugua

SEQ ID NO: 1552695 - RNA, 19 nt, Artificial Sequence
  Description of Artificial Sequence: Synthetic oligonucleotide
  Antisense strand to SEQ ID NO: 1552694
uacaguggagucaaacgug

SEQ ID NO: 1552696 - RNA, 19 nt, Artificial Sequence
  Description of Artificial Sequence: Synthetic oligonucleotide
  Sense strand starting at position 2174 of SEQ ID NO: 1245306
cucugaaauugcuccugau

SEQ ID NO: 1552697 - RNA, 19 nt, Artificial Sequence
  Description of Artificial Sequence: Synthetic oligonucleotide
  Antisense strand to SEQ ID NO: 1552696
aucaggagcaauuucagag

SEQ ID NO: 1552698 - RNA, 19 nt, Artificial Sequence
  Description of Artificial Sequence: Synthetic oligonucleotide
  Sense strand starting at position 2189 of SEQ ID NO: 1245306
ugauaaggauacuaaucau

SEQ ID NO: 1552699 - RNA, 19 nt, Artificial Sequence
  Description of Artificial Sequence: Synthetic oligonucleotide
  Antisense strand to SEQ ID NO: 1552698
augauuaguauccuuauca

SEQ ID NO: 1552700 - RNA, 19 nt, Artificial Sequence
  Description of Artificial Sequence: Synthetic oligonucleotide
  Sense strand starting at position 2210 of SEQ ID NO: 1245306
ucuaauugccuuggccaaa

SEQ ID NO: 1552701 - RNA, 19 nt, Artificial Sequence
  Description of Artificial Sequence: Synthetic oligonucleotide
  Antisense strand to SEQ ID NO: 1552700
uuuggccaaggcaauuaga

SEQ ID NO: 1552702 - RNA, 19 nt, Artificial Sequence
  Description of Artificial Sequence: Synthetic oligonucleotide
  Sense strand starting at position 2255 of SEQ ID NO: 1245306
uuguuuguuggcgacauuu

SEQ ID NO: 1552703 - RNA, 19 nt, Artificial Sequence
  Description of Artificial Sequence: Synthetic oligonucleotide
  Antisense strand to SEQ ID NO: 1552702
aaaugucgccaacaaacaa

SEQ ID NO: 1552704 - RNA, 19 nt, Artificial Sequence
  Description of Artificial Sequence: Synthetic oligonucleotide
  Sense strand starting at position 2257 of SEQ ID NO: 1245306
guuuguuggcgacauuuag

SEQ ID NO: 1552705 - RNA, 19 nt, Artificial Sequence
  Description of Artificial Sequence: Synthetic oligonucleotide
  Antisense strand to SEQ ID NO: 1552704
cuaaaugucgccaacaaac

SEQ ID NO: 1552706 - RNA, 19 nt, Artificial Sequence
  Description of Artificial Sequence: Synthetic oligonucleotide
  Sense strand starting at position 2341 of SEQ ID NO: 1245306
uugguauccugauuccuuu

SEQ ID NO: 1552707 - RNA, 19 nt, Artificial Sequence
  Description of Artificial Sequence: Synthetic oligonucleotide
  Antisense strand to SEQ ID NO: 1552706
aaaggaaucaggauaccaa

SEQ ID NO: 1552708 - RNA, 19 nt, Artificial Sequence
  Description of Artificial Sequence: Synthetic oligonucleotide
  Sense strand starting at position 2404 of SEQ ID NO: 1245306
uuguaugaccuccacuaua

SEQ ID NO: 1552709 - RNA, 19 nt, Artificial Sequence
  Description of Artificial Sequence: Synthetic oligonucleotide
  Antisense strand to SEQ ID NO: 1552708
uauaguggaggucauacaa

SEQ ID NO: 1552710 - RNA, 19 nt, Artificial Sequence
  Description of Artificial Sequence: Synthetic oligonucleotide
  Sense strand starting at position 2415 of SEQ ID NO: 1245306
ccacuauauccauagguuc

SEQ ID NO: 1552711 - RNA, 19 nt, Artificial Sequence
  Description of Artificial Sequence: Synthetic oligonucleotide
  Antisense strand to SEQ ID NO: 1552710
gaaccuauggauauagugg

SEQ ID NO: 1552712 - RNA, 19 nt, Artificial Sequence
  Description of Artificial Sequence: Synthetic oligonucleotide
  Sense strand starting at position 2487 of SEQ ID NO: 1245306
agauguuaccuguguacua

SEQ ID NO: 1552713 - RNA, 19 nt, Artificial Sequence
  Description of Artificial Sequence: Synthetic oligonucleotide
  Antisense strand to SEQ ID NO: 1552712
uaguacacagguaacaucu

SEQ ID NO: 1552714 - RNA, 19 nt, Artificial Sequence
  Description of Artificial Sequence: Synthetic oligonucleotide
  Sense strand starting at position 2488 of SEQ ID NO: 1245306
gauguuaccuguguacuac

SEQ ID NO: 1552715 - RNA, 19 nt, Artificial Sequence
  Description of Artificial Sequence: Synthetic oligonucleotide
  Antisense strand to SEQ ID NO: 1552714
guaguacacagguaacauc

SEQ ID NO: 1552716 - RNA, 19 nt, Artificial Sequence
  Description of Artificial Sequence: Synthetic oligonucleotide
  Sense strand starting at position 2666 of SEQ ID NO: 1245306
aguucugauccaugccaac

SEQ ID NO: 1552717 - RNA, 19 nt, Artificial Sequence
  Description of Artificial Sequence: Synthetic oligonucleotide
  Antisense strand to SEQ ID NO: 1552716
guuggcauggaucagaacu

SEQ ID NO: 1552718 - RNA, 19 nt, Artificial Sequence
  Description of Artificial Sequence: Synthetic oligonucleotide
  Sense strand starting at position 2842 of SEQ ID NO: 1245306
ucuuuagagccauagcaaa

SEQ ID NO: 1552719 - RNA, 19 nt, Artificial Sequence
  Description of Artificial Sequence: Synthetic oligonucleotide
  Antisense strand to SEQ ID NO: 1552718
uuugcuauggcucuaaaga

SEQ ID NO: 1552720 - RNA, 19 nt, Artificial Sequence
  Description of Artificial Sequence: Synthetic oligonucleotide
  Sense strand starting at position 2970 of SEQ ID NO: 1245306
agcucuccaguuugggaau

SEQ ID NO: 1552721 - RNA, 19 nt, Artificial Sequence
  Description of Artificial Sequence: Synthetic oligonucleotide
  Antisense strand to SEQ ID NO: 1552720
auucccaaacuggagagcu

SEQ ID NO: 1552722 - RNA, 19 nt, Artificial Sequence
  Description of Artificial Sequence: Synthetic oligonucleotide
  Sense strand starting at position 3144 of SEQ ID NO: 1245306
uaagucuuggugcaggauu

SEQ ID NO: 1552723 - RNA, 19 nt, Artificial Sequence
  Description of Artificial Sequence: Synthetic oligonucleotide
  Antisense strand to SEQ ID NO: 1552722
aauccugcaccaagacuua

SEQ ID NO: 1552724 - RNA, 19 nt, Artificial Sequence
  Description of Artificial Sequence: Synthetic oligonucleotide
  Sense strand starting at position 3208 of SEQ ID NO: 1245306
gcuacagacucacauuuga

SEQ ID NO: 1552725 - RNA, 19 nt, Artificial Sequence
  Description of Artificial Sequence: Synthetic oligonucleotide
  Antisense strand to SEQ ID NO: 1552724
ucaaaugugagucuguagc

SEQ ID NO: 1552726 - RNA, 19 nt, Artificial Sequence
  Description of Artificial Sequence: Synthetic oligonucleotide
  Sense strand starting at position 3223 of SEQ ID NO: 1245306
uugaacugugcccaaacuu

SEQ ID NO: 1552727 - RNA, 19 nt, Artificial Sequence
  Description of Artificial Sequence: Synthetic oligonucleotide
  Antisense strand to SEQ ID NO: 1552726
aaguuugggcacaguucaa

SEQ ID NO: 1552728 - RNA, 19 nt, Artificial Sequence
  Description of Artificial Sequence: Synthetic oligonucleotide
  Sense strand starting at position 3470 of SEQ ID NO: 1245306
cugggaguuugguuguaaa

SEQ ID NO: 1552729 - RNA, 19 nt, Artificial Sequence
  Description of Artificial Sequence: Synthetic oligonucleotide
  Antisense strand to SEQ ID NO: 1552728
uuuacaaccaaacucccag

SEQ ID NO: 1552730 - RNA, 19 nt, Artificial Sequence
  Description of Artificial Sequence: Synthetic oligonucleotide
  Sense strand starting at position 3490 of SEQ ID NO: 1245306
acagauaucccauguagga

SEQ ID NO: 1552731 - RNA, 19 nt, Artificial Sequence
  Description of Artificial Sequence: Synthetic oligonucleotide
  Antisense strand to SEQ ID NO: 1552730
uccuacaugggauaucugu

SEQ ID NO: 1552732 - RNA, 19 nt, Artificial Sequence
  Description of Artificial Sequence: Synthetic oligonucleotide
  Sense strand starting at position 3765 of SEQ ID NO: 1245306
ggcugcaacauggaguaua

SEQ ID NO: 1552733 - RNA, 19 nt, Artificial Sequence
  Description of Artificial Sequence: Synthetic oligonucleotide
  Antisense strand to SEQ ID NO: 1552732
uauacuccauguugcagcc

SEQ ID NO: 1552734 - RNA, 19 nt, Artificial Sequence
  Description of Artificial Sequence: Synthetic oligonucleotide
  Sense strand starting at position 3910 of SEQ ID NO: 1245306
ggacauaaauuuggcauca

SEQ ID NO: 1552735 - RNA, 19 nt, Artificial Sequence
  Description of Artificial Sequence: Synthetic oligonucleotide
  Antisense strand to SEQ ID NO: 1552734
ugaugccaaauuuaugucc

SEQ ID NO: 1552736 - RNA, 19 nt, Artificial Sequence
  Description of Artificial Sequence: Synthetic oligonucleotide
  Sense strand starting at position 3923 of SEQ ID NO: 1245306
gcaucacuucuuggaccau

SEQ ID NO: 1552737 - RNA, 19 nt, Artificial Sequence
  Description of Artificial Sequence: Synthetic oligonucleotide
  Antisense strand to SEQ ID NO: 1552736
augguccaagaagugaugc

SEQ ID NO: 1552738 - RNA, 19 nt, Artificial Sequence
  Description of Artificial Sequence: Synthetic oligonucleotide
  Sense strand starting at position 6 of SEQ ID NO: 1245307
ggugccaaaucggcagaua

SEQ ID NO: 1552739 - RNA, 19 nt, Artificial Sequence
  Description of Artificial Sequence: Synthetic oligonucleotide
  Antisense strand to SEQ ID NO: 1552738
uaucugccgauuuggcacc

SEQ ID NO: 1552740 - RNA, 19 nt, Artificial Sequence
  Description of Artificial Sequence: Synthetic oligonucleotide
  Sense strand starting at position 9 of SEQ ID NO: 1245307
gccaaaucggcagauaguu

SEQ ID NO: 1552741 - RNA, 19 nt, Artificial Sequence
  Description of Artificial Sequence: Synthetic oligonucleotide
  Antisense strand to SEQ ID NO: 1552740
aacuaucugccgauuuggc

SEQ ID NO: 1552742 - RNA, 19 nt, Artificial Sequence
  Description of Artificial Sequence: Synthetic oligonucleotide
  Sense strand starting at position 159 of SEQ ID NO: 1245307
gccaguggacuccaacuaa

SEQ ID NO: 1552743 - RNA, 19 nt, Artificial Sequence
  Description of Artificial Sequence: Synthetic oligonucleotide
  Antisense strand to SEQ ID NO: 1552742
uuaguuggaguccacuggc

SEQ ID NO: 1552744 - RNA, 19 nt, Artificial Sequence
  Description of Artificial Sequence: Synthetic oligonucleotide
  Sense strand starting at position 186 of SEQ ID NO: 1245307
gggaaagguguggauaguu

SEQ ID NO: 1552745 - RNA, 19 nt, Artificial Sequence
  Description of Artificial Sequence: Synthetic oligonucleotide
  Antisense strand to SEQ ID NO: 1552744
aacuauccacaccuuuccc

SEQ ID NO: 1552746 - RNA, 19 nt, Artificial Sequence
  Description of Artificial Sequence: Synthetic oligonucleotide
  Sense strand starting at position 237 of SEQ ID NO: 1245307
gggaaagguaucugcugua

SEQ ID NO: 1552747 - RNA, 19 nt, Artificial Sequence
  Description of Artificial Sequence: Synthetic oligonucleotide
  Antisense strand to SEQ ID NO: 1552746
uacagcagauaccuuuccc

SEQ ID NO: 1552748 - RNA, 19 nt, Artificial Sequence
  Description of Artificial Sequence: Synthetic oligonucleotide
  Sense strand starting at position 242 of SEQ ID NO: 1245307
agguaucugcuguagaauu

SEQ ID NO: 1552749 - RNA, 19 nt, Artificial Sequence
  Description of Artificial Sequence: Synthetic oligonucleotide
  Antisense strand to SEQ ID NO: 1552748
aauucuacagcagauaccu

SEQ ID NO: 1552750 - RNA, 19 nt, Artificial Sequence
  Description of Artificial Sequence: Synthetic oligonucleotide
  Sense strand starting at position 283 of SEQ ID NO: 1245307
aggagaguuucugcaggga

SEQ ID NO: 1552751 - RNA, 19 nt, Artificial Sequence
  Description of Artificial Sequence: Synthetic oligonucleotide
  Antisense strand to SEQ ID NO: 1552750
ucccugcagaaacucuccu

SEQ ID NO: 1552752 - RNA, 19 nt, Artificial Sequence
  Description of Artificial Sequence: Synthetic oligonucleotide
  Sense strand starting at position 286 of SEQ ID NO: 1245307
agaguuucugcagggauaa

SEQ ID NO: 1552753 - RNA, 19 nt, Artificial Sequence
  Description of Artificial Sequence: Synthetic oligonucleotide
  Antisense strand to SEQ ID NO: 1552752
uuaucccugcagaaacucu

SEQ ID NO: 1552754 - RNA, 19 nt, Artificial Sequence
  Description of Artificial Sequence: Synthetic oligonucleotide
  Sense strand starting at position 287 of SEQ ID NO: 1245307
gaguuucugcagggauaaa

SEQ ID NO: 1552755 - RNA, 19 nt, Artificial Sequence
  Description of Artificial Sequence: Synthetic oligonucleotide
  Antisense strand to SEQ ID NO: 1552754
uuuaucccugcagaaacuc

SEQ ID NO: 1552756 - RNA, 19 nt, Artificial Sequence
  Description of Artificial Sequence: Synthetic oligonucleotide
  Sense strand starting at position 332 of SEQ ID NO: 1245307
uuagaugucaaccgugaga

SEQ ID NO: 1552757 - RNA, 19 nt, Artificial Sequence
  Description of Artificial Sequence: Synthetic oligonucleotide
  Antisense strand to SEQ ID NO: 1552756
ucucacgguugacaucuaa

SEQ ID NO: 1552758 - RNA, 19 nt, Artificial Sequence
  Description of Artificial Sequence: Synthetic oligonucleotide
  Sense strand starting at position 334 of SEQ ID NO: 1245307
agaugucaaccgugagauu

SEQ ID NO: 1552759 - RNA, 19 nt, Artificial Sequence
  Description of Artificial Sequence: Synthetic oligonucleotide
  Antisense strand to SEQ ID NO: 1552758
aaucucacgguugacaucu

SEQ ID NO: 1552760 - RNA, 19 nt, Artificial Sequence
  Description of Artificial Sequence: Synthetic oligonucleotide
  Sense strand starting at position 335 of SEQ ID NO: 1245307
gaugucaaccgugagauua

SEQ ID NO: 1552761 - RNA, 19 nt, Artificial Sequence
  Description of Artificial Sequence: Synthetic oligonucleotide
  Antisense strand to SEQ ID NO: 1552760
uaaucucacgguugacauc

SEQ ID NO: 1552762 - RNA, 19 nt, Artificial Sequence
  Description of Artificial Sequence: Synthetic oligonucleotide
  Sense strand starting at position 373 of SEQ ID NO: 1245307
acggaaacgaaucggaaau

SEQ ID NO: 1552763 - RNA, 19 nt, Artificial Sequence
  Description of Artificial Sequence: Synthetic oligonucleotide
  Antisense strand to SEQ ID NO: 1552762
auuuccgauucguuuccgu

SEQ ID NO: 1552764 - RNA, 19 nt, Artificial Sequence
  Description of Artificial Sequence: Synthetic oligonucleotide
  Sense strand starting at position 385 of SEQ ID NO: 1245307
cggaaauccuucccacaac

SEQ ID NO: 1552765 - RNA, 19 nt, Artificial Sequence
  Description of Artificial Sequence: Synthetic oligonucleotide
  Antisense strand to SEQ ID NO: 1552764
guugugggaaggauuuccg

SEQ ID NO: 1552766 - RNA, 19 nt, Artificial Sequence
  Description of Artificial Sequence: Synthetic oligonucleotide
  Sense strand starting at position 658 of SEQ ID NO: 1245307
gacaguauuucggcaguua

SEQ ID NO: 1552767 - RNA, 19 nt, Artificial Sequence
  Description of Artificial Sequence: Synthetic oligonucleotide
  Antisense strand to SEQ ID NO: 1552766
uaacugccgaaauacuguc

SEQ ID NO: 1552768 - RNA, 19 nt, Artificial Sequence
  Description of Artificial Sequence: Synthetic oligonucleotide
  Sense strand starting at position 696 of SEQ ID NO: 1245307
gcaugcucuaccgaucaga

SEQ ID NO: 1552769 - RNA, 19 nt, Artificial Sequence
  Description of Artificial Sequence: Synthetic oligonucleotide
  Antisense strand to SEQ ID NO: 1552768
ucugaucgguagagcaugc

SEQ ID NO: 1552770 - RNA, 19 nt, Artificial Sequence
  Description of Artificial Sequence: Synthetic oligonucleotide
  Sense strand starting at position 699 of SEQ ID NO: 1245307
ugcucuaccgaucagaaau

SEQ ID NO: 1552771 - RNA, 19 nt, Artificial Sequence
  Description of Artificial Sequence: Synthetic oligonucleotide
  Antisense strand to SEQ ID NO: 1552770
auuucugaucgguagagca

SEQ ID NO: 1552772 - RNA, 19 nt, Artificial Sequence
  Description of Artificial Sequence: Synthetic oligonucleotide
  Sense strand starting at position 814 of SEQ ID NO: 1245307
ugacuuugucccugcggaa

SEQ ID NO: 1552773 - RNA, 19 nt, Artificial Sequence
  Description of Artificial Sequence: Synthetic oligonucleotide
  Antisense strand to SEQ ID NO: 1552772
uuccgcagggacaaaguca

SEQ ID NO: 1552774 - RNA, 19 nt, Artificial Sequence
  Description of Artificial Sequence: Synthetic oligonucleotide
  Sense strand starting at position 838 of SEQ ID NO: 1245307
cagacaguauuucggucaa

SEQ ID NO: 1552775 - RNA, 19 nt, Artificial Sequence
  Description of Artificial Sequence: Synthetic oligonucleotide
  Antisense strand to SEQ ID NO: 1552774
uugaccgaaauacugucug

SEQ ID NO: 1552776 - RNA, 19 nt, Artificial Sequence
  Description of Artificial Sequence: Synthetic oligonucleotide
  Sense strand starting at position 850 of SEQ ID NO: 1245307
cggucaaagagauaauggu

SEQ ID NO: 1552777 - RNA, 19 nt, Artificial Sequence
  Description of Artificial Sequence: Synthetic oligonucleotide
  Antisense strand to SEQ ID NO: 1552776
accauuaucucuuugaccg

SEQ ID NO: 1552778 - RNA, 19 nt, Artificial Sequence
  Description of Artificial Sequence: Synthetic oligonucleotide
  Sense strand starting at position 903 of SEQ ID NO: 1245307
guucccuuuccggagugau

SEQ ID NO: 1552779 - RNA, 19 nt, Artificial Sequence
  Description of Artificial Sequence: Synthetic oligonucleotide
  Antisense strand to SEQ ID NO: 1552778
aucacuccggaaagggaac

SEQ ID NO: 1552780 - RNA, 19 nt, Artificial Sequence
  Description of Artificial Sequence: Synthetic oligonucleotide
  Sense strand starting at position 906 of SEQ ID NO: 1245307
cccuuuccggagugauuuc

SEQ ID NO: 1552781 - RNA, 19 nt, Artificial Sequence
  Description of Artificial Sequence: Synthetic oligonucleotide
  Antisense strand to SEQ ID NO: 1552780
gaaaucacuccggaaaggg

SEQ ID NO: 1552782 - RNA, 19 nt, Artificial Sequence
  Description of Artificial Sequence: Synthetic oligonucleotide
  Sense strand starting at position 1433 of SEQ ID NO: 1245307
gguagaucagauuaggcga

SEQ ID NO: 1552783 - RNA, 19 nt, Artificial Sequence
  Description of Artificial Sequence: Synthetic oligonucleotide
  Antisense strand to SEQ ID NO: 1552782
ucgccuaaucugaucuacc

SEQ ID NO: 1552784 - RNA, 19 nt, Artificial Sequence
  Description of Artificial Sequence: Synthetic oligonucleotide
  Sense strand starting at position 2082 of SEQ ID NO: 1245307
cgaggaguccuggaguaau

SEQ ID NO: 1552785 - RNA, 19 nt, Artificial Sequence
  Description of Artificial Sequence: Synthetic oligonucleotide
  Antisense strand to SEQ ID NO: 1552784
auuacuccaggacuccucg

SEQ ID NO: 1552786 - RNA, 19 nt, Artificial Sequence
  Description of Artificial Sequence: Synthetic oligonucleotide
  Sense strand starting at position 2854 of SEQ ID NO: 1245307
cagugaauuucugucaguu

SEQ ID NO: 1552787 - RNA, 19 nt, Artificial Sequence
  Description of Artificial Sequence: Synthetic oligonucleotide
  Antisense strand to SEQ ID NO: 1552786
aacugacagaaauucacug

SEQ ID NO: 1552788 - RNA, 19 nt, Artificial Sequence
  Description of Artificial Sequence: Synthetic oligonucleotide
  Sense strand starting at position 2856 of SEQ ID NO: 1245307
gugaauuucugucaguuga

SEQ ID NO: 1552789 - RNA, 19 nt, Artificial Sequence
  Description of Artificial Sequence: Synthetic oligonucleotide
  Antisense strand to SEQ ID NO: 1552788
ucaacugacagaaauucac

SEQ ID NO: 1552790 - RNA, 19 nt, Artificial Sequence
  Description of Artificial Sequence: Synthetic oligonucleotide
  Sense strand starting at position 3119 of SEQ ID NO: 1245307
ccagacgugagcugugaua

SEQ ID NO: 1552791 - RNA, 19 nt, Artificial Sequence
  Description of Artificial Sequence: Synthetic oligonucleotide
  Antisense strand to SEQ ID NO: 1552790
uaucacagcucacgucugg

SEQ ID NO: 1552792 - RNA, 19 nt, Artificial Sequence
  Description of Artificial Sequence: Synthetic oligonucleotide
  Sense strand starting at position 3280 of SEQ ID NO: 1245307
ucaagagaauuggacacuu

SEQ ID NO: 1552793 - RNA, 19 nt, Artificial Sequence
  Description of Artificial Sequence: Synthetic oligonucleotide
  Antisense strand to SEQ ID NO: 1552792
aaguguccaauucucuuga

SEQ ID NO: 1552794 - RNA, 19 nt, Artificial Sequence
  Description of Artificial Sequence: Synthetic oligonucleotide
  Sense strand starting at position 3524 of SEQ ID NO: 1245307
ucgggaaggucugcaaaug

SEQ ID NO: 1552795 - RNA, 19 nt, Artificial Sequence
  Description of Artificial Sequence: Synthetic oligonucleotide
  Antisense strand to SEQ ID NO: 1552794
cauuugcagaccuucccga

SEQ ID NO: 1552796 - RNA, 19 nt, Artificial Sequence
  Description of Artificial Sequence: Synthetic oligonucleotide
  Sense strand starting at position 3536 of SEQ ID NO: 1245307
gcaaaugguuccgcucaaa

SEQ ID NO: 1552797 - RNA, 19 nt, Artificial Sequence
  Description of Artificial Sequence: Synthetic oligonucleotide
  Antisense strand to SEQ ID NO: 1552796
uuugagcggaaccauuugc

SEQ ID NO: 1552798 - RNA, 19 nt, Artificial Sequence
  Description of Artificial Sequence: Synthetic oligonucleotide
  Sense strand starting at position 3539 of SEQ ID NO: 1245307
aaugguuccgcucaaagaa

SEQ ID NO: 1552799 - RNA, 19 nt, Artificial Sequence
  Description of Artificial Sequence: Synthetic oligonucleotide
  Antisense strand to SEQ ID NO: 1552798
uucuuugagcggaaccauu

SEQ ID NO: 1552800 - RNA, 19 nt, Artificial Sequence
  Description of Artificial Sequence: Synthetic oligonucleotide
  Sense strand starting at position 3581 of SEQ ID NO: 1245307
cucggauucugagaggacu

SEQ ID NO: 1552801 - RNA, 19 nt, Artificial Sequence
  Description of Artificial Sequence: Synthetic oligonucleotide
  Antisense strand to SEQ ID NO: 1552800
aguccucucagaauccgag

SEQ ID NO: 1552802 - RNA, 19 nt, Artificial Sequence
  Description of Artificial Sequence: Synthetic oligonucleotide
  Sense strand starting at position 3640 of SEQ ID NO: 1245307
gaggaaugauuuggaggua

SEQ ID NO: 1552803 - RNA, 19 nt, Artificial Sequence
  Description of Artificial Sequence: Synthetic oligonucleotide
  Antisense strand to SEQ ID NO: 1552802
uaccuccaaaucauuccuc

SEQ ID NO: 1552804 - RNA, 19 nt, Artificial Sequence
  Description of Artificial Sequence: Synthetic oligonucleotide
  Sense strand starting at position 3731 of SEQ ID NO: 1245307
acagaacuucuucgucaag

SEQ ID NO: 1552805 - RNA, 19 nt, Artificial Sequence
  Description of Artificial Sequence: Synthetic oligonucleotide
  Antisense strand to SEQ ID NO: 1552804
cuugacgaagaaguucugu

SEQ ID NO: 1552806 - RNA, 19 nt, Artificial Sequence
  Description of Artificial Sequence: Synthetic oligonucleotide
  Sense strand starting at position 3732 of SEQ ID NO: 1245307
cagaacuucuucgucaagu

SEQ ID NO: 1552807 - RNA, 19 nt, Artificial Sequence
  Description of Artificial Sequence: Synthetic oligonucleotide
  Antisense strand to SEQ ID NO: 1552806
acuugacgaagaaguucug

SEQ ID NO: 1552808 - RNA, 19 nt, Artificial Sequence
  Description of Artificial Sequence: Synthetic oligonucleotide
  Sense strand starting at position 3733 of SEQ ID NO: 1245307
agaacuucuucgucaaguu

SEQ ID NO: 1552809 - RNA, 19 nt, Artificial Sequence
  Description of Artificial Sequence: Synthetic oligonucleotide
  Antisense strand to SEQ ID NO: 1552808
aacuugacgaagaaguucu

SEQ ID NO: 1552810 - RNA, 19 nt, Artificial Sequence
  Description of Artificial Sequence: Synthetic oligonucleotide
  Sense strand starting at position 3734 of SEQ ID NO: 1245307
gaacuucuucgucaaguuu

SEQ ID NO: 1552811 - RNA, 19 nt, Artificial Sequence
  Description of Artificial Sequence: Synthetic oligonucleotide
  Antisense strand to SEQ ID NO: 1552810
aaacuugacgaagaaguuc

SEQ ID NO: 1552812 - RNA, 19 nt, Artificial Sequence
  Description of Artificial Sequence: Synthetic oligonucleotide
  Sense strand starting at position 3769 of SEQ ID NO: 1245307
agugaaguggagugaaaga

SEQ ID NO: 1552813 - RNA, 19 nt, Artificial Sequence
  Description of Artificial Sequence: Synthetic oligonucleotide
  Antisense strand to SEQ ID NO: 1552812
ucuuucacuccacuucacu

SEQ ID NO: 1552814 - RNA, 19 nt, Artificial Sequence
  Description of Artificial Sequence: Synthetic oligonucleotide
  Sense strand starting at position 3924 of SEQ ID NO: 1245307
gaauguucugacuggcuac

SEQ ID NO: 1552815 - RNA, 19 nt, Artificial Sequence
  Description of Artificial Sequence: Synthetic oligonucleotide
  Antisense strand to SEQ ID NO: 1552814
guagccagucagaacauuc

SEQ ID NO: 1552816 - RNA, 19 nt, Artificial Sequence
  Description of Artificial Sequence: Synthetic oligonucleotide
  Sense strand starting at position 3927 of SEQ ID NO: 1245307
uguucugacuggcuacaaa

SEQ ID NO: 1552817 - RNA, 19 nt, Artificial Sequence
  Description of Artificial Sequence: Synthetic oligonucleotide
  Antisense strand to SEQ ID NO: 1552816
uuuguagccagucagaaca

SEQ ID NO: 1552818 - RNA, 19 nt, Artificial Sequence
  Description of Artificial Sequence: Synthetic oligonucleotide
  Sense strand starting at position 115 of SEQ ID NO: 1245308
ggagaaaucgugugccaag

SEQ ID NO: 1552819 - RNA, 19 nt, Artificial Sequence
  Description of Artificial Sequence: Synthetic oligonucleotide
  Antisense strand to SEQ ID NO: 1552818
cuuggcacacgauuucucc

SEQ ID NO: 1552820 - RNA, 19 nt, Artificial Sequence
  Description of Artificial Sequence: Synthetic oligonucleotide
  Sense strand starting at position 332 of SEQ ID NO: 1245308
cugggaaucccucgucaga

SEQ ID NO: 1552821 - RNA, 19 nt, Artificial Sequence
  Description of Artificial Sequence: Synthetic oligonucleotide
  Antisense strand to SEQ ID NO: 1552820
ucugacgagggauucccag

SEQ ID NO: 1552822 - RNA, 19 nt, Artificial Sequence
  Description of Artificial Sequence: Synthetic oligonucleotide
  Sense strand starting at position 376 of SEQ ID NO: 1245308
ggaguuuaaggaugguaga

SEQ ID NO: 1552823 - RNA, 19 nt, Artificial Sequence
  Description of Artificial Sequence: Synthetic oligonucleotide
  Antisense strand to SEQ ID NO: 1552822
ucuaccauccuuaaacucc

SEQ ID NO: 1552824 - RNA, 19 nt, Artificial Sequence
  Description of Artificial Sequence: Synthetic oligonucleotide
  Sense strand starting at position 377 of SEQ ID NO: 1245308
gaguuuaaggaugguagaa

SEQ ID NO: 1552825 - RNA, 19 nt, Artificial Sequence
  Description of Artificial Sequence: Synthetic oligonucleotide
  Antisense strand to SEQ ID NO: 1552824
uucuaccauccuuaaacuc

SEQ ID NO: 1552826 - RNA, 19 nt, Artificial Sequence
  Description of Artificial Sequence: Synthetic oligonucleotide
  Sense strand starting at position 422 of SEQ ID NO: 1245308
ggagugaccugggauggua

SEQ ID NO: 1552827 - RNA, 19 nt, Artificial Sequence
  Description of Artificial Sequence: Synthetic oligonucleotide
  Antisense strand to SEQ ID NO: 1552826
uaccaucccaggucacucc

SEQ ID NO: 1552828 - RNA, 19 nt, Artificial Sequence
  Description of Artificial Sequence: Synthetic oligonucleotide
  Sense strand starting at position 564 of SEQ ID NO: 1245308
gguccaguguugaagaugu

SEQ ID NO: 1552829 - RNA, 19 nt, Artificial Sequence
  Description of Artificial Sequence: Synthetic oligonucleotide
  Antisense strand to SEQ ID NO: 1552828
acaucuucaacacuggacc

SEQ ID NO: 1552830 - RNA, 19 nt, Artificial Sequence
  Description of Artificial Sequence: Synthetic oligonucleotide
  Sense strand starting at position 658 of SEQ ID NO: 1245308
augcuuugcacgugaagau

SEQ ID NO: 1552831 - RNA, 19 nt, Artificial Sequence
  Description of Artificial Sequence: Synthetic oligonucleotide
  Antisense strand to SEQ ID NO: 1552830
aucuucacgugcaaagcau

SEQ ID NO: 1552832 - RNA, 19 nt, Artificial Sequence
  Description of Artificial Sequence: Synthetic oligonucleotide
  Sense strand starting at position 667 of SEQ ID NO: 1245308
acgugaagaugaguuugga

SEQ ID NO: 1552833 - RNA, 19 nt, Artificial Sequence
  Description of Artificial Sequence: Synthetic oligonucleotide
  Antisense strand to SEQ ID NO: 1552832
uccaaacucaucuucacgu

SEQ ID NO: 1552834 - RNA, 19 nt, Artificial Sequence
  Description of Artificial Sequence: Synthetic oligonucleotide
  Sense strand starting at position 731 of SEQ ID NO: 1245308
ggugccaaaucggcagaua

SEQ ID NO: 1552835 - RNA, 19 nt, Artificial Sequence
  Description of Artificial Sequence: Synthetic oligonucleotide
  Antisense strand to SEQ ID NO: 1552834
uaucugccgauuuggcacc

SEQ ID NO: 1552836 - RNA, 19 nt, Artificial Sequence
  Description of Artificial Sequence: Synthetic oligonucleotide
  Sense strand starting at position 734 of SEQ ID NO: 1245308
gccaaaucggcagauaguu

SEQ ID NO: 1552837 - RNA, 19 nt, Artificial Sequence
  Description of Artificial Sequence: Synthetic oligonucleotide
  Antisense strand to SEQ ID NO: 1552836
aacuaucugccgauuuggc

SEQ ID NO: 1552838 - RNA, 19 nt, Artificial Sequence
  Description of Artificial Sequence: Synthetic oligonucleotide
  Sense strand starting at position 884 of SEQ ID NO: 1245308
gccaguggacuccaacuaa

SEQ ID NO: 1552839 - RNA, 19 nt, Artificial Sequence
  Description of Artificial Sequence: Synthetic oligonucleotide
  Antisense strand to SEQ ID NO: 1552838
uuaguuggaguccacuggc

SEQ ID NO: 1552840 - RNA, 19 nt, Artificial Sequence
  Description of Artificial Sequence: Synthetic oligonucleotide
  Sense strand starting at position 911 of SEQ ID NO: 1245308
gggaaagguguggauaguu

SEQ ID NO: 1552841 - RNA, 19 nt, Artificial Sequence
  Description of Artificial Sequence: Synthetic oligonucleotide
  Antisense strand to SEQ ID NO: 1552840
aacuauccacaccuuuccc

SEQ ID NO: 1552842 - RNA, 19 nt, Artificial Sequence
  Description of Artificial Sequence: Synthetic oligonucleotide
  Sense strand starting at position 962 of SEQ ID NO: 1245308
gggaaagguaucugcugua

SEQ ID NO: 1552843 - RNA, 19 nt, Artificial Sequence
  Description of Artificial Sequence: Synthetic oligonucleotide
  Antisense strand to SEQ ID NO: 1552842
uacagcagauaccuuuccc

SEQ ID NO: 1552844 - RNA, 19 nt, Artificial Sequence
  Description of Artificial Sequence: Synthetic oligonucleotide
  Sense strand starting at position 967 of SEQ ID NO: 1245308
agguaucugcuguagaauu

SEQ ID NO: 1552845 - RNA, 19 nt, Artificial Sequence
  Description of Artificial Sequence: Synthetic oligonucleotide
  Antisense strand to SEQ ID NO: 1552844
aauucuacagcagauaccu

SEQ ID NO: 1552846 - RNA, 19 nt, Artificial Sequence
  Description of Artificial Sequence: Synthetic oligonucleotide
  Sense strand starting at position 975 of SEQ ID NO: 1245308
gcuguagaauuccagaaua

SEQ ID NO: 1552847 - RNA, 19 nt, Artificial Sequence
  Description of Artificial Sequence: Synthetic oligonucleotide
  Antisense strand to SEQ ID NO: 1552846
uauucuggaauucuacagc

SEQ ID NO: 1552848 - RNA, 19 nt, Artificial Sequence
  Description of Artificial Sequence: Synthetic oligonucleotide
  Sense strand starting at position 1008 of SEQ ID NO: 1245308
aggagaguuucugcaggga

SEQ ID NO: 1552849 - RNA, 19 nt, Artificial Sequence
  Description of Artificial Sequence: Synthetic oligonucleotide
  Antisense strand to SEQ ID NO: 1552848
ucccugcagaaacucuccu

SEQ ID NO: 1552850 - RNA, 19 nt, Artificial Sequence
  Description of Artificial Sequence: Synthetic oligonucleotide
  Sense strand starting at position 1011 of SEQ ID NO: 1245308
agaguuucugcagggauaa

SEQ ID NO: 1552851 - RNA, 19 nt, Artificial Sequence
  Description of Artificial Sequence: Synthetic oligonucleotide
  Antisense strand to SEQ ID NO: 1552850
uuaucccugcagaaacucu

SEQ ID NO: 1552852 - RNA, 19 nt, Artificial Sequence
  Description of Artificial Sequence: Synthetic oligonucleotide
  Sense strand starting at position 1012 of SEQ ID NO: 1245308
gaguuucugcagggauaaa

SEQ ID NO: 1552853 - RNA, 19 nt, Artificial Sequence
  Description of Artificial Sequence: Synthetic oligonucleotide
  Antisense strand to SEQ ID NO: 1552852
uuuaucccugcagaaacuc

SEQ ID NO: 1552854 - RNA, 19 nt, Artificial Sequence
  Description of Artificial Sequence: Synthetic oligonucleotide
  Sense strand starting at position 1057 of SEQ ID NO: 1245308
uuagaugucaaccgugaga

SEQ ID NO: 1552855 - RNA, 19 nt, Artificial Sequence
  Description of Artificial Sequence: Synthetic oligonucleotide
  Antisense strand to SEQ ID NO: 1552854
ucucacgguugacaucuaa

SEQ ID NO: 1552856 - RNA, 19 nt, Artificial Sequence
  Description of Artificial Sequence: Synthetic oligonucleotide
  Sense strand starting at position 1059 of SEQ ID NO: 1245308
agaugucaaccgugagauu

SEQ ID NO: 1552857 - RNA, 19 nt, Artificial Sequence
  Description of Artificial Sequence: Synthetic oligonucleotide
  Antisense strand to SEQ ID NO: 1552856
aaucucacgguugacaucu

SEQ ID NO: 1552858 - RNA, 19 nt, Artificial Sequence
  Description of Artificial Sequence: Synthetic oligonucleotide
  Sense strand starting at position 1060 of SEQ ID NO: 1245308
gaugucaaccgugagauua

SEQ ID NO: 1552859 - RNA, 19 nt, Artificial Sequence
  Description of Artificial Sequence: Synthetic oligonucleotide
  Antisense strand to SEQ ID NO: 1552858
uaaucucacgguugacauc

SEQ ID NO: 1552860 - RNA, 19 nt, Artificial Sequence
  Description of Artificial Sequence: Synthetic oligonucleotide
  Sense strand starting at position 1068 of SEQ ID NO: 1245308
ccgugagauuaucaggaca

SEQ ID NO: 1552861 - RNA, 19 nt, Artificial Sequence
  Description of Artificial Sequence: Synthetic oligonucleotide
  Antisense strand to SEQ ID NO: 1552860
uguccugauaaucucacgg

SEQ ID NO: 1552862 - RNA, 19 nt, Artificial Sequence
  Description of Artificial Sequence: Synthetic oligonucleotide
  Sense strand starting at position 1098 of SEQ ID NO: 1245308
acggaaacgaaucggaaau

SEQ ID NO: 1552863 - RNA, 19 nt, Artificial Sequence
  Description of Artificial Sequence: Synthetic oligonucleotide
  Antisense strand to SEQ ID NO: 1552862
auuuccgauucguuuccgu

SEQ ID NO: 1552864 - RNA, 19 nt, Artificial Sequence
  Description of Artificial Sequence: Synthetic oligonucleotide
  Sense strand starting at position 1110 of SEQ ID NO: 1245308
cggaaauccuucccacaac

SEQ ID NO: 1552865 - RNA, 19 nt, Artificial Sequence
  Description of Artificial Sequence: Synthetic oligonucleotide
  Antisense strand to SEQ ID NO: 1552864
guugugggaaggauuuccg

SEQ ID NO: 1552866 - RNA, 19 nt, Artificial Sequence
  Description of Artificial Sequence: Synthetic oligonucleotide
  Sense strand starting at position 1383 of SEQ ID NO: 1245308
gacaguauuucggcaguua

SEQ ID NO: 1552867 - RNA, 19 nt, Artificial Sequence
  Description of Artificial Sequence: Synthetic oligonucleotide
  Antisense strand to SEQ ID NO: 1552866
uaacugccgaaauacuguc

SEQ ID NO: 1552868 - RNA, 19 nt, Artificial Sequence
  Description of Artificial Sequence: Synthetic oligonucleotide
  Sense strand starting at position 1421 of SEQ ID NO: 1245308
gcaugcucuaccgaucaga

SEQ ID NO: 1552869 - RNA, 19 nt, Artificial Sequence
  Description of Artificial Sequence: Synthetic oligonucleotide
  Antisense strand to SEQ ID NO: 1552868
ucugaucgguagagcaugc

SEQ ID NO: 1552870 - RNA, 19 nt, Artificial Sequence
  Description of Artificial Sequence: Synthetic oligonucleotide
  Sense strand starting at position 1424 of SEQ ID NO: 1245308
ugcucuaccgaucagaaau

SEQ ID NO: 1552871 - RNA, 19 nt, Artificial Sequence
  Description of Artificial Sequence: Synthetic oligonucleotide
  Antisense strand to SEQ ID NO: 1552870
auuucugaucgguagagca

SEQ ID NO: 1552872 - RNA, 19 nt, Artificial Sequence
  Description of Artificial Sequence: Synthetic oligonucleotide
  Sense strand starting at position 1539 of SEQ ID NO: 1245308
ugacuuugucccugcggaa

SEQ ID NO: 1552873 - RNA, 19 nt, Artificial Sequence
  Description of Artificial Sequence: Synthetic oligonucleotide
  Antisense strand to SEQ ID NO: 1552872
uuccgcagggacaaaguca

SEQ ID NO: 1552874 - RNA, 19 nt, Artificial Sequence
  Description of Artificial Sequence: Synthetic oligonucleotide
  Sense strand starting at position 1553 of SEQ ID NO: 1245308
cggaacuucucagacagua

SEQ ID NO: 1552875 - RNA, 19 nt, Artificial Sequence
  Description of Artificial Sequence: Synthetic oligonucleotide
  Antisense strand to SEQ ID NO: 1552874
uacugucugagaaguuccg

SEQ ID NO: 1552876 - RNA, 19 nt, Artificial Sequence
  Description of Artificial Sequence: Synthetic oligonucleotide
  Sense strand starting at position 1563 of SEQ ID NO: 1245308
cagacaguauuucggucaa

SEQ ID NO: 1552877 - RNA, 19 nt, Artificial Sequence
  Description of Artificial Sequence: Synthetic oligonucleotide
  Antisense strand to SEQ ID NO: 1552876
uugaccgaaauacugucug

SEQ ID NO: 1552878 - RNA, 19 nt, Artificial Sequence
  Description of Artificial Sequence: Synthetic oligonucleotide
  Sense strand starting at position 1575 of SEQ ID NO: 1245308
cggucaaagagauaauggu

SEQ ID NO: 1552879 - RNA, 19 nt, Artificial Sequence
  Description of Artificial Sequence: Synthetic oligonucleotide
  Antisense strand to SEQ ID NO: 1552878
accauuaucucuuugaccg

SEQ ID NO: 1552880 - RNA, 19 nt, Artificial Sequence
  Description of Artificial Sequence: Synthetic oligonucleotide
  Sense strand starting at position 1628 of SEQ ID NO: 1245308
guucccuuuccggagugau

SEQ ID NO: 1552881 - RNA, 19 nt, Artificial Sequence
  Description of Artificial Sequence: Synthetic oligonucleotide
  Antisense strand to SEQ ID NO: 1552880
aucacuccggaaagggaac

SEQ ID NO: 1552882 - RNA, 19 nt, Artificial Sequence
  Description of Artificial Sequence: Synthetic oligonucleotide
  Sense strand starting at position 1631 of SEQ ID NO: 1245308
cccuuuccggagugauuuc

SEQ ID NO: 1552883 - RNA, 19 nt, Artificial Sequence
  Description of Artificial Sequence: Synthetic oligonucleotide
  Antisense strand to SEQ ID NO: 1552882
gaaaucacuccggaaaggg

SEQ ID NO: 1552884 - RNA, 19 nt, Artificial Sequence
  Description of Artificial Sequence: Synthetic oligonucleotide
  Sense strand starting at position 2158 of SEQ ID NO: 1245308
gguagaucagauuaggcga

SEQ ID NO: 1552885 - RNA, 19 nt, Artificial Sequence
  Description of Artificial Sequence: Synthetic oligonucleotide
  Antisense strand to SEQ ID NO: 1552884
ucgccuaaucugaucuacc

SEQ ID NO: 1552886 - RNA, 19 nt, Artificial Sequence
  Description of Artificial Sequence: Synthetic oligonucleotide
  Sense strand starting at position 2807 of SEQ ID NO: 1245308
cgaggaguccuggaguaau

SEQ ID NO: 1552887 - RNA, 19 nt, Artificial Sequence
  Description of Artificial Sequence: Synthetic oligonucleotide
  Antisense strand to SEQ ID NO: 1552886
auuacuccaggacuccucg

SEQ ID NO: 1552888 - RNA, 19 nt, Artificial Sequence
  Description of Artificial Sequence: Synthetic oligonucleotide
  Sense strand starting at position 3579 of SEQ ID NO: 1245308
cagugaauuucugucaguu

SEQ ID NO: 1552889 - RNA, 19 nt, Artificial Sequence
  Description of Artificial Sequence: Synthetic oligonucleotide
  Antisense strand to SEQ ID NO: 1552888
aacugacagaaauucacug

SEQ ID NO: 1552890 - RNA, 19 nt, Artificial Sequence
  Description of Artificial Sequence: Synthetic oligonucleotide
  Sense strand starting at position 3581 of SEQ ID NO: 1245308
gugaauuucugucaguuga

SEQ ID NO: 1552891 - RNA, 19 nt, Artificial Sequence
  Description of Artificial Sequence: Synthetic oligonucleotide
  Antisense strand to SEQ ID NO: 1552890
ucaacugacagaaauucac

SEQ ID NO: 1552892 - RNA, 19 nt, Artificial Sequence
  Description of Artificial Sequence: Synthetic oligonucleotide
  Sense strand starting at position 3774 of SEQ ID NO: 1245308
cgcguauuccugggcucaa

SEQ ID NO: 1552893 - RNA, 19 nt, Artificial Sequence
  Description of Artificial Sequence: Synthetic oligonucleotide
  Antisense strand to SEQ ID NO: 1552892
uugagcccaggaauacgcg

SEQ ID NO: 1552894 - RNA, 19 nt, Artificial Sequence
  Description of Artificial Sequence: Synthetic oligonucleotide
  Sense strand starting at position 3775 of SEQ ID NO: 1245308
gcguauuccugggcucaac

SEQ ID NO: 1552895 - RNA, 19 nt, Artificial Sequence
  Description of Artificial Sequence: Synthetic oligonucleotide
  Antisense strand to SEQ ID NO: 1552894
guugagcccaggaauacgc

SEQ ID NO: 1552896 - RNA, 19 nt, Artificial Sequence
  Description of Artificial Sequence: Synthetic oligonucleotide
  Sense strand starting at position 3844 of SEQ ID NO: 1245308
ccagacgugagcugugaua

SEQ ID NO: 1552897 - RNA, 19 nt, Artificial Sequence
  Description of Artificial Sequence: Synthetic oligonucleotide
  Antisense strand to SEQ ID NO: 1552896
uaucacagcucacgucugg

SEQ ID NO: 1552898 - RNA, 19 nt, Artificial Sequence
  Description of Artificial Sequence: Synthetic oligonucleotide
  Sense strand starting at position 136 of SEQ ID NO: 1245309
ccagaaagauggcuaaguu

SEQ ID NO: 1552899 - RNA, 19 nt, Artificial Sequence
  Description of Artificial Sequence: Synthetic oligonucleotide
  Antisense strand to SEQ ID NO: 1552898
aacuuagccaucuuucugg

SEQ ID NO: 1552900 - RNA, 19 nt, Artificial Sequence
  Description of Artificial Sequence: Synthetic oligonucleotide
  Sense strand starting at position 636 of SEQ ID NO: 1245309
gggacucugucuccaaaga

SEQ ID NO: 1552901 - RNA, 19 nt, Artificial Sequence
  Description of Artificial Sequence: Synthetic oligonucleotide
  Antisense strand to SEQ ID NO: 1552900
ucuuuggagacagaguccc

SEQ ID NO: 1552902 - RNA, 19 nt, Artificial Sequence
  Description of Artificial Sequence: Synthetic oligonucleotide
  Sense strand starting at position 697 of SEQ ID NO: 1245309
agccuuaugugaguuacua

SEQ ID NO: 1552903 - RNA, 19 nt, Artificial Sequence
  Description of Artificial Sequence: Synthetic oligonucleotide
  Antisense strand to SEQ ID NO: 1552902
uaguaacucacauaaggcu

SEQ ID NO: 1552904 - RNA, 19 nt, Artificial Sequence
  Description of Artificial Sequence: Synthetic oligonucleotide
  Sense strand starting at position 701 of SEQ ID NO: 1245309
uuaugugaguuacuaaagu

SEQ ID NO: 1552905 - RNA, 19 nt, Artificial Sequence
  Description of Artificial Sequence: Synthetic oligonucleotide
  Antisense strand to SEQ ID NO: 1552904
acuuuaguaacucacauaa

SEQ ID NO: 1552906 - RNA, 19 nt, Artificial Sequence
  Description of Artificial Sequence: Synthetic oligonucleotide
  Sense strand starting at position 823 of SEQ ID NO: 1245309
gucuaaggugugggaguuu

SEQ ID NO: 1552907 - RNA, 19 nt, Artificial Sequence
  Description of Artificial Sequence: Synthetic oligonucleotide
  Antisense strand to SEQ ID NO: 1552906
aaacucccacaccuuagac

SEQ ID NO: 1552908 - RNA, 19 nt, Artificial Sequence
  Description of Artificial Sequence: Synthetic oligonucleotide
  Sense strand starting at position 834 of SEQ ID NO: 1245309
gggaguuuaucauccaguu

SEQ ID NO: 1552909 - RNA, 19 nt, Artificial Sequence
  Description of Artificial Sequence: Synthetic oligonucleotide
  Antisense strand to SEQ ID NO: 1552908
aacuggaugauaaacuccc

SEQ ID NO: 1552910 - RNA, 19 nt, Artificial Sequence
  Description of Artificial Sequence: Synthetic oligonucleotide
  Sense strand starting at position 1007 of SEQ ID NO: 1245309
gaggauugccuuugccauu

SEQ ID NO: 1552911 - RNA, 19 nt, Artificial Sequence
  Description of Artificial Sequence: Synthetic oligonucleotide
  Antisense strand to SEQ ID NO: 1552910
aauggcaaaggcaauccuc

SEQ ID NO: 1552912 - RNA, 19 nt, Artificial Sequence
  Description of Artificial Sequence: Synthetic oligonucleotide
  Sense strand starting at position 1008 of SEQ ID NO: 1245309
aggauugccuuugccauua

SEQ ID NO: 1552913 - RNA, 19 nt, Artificial Sequence
  Description of Artificial Sequence: Synthetic oligonucleotide
  Antisense strand to SEQ ID NO: 1552912
uaauggcaaaggcaauccu

SEQ ID NO: 1552914 - RNA, 19 nt, Artificial Sequence
  Description of Artificial Sequence: Synthetic oligonucleotide
  Sense strand starting at position 1042 of SEQ ID NO: 1245309
aaaugcaucgagugucaga

SEQ ID NO: 1552915 - RNA, 19 nt, Artificial Sequence
  Description of Artificial Sequence: Synthetic oligonucleotide
  Antisense strand to SEQ ID NO: 1552914
ucugacacucgaugcauuu

SEQ ID NO: 1552916 - RNA, 19 nt, Artificial Sequence
  Description of Artificial Sequence: Synthetic oligonucleotide
  Sense strand starting at position 1053 of SEQ ID NO: 1245309
gugucagaaucacccaaga

SEQ ID NO: 1552917 - RNA, 19 nt, Artificial Sequence
  Description of Artificial Sequence: Synthetic oligonucleotide
  Antisense strand to SEQ ID NO: 1552916
ucuugggugauucugacac

SEQ ID NO: 1552918 - RNA, 19 nt, Artificial Sequence
  Description of Artificial Sequence: Synthetic oligonucleotide
  Sense strand starting at position 1084 of SEQ ID NO: 1245309
ugcagauuccuaggacuug

SEQ ID NO: 1552919 - RNA, 19 nt, Artificial Sequence
  Description of Artificial Sequence: Synthetic oligonucleotide
  Antisense strand to SEQ ID NO: 1552918
caaguccuaggaaucugca

SEQ ID NO: 1552920 - RNA, 19 nt, Artificial Sequence
  Description of Artificial Sequence: Synthetic oligonucleotide
  Sense strand starting at position 1096 of SEQ ID NO: 1245309
ggacuugcugccugauacu

SEQ ID NO: 1552921 - RNA, 19 nt, Artificial Sequence
  Description of Artificial Sequence: Synthetic oligonucleotide
  Antisense strand to SEQ ID NO: 1552920
aguaucaggcagcaagucc

SEQ ID NO: 1552922 - RNA, 19 nt, Artificial Sequence
  Description of Artificial Sequence: Synthetic oligonucleotide
  Sense strand starting at position 1102 of SEQ ID NO: 1245309
gcugccugauacucugauu

SEQ ID NO: 1552923 - RNA, 19 nt, Artificial Sequence
  Description of Artificial Sequence: Synthetic oligonucleotide
  Antisense strand to SEQ ID NO: 1552922
aaucagaguaucaggcagc

SEQ ID NO: 1552924 - RNA, 19 nt, Artificial Sequence
  Description of Artificial Sequence: Synthetic oligonucleotide
  Sense strand starting at position 1244 of SEQ ID NO: 1245309
cgagcuaagugacugauga

SEQ ID NO: 1552925 - RNA, 19 nt, Artificial Sequence
  Description of Artificial Sequence: Synthetic oligonucleotide
  Antisense strand to SEQ ID NO: 1552924
ucaucagucacuuagcucg

SEQ ID NO: 1552926 - RNA, 19 nt, Artificial Sequence
  Description of Artificial Sequence: Synthetic oligonucleotide
  Sense strand starting at position 1254 of SEQ ID NO: 1245309
gacugaugacauuguugcu

SEQ ID NO: 1552927 - RNA, 19 nt, Artificial Sequence
  Description of Artificial Sequence: Synthetic oligonucleotide
  Antisense strand to SEQ ID NO: 1552926
agcaacaaugucaucaguc

SEQ ID NO: 1552928 - RNA, 19 nt, Artificial Sequence
  Description of Artificial Sequence: Synthetic oligonucleotide
  Sense strand starting at position 1259 of SEQ ID NO: 1245309
augacauuguugcuuaaac

SEQ ID NO: 1552929 - RNA, 19 nt, Artificial Sequence
  Description of Artificial Sequence: Synthetic oligonucleotide
  Antisense strand to SEQ ID NO: 1552928
guuuaagcaacaaugucau

SEQ ID NO: 1552930 - RNA, 19 nt, Artificial Sequence
  Description of Artificial Sequence: Synthetic oligonucleotide
  Sense strand starting at position 1417 of SEQ ID NO: 1245309
ucaggcugugcccaucaaa

SEQ ID NO: 1552931 - RNA, 19 nt, Artificial Sequence
  Description of Artificial Sequence: Synthetic oligonucleotide
  Antisense strand to SEQ ID NO: 1552930
uuugaugggcacagccuga

SEQ ID NO: 1552932 - RNA, 19 nt, Artificial Sequence
  Description of Artificial Sequence: Synthetic oligonucleotide
  Sense strand starting at position 1504 of SEQ ID NO: 1245309
ggccuauuguccucuggau

SEQ ID NO: 1552933 - RNA, 19 nt, Artificial Sequence
  Description of Artificial Sequence: Synthetic oligonucleotide
  Antisense strand to SEQ ID NO: 1552932
auccagaggacaauaggcc

SEQ ID NO: 1552934 - RNA, 19 nt, Artificial Sequence
  Description of Artificial Sequence: Synthetic oligonucleotide
  Sense strand starting at position 1542 of SEQ ID NO: 1245309
gcaaguagccuuuauauag

SEQ ID NO: 1552935 - RNA, 19 nt, Artificial Sequence
  Description of Artificial Sequence: Synthetic oligonucleotide
  Antisense strand to SEQ ID NO: 1552934
cuauauaaaggcuacuugc

SEQ ID NO: 1552936 - RNA, 19 nt, Artificial Sequence
  Description of Artificial Sequence: Synthetic oligonucleotide
  Sense strand starting at position 2025 of SEQ ID NO: 1245309
cagccugaggucugaucau

SEQ ID NO: 1552937 - RNA, 19 nt, Artificial Sequence
  Description of Artificial Sequence: Synthetic oligonucleotide
  Antisense strand to SEQ ID NO: 1552936
augaucagaccucaggcug

SEQ ID NO: 1552938 - RNA, 19 nt, Artificial Sequence
  Description of Artificial Sequence: Synthetic oligonucleotide
  Sense strand starting at position 2083 of SEQ ID NO: 1245309
gggaaucacugggaugauu

SEQ ID NO: 1552939 - RNA, 19 nt, Artificial Sequence
  Description of Artificial Sequence: Synthetic oligonucleotide
  Antisense strand to SEQ ID NO: 1552938
aaucaucccagugauuccc

SEQ ID NO: 1552940 - RNA, 19 nt, Artificial Sequence
  Description of Artificial Sequence: Synthetic oligonucleotide
  Sense strand starting at position 2181 of SEQ ID NO: 1245309
guugucuuuaugcuguuua

SEQ ID NO: 1552941 - RNA, 19 nt, Artificial Sequence
  Description of Artificial Sequence: Synthetic oligonucleotide
  Antisense strand to SEQ ID NO: 1552940
uaaacagcauaaagacaac

SEQ ID NO: 1552942 - RNA, 19 nt, Artificial Sequence
  Description of Artificial Sequence: Synthetic oligonucleotide
  Sense strand starting at position 2185 of SEQ ID NO: 1245309
ucuuuaugcuguuuauaug

SEQ ID NO: 1552943 - RNA, 19 nt, Artificial Sequence
  Description of Artificial Sequence: Synthetic oligonucleotide
  Antisense strand to SEQ ID NO: 1552942
cauauaaacagcauaaaga

SEQ ID NO: 1552944 - RNA, 19 nt, Artificial Sequence
  Description of Artificial Sequence: Synthetic oligonucleotide
  Sense strand starting at position 2508 of SEQ ID NO: 1245309
ggcagauacacagauguuu

SEQ ID NO: 1552945 - RNA, 19 nt, Artificial Sequence
  Description of Artificial Sequence: Synthetic oligonucleotide
  Antisense strand to SEQ ID NO: 1552944
aaacaucuguguaucugcc

SEQ ID NO: 1552946 - RNA, 19 nt, Artificial Sequence
  Description of Artificial Sequence: Synthetic oligonucleotide
  Sense strand starting at position 2517 of SEQ ID NO: 1245309
acagauguuugcucuuuga

SEQ ID NO: 1552947 - RNA, 19 nt, Artificial Sequence
  Description of Artificial Sequence: Synthetic oligonucleotide
  Antisense strand to SEQ ID NO: 1552946
ucaaagagcaaacaucugu

SEQ ID NO: 1552948 - RNA, 19 nt, Artificial Sequence
  Description of Artificial Sequence: Synthetic oligonucleotide
  Sense strand starting at position 2520 of SEQ ID NO: 1245309
gauguuugcucuuugagca

SEQ ID NO: 1552949 - RNA, 19 nt, Artificial Sequence
  Description of Artificial Sequence: Synthetic oligonucleotide
  Antisense strand to SEQ ID NO: 1552948
ugcucaaagagcaaacauc

SEQ ID NO: 1552950 - RNA, 19 nt, Artificial Sequence
  Description of Artificial Sequence: Synthetic oligonucleotide
  Sense strand starting at position 2552 of SEQ ID NO: 1245309
uggagcaguuucucccuua

SEQ ID NO: 1552951 - RNA, 19 nt, Artificial Sequence
  Description of Artificial Sequence: Synthetic oligonucleotide
  Antisense strand to SEQ ID NO: 1552950
uaagggagaaacugcucca

SEQ ID NO: 1552952 - RNA, 19 nt, Artificial Sequence
  Description of Artificial Sequence: Synthetic oligonucleotide
  Sense strand starting at position 2555 of SEQ ID NO: 1245309
agcaguuucucccuuagac

SEQ ID NO: 1552953 - RNA, 19 nt, Artificial Sequence
  Description of Artificial Sequence: Synthetic oligonucleotide
  Antisense strand to SEQ ID NO: 1552952
gucuaagggagaaacugcu

SEQ ID NO: 1552954 - RNA, 19 nt, Artificial Sequence
  Description of Artificial Sequence: Synthetic oligonucleotide
  Sense strand starting at position 2792 of SEQ ID NO: 1245309
gguucuaugauucggugga

SEQ ID NO: 1552955 - RNA, 19 nt, Artificial Sequence
  Description of Artificial Sequence: Synthetic oligonucleotide
  Antisense strand to SEQ ID NO: 1552954
uccaccgaaucauagaacc

SEQ ID NO: 1552956 - RNA, 19 nt, Artificial Sequence
  Description of Artificial Sequence: Synthetic oligonucleotide
  Sense strand starting at position 2794 of SEQ ID NO: 1245309
uucuaugauucgguggaug

SEQ ID NO: 1552957 - RNA, 19 nt, Artificial Sequence
  Description of Artificial Sequence: Synthetic oligonucleotide
  Antisense strand to SEQ ID NO: 1552956
cauccaccgaaucauagaa

SEQ ID NO: 1552958 - RNA, 19 nt, Artificial Sequence
  Description of Artificial Sequence: Synthetic oligonucleotide
  Sense strand starting at position 2828 of SEQ ID NO: 1245309
uaggaaagcugagcuagaa

SEQ ID NO: 1552959 - RNA, 19 nt, Artificial Sequence
  Description of Artificial Sequence: Synthetic oligonucleotide
  Antisense strand to SEQ ID NO: 1552958
uucuagcucagcuuuccua

SEQ ID NO: 1552960 - RNA, 19 nt, Artificial Sequence
  Description of Artificial Sequence: Synthetic oligonucleotide
  Sense strand starting at position 3065 of SEQ ID NO: 1245309
auuguucucuucuuaaagu

SEQ ID NO: 1552961 - RNA, 19 nt, Artificial Sequence
  Description of Artificial Sequence: Synthetic oligonucleotide
  Antisense strand to SEQ ID NO: 1552960
acuuuaagaagagaacaau

SEQ ID NO: 1552962 - RNA, 19 nt, Artificial Sequence
  Description of Artificial Sequence: Synthetic oligonucleotide
  Sense strand starting at position 3666 of SEQ ID NO: 1245309
augugauucuuaccaccua

SEQ ID NO: 1552963 - RNA, 19 nt, Artificial Sequence
  Description of Artificial Sequence: Synthetic oligonucleotide
  Antisense strand to SEQ ID NO: 1552962
uaggugguaagaaucacau

SEQ ID NO: 1552964 - RNA, 19 nt, Artificial Sequence
  Description of Artificial Sequence: Synthetic oligonucleotide
  Sense strand starting at position 3785 of SEQ ID NO: 1245309
uguguugucaucguuuguu

SEQ ID NO: 1552965 - RNA, 19 nt, Artificial Sequence
  Description of Artificial Sequence: Synthetic oligonucleotide
  Antisense strand to SEQ ID NO: 1552964
aacaaacgaugacaacaca

SEQ ID NO: 1552966 - RNA, 19 nt, Artificial Sequence
  Description of Artificial Sequence: Synthetic oligonucleotide
  Sense strand starting at position 3842 of SEQ ID NO: 1245309
uuuccugggcuauaauuau

SEQ ID NO: 1552967 - RNA, 19 nt, Artificial Sequence
  Description of Artificial Sequence: Synthetic oligonucleotide
  Antisense strand to SEQ ID NO: 1552966
auaauuauagcccaggaaa

SEQ ID NO: 1552968 - RNA, 19 nt, Artificial Sequence
  Description of Artificial Sequence: Synthetic oligonucleotide
  Sense strand starting at position 3863 of SEQ ID NO: 1245309
aggagagaaccauguuucu

SEQ ID NO: 1552969 - RNA, 19 nt, Artificial Sequence
  Description of Artificial Sequence: Synthetic oligonucleotide
  Antisense strand to SEQ ID NO: 1552968
agaaacaugguucucuccu

SEQ ID NO: 1552970 - RNA, 19 nt, Artificial Sequence
  Description of Artificial Sequence: Synthetic oligonucleotide
  Sense strand starting at position 3872 of SEQ ID NO: 1245309
ccauguuucuggucuguau

SEQ ID NO: 1552971 - RNA, 19 nt, Artificial Sequence
  Description of Artificial Sequence: Synthetic oligonucleotide
  Antisense strand to SEQ ID NO: 1552970
auacagaccagaaacaugg

SEQ ID NO: 1552972 - RNA, 19 nt, Artificial Sequence
  Description of Artificial Sequence: Synthetic oligonucleotide
  Sense strand starting at position 3874 of SEQ ID NO: 1245309
auguuucuggucuguauca

SEQ ID NO: 1552973 - RNA, 19 nt, Artificial Sequence
  Description of Artificial Sequence: Synthetic oligonucleotide
  Antisense strand to SEQ ID NO: 1552972
ugauacagaccagaaacau

SEQ ID NO: 1552974 - RNA, 19 nt, Artificial Sequence
  Description of Artificial Sequence: Synthetic oligonucleotide
  Sense strand starting at position 3876 of SEQ ID NO: 1245309
guuucuggucuguaucaca

SEQ ID NO: 1552975 - RNA, 19 nt, Artificial Sequence
  Description of Artificial Sequence: Synthetic oligonucleotide
  Antisense strand to SEQ ID NO: 1552974
ugugauacagaccagaaac

SEQ ID NO: 1552976 - RNA, 19 nt, Artificial Sequence
  Description of Artificial Sequence: Synthetic oligonucleotide
  Sense strand starting at position 3893 of SEQ ID NO: 1245309
caggacuuugugcagacua

SEQ ID NO: 1552977 - RNA, 19 nt, Artificial Sequence
  Description of Artificial Sequence: Synthetic oligonucleotide
  Antisense strand to SEQ ID NO: 1552976
uagucugcacaaaguccug

SEQ ID NO: 1552978 - RNA, 19 nt, Artificial Sequence
  Description of Artificial Sequence: Synthetic oligonucleotide
  Sense strand starting at position 43 of SEQ ID NO: 1245310
acagaugacugcuccaugu

SEQ ID NO: 1552979 - RNA, 19 nt, Artificial Sequence
  Description of Artificial Sequence: Synthetic oligonucleotide
  Antisense strand to SEQ ID NO: 1552978
acauggagcagucaucugu

SEQ ID NO: 1552980 - RNA, 19 nt, Artificial Sequence
  Description of Artificial Sequence: Synthetic oligonucleotide
  Sense strand starting at position 45 of SEQ ID NO: 1245310
agaugacugcuccaugugu

SEQ ID NO: 1552981 - RNA, 19 nt, Artificial Sequence
  Description of Artificial Sequence: Synthetic oligonucleotide
  Antisense strand to SEQ ID NO: 1552980
acacauggagcagucaucu

SEQ ID NO: 1552982 - RNA, 19 nt, Artificial Sequence
  Description of Artificial Sequence: Synthetic oligonucleotide
  Sense strand starting at position 105 of SEQ ID NO: 1245310
guggaagacagauguugau

SEQ ID NO: 1552983 - RNA, 19 nt, Artificial Sequence
  Description of Artificial Sequence: Synthetic oligonucleotide
  Antisense strand to SEQ ID NO: 1552982
aucaacaucugucuuccac

SEQ ID NO: 1552984 - RNA, 19 nt, Artificial Sequence
  Description of Artificial Sequence: Synthetic oligonucleotide
  Sense strand starting at position 394 of SEQ ID NO: 1245310
guagcauaaguguauagua

SEQ ID NO: 1552985 - RNA, 19 nt, Artificial Sequence
  Description of Artificial Sequence: Synthetic oligonucleotide
  Antisense strand to SEQ ID NO: 1552984
uacuauacacuuaugcuac

SEQ ID NO: 1552986 - RNA, 19 nt, Artificial Sequence
  Description of Artificial Sequence: Synthetic oligonucleotide
  Sense strand starting at position 396 of SEQ ID NO: 1245310
agcauaaguguauaguacu

SEQ ID NO: 1552987 - RNA, 19 nt, Artificial Sequence
  Description of Artificial Sequence: Synthetic oligonucleotide
  Antisense strand to SEQ ID NO: 1552986
aguacuauacacuuaugcu

SEQ ID NO: 1552988 - RNA, 19 nt, Artificial Sequence
  Description of Artificial Sequence: Synthetic oligonucleotide
  Sense strand starting at position 590 of SEQ ID NO: 1245310
guuacacuugccuaaggua

SEQ ID NO: 1552989 - RNA, 19 nt, Artificial Sequence
  Description of Artificial Sequence: Synthetic oligonucleotide
  Antisense strand to SEQ ID NO: 1552988
uaccuuaggcaaguguaac

SEQ ID NO: 1552990 - RNA, 19 nt, Artificial Sequence
  Description of Artificial Sequence: Synthetic oligonucleotide
  Sense strand starting at position 655 of SEQ ID NO: 1245310
ggcuauauagccuagauau

SEQ ID NO: 1552991 - RNA, 19 nt, Artificial Sequence
  Description of Artificial Sequence: Synthetic oligonucleotide
  Antisense strand to SEQ ID NO: 1552990
auaucuaggcuauauagcc

SEQ ID NO: 1552992 - RNA, 19 nt, Artificial Sequence
  Description of Artificial Sequence: Synthetic oligonucleotide
  Sense strand starting at position 699 of SEQ ID NO: 1245310
guguacauuuacguacauu

SEQ ID NO: 1552993 - RNA, 19 nt, Artificial Sequence
  Description of Artificial Sequence: Synthetic oligonucleotide
  Antisense strand to SEQ ID NO: 1552992
aauguacguaaauguacac

SEQ ID NO: 1552994 - RNA, 19 nt, Artificial Sequence
  Description of Artificial Sequence: Synthetic oligonucleotide
  Sense strand starting at position 721 of SEQ ID NO: 1245310
ugaugugauguuugcacaa

SEQ ID NO: 1552995 - RNA, 19 nt, Artificial Sequence
  Description of Artificial Sequence: Synthetic oligonucleotide
  Antisense strand to SEQ ID NO: 1552994
uugugcaaacaucacauca

SEQ ID NO: 1552996 - RNA, 19 nt, Artificial Sequence
  Description of Artificial Sequence: Synthetic oligonucleotide
  Sense strand starting at position 792 of SEQ ID NO: 1245310
gcaugacuguaucucuauu

SEQ ID NO: 1552997 - RNA, 19 nt, Artificial Sequence
  Description of Artificial Sequence: Synthetic oligonucleotide
  Antisense strand to SEQ ID NO: 1552996
aauagagauacagucaugc

SEQ ID NO: 1552998 - RNA, 19 nt, Artificial Sequence
  Description of Artificial Sequence: Synthetic oligonucleotide
  Sense strand starting at position 1073 of SEQ ID NO: 1245310
uauacaaagucaguggaau

SEQ ID NO: 1552999 - RNA, 19 nt, Artificial Sequence
  Description of Artificial Sequence: Synthetic oligonucleotide
  Antisense strand to SEQ ID NO: 1552998
auuccacugacuuuguaua

SEQ ID NO: 1553000 - RNA, 19 nt, Artificial Sequence
  Description of Artificial Sequence: Synthetic oligonucleotide
  Sense strand starting at position 1074 of SEQ ID NO: 1245310
auacaaagucaguggaauc

SEQ ID NO: 1553001 - RNA, 19 nt, Artificial Sequence
  Description of Artificial Sequence: Synthetic oligonucleotide
  Antisense strand to SEQ ID NO: 1553000
gauuccacugacuuuguau

SEQ ID NO: 1553002 - RNA, 19 nt, Artificial Sequence
  Description of Artificial Sequence: Synthetic oligonucleotide
  Sense strand starting at position 1270 of SEQ ID NO: 1245310
auccaagaauggucaaugu

SEQ ID NO: 1553003 - RNA, 19 nt, Artificial Sequence
  Description of Artificial Sequence: Synthetic oligonucleotide
  Antisense strand to SEQ ID NO: 1553002
acauugaccauucuuggau

SEQ ID NO: 1553004 - RNA, 19 nt, Artificial Sequence
  Description of Artificial Sequence: Synthetic oligonucleotide
  Sense strand starting at position 1274 of SEQ ID NO: 1245310
aagaauggucaaugucaag

SEQ ID NO: 1553005 - RNA, 19 nt, Artificial Sequence
  Description of Artificial Sequence: Synthetic oligonucleotide
  Antisense strand to SEQ ID NO: 1553004
cuugacauugaccauucuu

SEQ ID NO: 1553006 - RNA, 19 nt, Artificial Sequence
  Description of Artificial Sequence: Synthetic oligonucleotide
  Sense strand starting at position 1296 of SEQ ID NO: 1245310
aucacaugucuuugaaggu

SEQ ID NO: 1553007 - RNA, 19 nt, Artificial Sequence
  Description of Artificial Sequence: Synthetic oligonucleotide
  Antisense strand to SEQ ID NO: 1553006
accuucaaagacaugugau

SEQ ID NO: 1553008 - RNA, 19 nt, Artificial Sequence
  Description of Artificial Sequence: Synthetic oligonucleotide
  Sense strand starting at position 1435 of SEQ ID NO: 1245310
aggauaagccuggguccuu

SEQ ID NO: 1553009 - RNA, 19 nt, Artificial Sequence
  Description of Artificial Sequence: Synthetic oligonucleotide
  Antisense strand to SEQ ID NO: 1553008
aaggacccaggcuuauccu

SEQ ID NO: 1553010 - RNA, 19 nt, Artificial Sequence
  Description of Artificial Sequence: Synthetic oligonucleotide
  Sense strand starting at position 1436 of SEQ ID NO: 1245310
ggauaagccuggguccuuu

SEQ ID NO: 1553011 - RNA, 19 nt, Artificial Sequence
  Description of Artificial Sequence: Synthetic oligonucleotide
  Antisense strand to SEQ ID NO: 1553010
aaaggacccaggcuuaucc

SEQ ID NO: 1553012 - RNA, 19 nt, Artificial Sequence
  Description of Artificial Sequence: Synthetic oligonucleotide
  Sense strand starting at position 1445 of SEQ ID NO: 1245310
uggguccuuuccuuaagga

SEQ ID NO: 1553013 - RNA, 19 nt, Artificial Sequence
  Description of Artificial Sequence: Synthetic oligonucleotide
  Antisense strand to SEQ ID NO: 1553012
uccuuaaggaaaggaccca

SEQ ID NO: 1553014 - RNA, 19 nt, Artificial Sequence
  Description of Artificial Sequence: Synthetic oligonucleotide
  Sense strand starting at position 1446 of SEQ ID NO: 1245310
ggguccuuuccuuaaggau

SEQ ID NO: 1553015 - RNA, 19 nt, Artificial Sequence
  Description of Artificial Sequence: Synthetic oligonucleotide
  Antisense strand to SEQ ID NO: 1553014
auccuuaaggaaaggaccc

SEQ ID NO: 1553016 - RNA, 19 nt, Artificial Sequence
  Description of Artificial Sequence: Synthetic oligonucleotide
  Sense strand starting at position 2127 of SEQ ID NO: 1245310
gcucuuuccgcgcuaacca

SEQ ID NO: 1553017 - RNA, 19 nt, Artificial Sequence
  Description of Artificial Sequence: Synthetic oligonucleotide
  Antisense strand to SEQ ID NO: 1553016
ugguuagcgcggaaagagc

SEQ ID NO: 1553018 - RNA, 19 nt, Artificial Sequence
  Description of Artificial Sequence: Synthetic oligonucleotide
  Sense strand starting at position 2211 of SEQ ID NO: 1245310
aaguccuggucuuugacau

SEQ ID NO: 1553019 - RNA, 19 nt, Artificial Sequence
  Description of Artificial Sequence: Synthetic oligonucleotide
  Antisense strand to SEQ ID NO: 1553018
augucaaagaccaggacuu

SEQ ID NO: 1553020 - RNA, 19 nt, Artificial Sequence
  Description of Artificial Sequence: Synthetic oligonucleotide
  Sense strand starting at position 2212 of SEQ ID NO: 1245310
aguccuggucuuugacauu

SEQ ID NO: 1553021 - RNA, 19 nt, Artificial Sequence
  Description of Artificial Sequence: Synthetic oligonucleotide
  Antisense strand to SEQ ID NO: 1553020
aaugucaaagaccaggacu

SEQ ID NO: 1553022 - RNA, 19 nt, Artificial Sequence
  Description of Artificial Sequence: Synthetic oligonucleotide
  Sense strand starting at position 2267 of SEQ ID NO: 1245310
agucucagugccuagagua

SEQ ID NO: 1553023 - RNA, 19 nt, Artificial Sequence
  Description of Artificial Sequence: Synthetic oligonucleotide
  Antisense strand to SEQ ID NO: 1553022
uacucuaggcacugagacu

SEQ ID NO: 1553024 - RNA, 19 nt, Artificial Sequence
  Description of Artificial Sequence: Synthetic oligonucleotide
  Sense strand starting at position 2322 of SEQ ID NO: 1245310
aggcacaagccuuaguauu

SEQ ID NO: 1553025 - RNA, 19 nt, Artificial Sequence
  Description of Artificial Sequence: Synthetic oligonucleotide
  Antisense strand to SEQ ID NO: 1553024
aauacuaaggcuugugccu

SEQ ID NO: 1553026 - RNA, 19 nt, Artificial Sequence
  Description of Artificial Sequence: Synthetic oligonucleotide
  Sense strand starting at position 2324 of SEQ ID NO: 1245310
gcacaagccuuaguauuua

SEQ ID NO: 1553027 - RNA, 19 nt, Artificial Sequence
  Description of Artificial Sequence: Synthetic oligonucleotide
  Antisense strand to SEQ ID NO: 1553026
uaaauacuaaggcuugugc

SEQ ID NO: 1553028 - RNA, 19 nt, Artificial Sequence
  Description of Artificial Sequence: Synthetic oligonucleotide
  Sense strand starting at position 2463 of SEQ ID NO: 1245310
gcuuauucucaugaugaac

SEQ ID NO: 1553029 - RNA, 19 nt, Artificial Sequence
  Description of Artificial Sequence: Synthetic oligonucleotide
  Antisense strand to SEQ ID NO: 1553028
guucaucaugagaauaagc

SEQ ID NO: 1553030 - RNA, 19 nt, Artificial Sequence
  Description of Artificial Sequence: Synthetic oligonucleotide
  Sense strand starting at position 2590 of SEQ ID NO: 1245310
acuaucugucuacauguaa

SEQ ID NO: 1553031 - RNA, 19 nt, Artificial Sequence
  Description of Artificial Sequence: Synthetic oligonucleotide
  Antisense strand to SEQ ID NO: 1553030
uuacauguagacagauagu

SEQ ID NO: 1553032 - RNA, 19 nt, Artificial Sequence
  Description of Artificial Sequence: Synthetic oligonucleotide
  Sense strand starting at position 2605 of SEQ ID NO: 1245310
guaagugugcaugugugua

SEQ ID NO: 1553033 - RNA, 19 nt, Artificial Sequence
  Description of Artificial Sequence: Synthetic oligonucleotide
  Antisense strand to SEQ ID NO: 1553032
uacacacaugcacacuuac

SEQ ID NO: 1553034 - RNA, 19 nt, Artificial Sequence
  Description of Artificial Sequence: Synthetic oligonucleotide
  Sense strand starting at position 2618 of SEQ ID NO: 1245310
uguguaaagacguaaauga

SEQ ID NO: 1553035 - RNA, 19 nt, Artificial Sequence
  Description of Artificial Sequence: Synthetic oligonucleotide
  Antisense strand to SEQ ID NO: 1553034
ucauuuacgucuuuacaca

SEQ ID NO: 1553036 - RNA, 19 nt, Artificial Sequence
  Description of Artificial Sequence: Synthetic oligonucleotide
  Sense strand starting at position 2626 of SEQ ID NO: 1245310
gacguaaaugauuaacugu

SEQ ID NO: 1553037 - RNA, 19 nt, Artificial Sequence
  Description of Artificial Sequence: Synthetic oligonucleotide
  Antisense strand to SEQ ID NO: 1553036
acaguuaaucauuuacguc

SEQ ID NO: 1553038 - RNA, 19 nt, Artificial Sequence
  Description of Artificial Sequence: Synthetic oligonucleotide
  Sense strand starting at position 3064 of SEQ ID NO: 1245310
gccacuuaagagcaaauau

SEQ ID NO: 1553039 - RNA, 19 nt, Artificial Sequence
  Description of Artificial Sequence: Synthetic oligonucleotide
  Antisense strand to SEQ ID NO: 1553038
auauuugcucuuaaguggc

SEQ ID NO: 1553040 - RNA, 19 nt, Artificial Sequence
  Description of Artificial Sequence: Synthetic oligonucleotide
  Sense strand starting at position 3269 of SEQ ID NO: 1245310
gagcaagaggcauguguaa

SEQ ID NO: 1553041 - RNA, 19 nt, Artificial Sequence
  Description of Artificial Sequence: Synthetic oligonucleotide
  Antisense strand to SEQ ID NO: 1553040
uuacacaugccucuugcuc

SEQ ID NO: 1553042 - RNA, 19 nt, Artificial Sequence
  Description of Artificial Sequence: Synthetic oligonucleotide
  Sense strand starting at position 3271 of SEQ ID NO: 1245310
gcaagaggcauguguaaua

SEQ ID NO: 1553043 - RNA, 19 nt, Artificial Sequence
  Description of Artificial Sequence: Synthetic oligonucleotide
  Antisense strand to SEQ ID NO: 1553042
uauuacacaugccucuugc

SEQ ID NO: 1553044 - RNA, 19 nt, Artificial Sequence
  Description of Artificial Sequence: Synthetic oligonucleotide
  Sense strand starting at position 3417 of SEQ ID NO: 1245310
auguaaucuggacaguuac

SEQ ID NO: 1553045 - RNA, 19 nt, Artificial Sequence
  Description of Artificial Sequence: Synthetic oligonucleotide
  Antisense strand to SEQ ID NO: 1553044
guaacuguccagauuacau

SEQ ID NO: 1553046 - RNA, 19 nt, Artificial Sequence
  Description of Artificial Sequence: Synthetic oligonucleotide
  Sense strand starting at position 3439 of SEQ ID NO: 1245310
cacucauguccguaugaag

SEQ ID NO: 1553047 - RNA, 19 nt, Artificial Sequence
  Description of Artificial Sequence: Synthetic oligonucleotide
  Antisense strand to SEQ ID NO: 1553046
cuucauacggacaugagug

SEQ ID NO: 1553048 - RNA, 19 nt, Artificial Sequence
  Description of Artificial Sequence: Synthetic oligonucleotide
  Sense strand starting at position 3842 of SEQ ID NO: 1245310
cauugcauccucgagacuu

SEQ ID NO: 1553049 - RNA, 19 nt, Artificial Sequence
  Description of Artificial Sequence: Synthetic oligonucleotide
  Antisense strand to SEQ ID NO: 1553048
aagucucgaggaugcaaug

SEQ ID NO: 1553050 - RNA, 19 nt, Artificial Sequence
  Description of Artificial Sequence: Synthetic oligonucleotide
  Sense strand starting at position 3844 of SEQ ID NO: 1245310
uugcauccucgagacuuaa

SEQ ID NO: 1553051 - RNA, 19 nt, Artificial Sequence
  Description of Artificial Sequence: Synthetic oligonucleotide
  Antisense strand to SEQ ID NO: 1553050
uuaagucucgaggaugcaa

SEQ ID NO: 1553052 - RNA, 19 nt, Artificial Sequence
  Description of Artificial Sequence: Synthetic oligonucleotide
  Sense strand starting at position 3854 of SEQ ID NO: 1245310
gagacuuaaguuuagccua

SEQ ID NO: 1553053 - RNA, 19 nt, Artificial Sequence
  Description of Artificial Sequence: Synthetic oligonucleotide
  Antisense strand to SEQ ID NO: 1553052
uaggcuaaacuuaagucuc

SEQ ID NO: 1553054 - RNA, 19 nt, Artificial Sequence
  Description of Artificial Sequence: Synthetic oligonucleotide
  Sense strand starting at position 3934 of SEQ ID NO: 1245310
aaccuaaaugaagguguaa

SEQ ID NO: 1553055 - RNA, 19 nt, Artificial Sequence
  Description of Artificial Sequence: Synthetic oligonucleotide
  Antisense strand to SEQ ID NO: 1553054
uuacaccuucauuuagguu

SEQ ID NO: 1553056 - RNA, 19 nt, Artificial Sequence
  Description of Artificial Sequence: Synthetic oligonucleotide
  Sense strand starting at position 3983 of SEQ ID NO: 1245310
cugaguuauggccgaugaa

SEQ ID NO: 1553057 - RNA, 19 nt, Artificial Sequence
  Description of Artificial Sequence: Synthetic oligonucleotide
  Antisense strand to SEQ ID NO: 1553056
uucaucggccauaacucag

SEQ ID NO: 1553058 - RNA, 19 nt, Artificial Sequence
  Description of Artificial Sequence: Synthetic oligonucleotide
  Sense strand starting at position 1342 of SEQ ID NO: 1245311
ggacucuugucggugagcu

SEQ ID NO: 1553059 - RNA, 19 nt, Artificial Sequence
  Description of Artificial Sequence: Synthetic oligonucleotide
  Antisense strand to SEQ ID NO: 1553058
agcucaccgacaagagucc

SEQ ID NO: 1553060 - RNA, 19 nt, Artificial Sequence
  Description of Artificial Sequence: Synthetic oligonucleotide
  Sense strand starting at position 1350 of SEQ ID NO: 1245311
gucggugagcuugagauga

SEQ ID NO: 1553061 - RNA, 19 nt, Artificial Sequence
  Description of Artificial Sequence: Synthetic oligonucleotide
  Antisense strand to SEQ ID NO: 1553060
ucaucucaagcucaccgac

SEQ ID NO: 1553062 - RNA, 19 nt, Artificial Sequence
  Description of Artificial Sequence: Synthetic oligonucleotide
  Sense strand starting at position 1442 of SEQ ID NO: 1245311
ugaacuuguugggcgagaa

SEQ ID NO: 1553063 - RNA, 19 nt, Artificial Sequence
  Description of Artificial Sequence: Synthetic oligonucleotide
  Antisense strand to SEQ ID NO: 1553062
uucucgcccaacaaguuca

SEQ ID NO: 1553064 - RNA, 19 nt, Artificial Sequence
  Description of Artificial Sequence: Synthetic oligonucleotide
  Sense strand starting at position 1443 of SEQ ID NO: 1245311
gaacuuguugggcgagaag

SEQ ID NO: 1553065 - RNA, 19 nt, Artificial Sequence
  Description of Artificial Sequence: Synthetic oligonucleotide
  Antisense strand to SEQ ID NO: 1553064
cuucucgcccaacaaguuc

SEQ ID NO: 1553066 - RNA, 19 nt, Artificial Sequence
  Description of Artificial Sequence: Synthetic oligonucleotide
  Sense strand starting at position 1454 of SEQ ID NO: 1245311
gcgagaaguacauguugca

SEQ ID NO: 1553067 - RNA, 19 nt, Artificial Sequence
  Description of Artificial Sequence: Synthetic oligonucleotide
  Antisense strand to SEQ ID NO: 1553066
ugcaacauguacuucucgc

SEQ ID NO: 1553068 - RNA, 19 nt, Artificial Sequence
  Description of Artificial Sequence: Synthetic oligonucleotide
  Sense strand starting at position 1773 of SEQ ID NO: 1245311
gcugaaguucuugagcaga

SEQ ID NO: 1553069 - RNA, 19 nt, Artificial Sequence
  Description of Artificial Sequence: Synthetic oligonucleotide
  Antisense strand to SEQ ID NO: 1553068
ucugcucaagaacuucagc

SEQ ID NO: 1553070 - RNA, 19 nt, Artificial Sequence
  Description of Artificial Sequence: Synthetic oligonucleotide
  Sense strand starting at position 1775 of SEQ ID NO: 1245311
ugaaguucuugagcagagu

SEQ ID NO: 1553071 - RNA, 19 nt, Artificial Sequence
  Description of Artificial Sequence: Synthetic oligonucleotide
  Antisense strand to SEQ ID NO: 1553070
acucugcucaagaacuuca

SEQ ID NO: 1553072 - RNA, 19 nt, Artificial Sequence
  Description of Artificial Sequence: Synthetic oligonucleotide
  Sense strand starting at position 1776 of SEQ ID NO: 1245311
gaaguucuugagcagagug

SEQ ID NO: 1553073 - RNA, 19 nt, Artificial Sequence
  Description of Artificial Sequence: Synthetic oligonucleotide
  Antisense strand to SEQ ID NO: 1553072
cacucugcucaagaacuuc

SEQ ID NO: 1553074 - RNA, 19 nt, Artificial Sequence
  Description of Artificial Sequence: Synthetic oligonucleotide
  Sense strand starting at position 1778 of SEQ ID NO: 1245311
aguucuugagcagaguguu

SEQ ID NO: 1553075 - RNA, 19 nt, Artificial Sequence
  Description of Artificial Sequence: Synthetic oligonucleotide
  Antisense strand to SEQ ID NO: 1553074
aacacucugcucaagaacu

SEQ ID NO: 1553076 - RNA, 19 nt, Artificial Sequence
  Description of Artificial Sequence: Synthetic oligonucleotide
  Sense strand starting at position 2060 of SEQ ID NO: 1245311
ggagaaagcguugacuuga

SEQ ID NO: 1553077 - RNA, 19 nt, Artificial Sequence
  Description of Artificial Sequence: Synthetic oligonucleotide
  Antisense strand to SEQ ID NO: 1553076
ucaagucaacgcuuucucc

SEQ ID NO: 1553078 - RNA, 19 nt, Artificial Sequence
  Description of Artificial Sequence: Synthetic oligonucleotide
  Sense strand starting at position 2104 of SEQ ID NO: 1245311
ugggaugaaucgcuaacca

SEQ ID NO: 1553079 - RNA, 19 nt, Artificial Sequence
  Description of Artificial Sequence: Synthetic oligonucleotide
  Antisense strand to SEQ ID NO: 1553078
ugguuagcgauucauccca

SEQ ID NO: 1553080 - RNA, 19 nt, Artificial Sequence
  Description of Artificial Sequence: Synthetic oligonucleotide
  Sense strand starting at position 2108 of SEQ ID NO: 1245311
augaaucgcuaaccaaaga

SEQ ID NO: 1553081 - RNA, 19 nt, Artificial Sequence
  Description of Artificial Sequence: Synthetic oligonucleotide
  Antisense strand to SEQ ID NO: 1553080
ucuuugguuagcgauucau

SEQ ID NO: 1553082 - RNA, 19 nt, Artificial Sequence
  Description of Artificial Sequence: Synthetic oligonucleotide
  Sense strand starting at position 2136 of SEQ ID NO: 1245311
acuuucuugcuuugguuaa

SEQ ID NO: 1553083 - RNA, 19 nt, Artificial Sequence
  Description of Artificial Sequence: Synthetic oligonucleotide
  Antisense strand to SEQ ID NO: 1553082
uuaaccaaagcaagaaagu

SEQ ID NO: 1553084 - RNA, 19 nt, Artificial Sequence
  Description of Artificial Sequence: Synthetic oligonucleotide
  Sense strand starting at position 2138 of SEQ ID NO: 1245311
uuucuugcuuugguuaaga

SEQ ID NO: 1553085 - RNA, 19 nt, Artificial Sequence
  Description of Artificial Sequence: Synthetic oligonucleotide
  Antisense strand to SEQ ID NO: 1553084
ucuuaaccaaagcaagaaa

SEQ ID NO: 1553086 - RNA, 19 nt, Artificial Sequence
  Description of Artificial Sequence: Synthetic oligonucleotide
  Sense strand starting at position 2140 of SEQ ID NO: 1245311
ucuugcuuugguuaagaca

SEQ ID NO: 1553087 - RNA, 19 nt, Artificial Sequence
  Description of Artificial Sequence: Synthetic oligonucleotide
  Antisense strand to SEQ ID NO: 1553086
ugucuuaaccaaagcaaga

SEQ ID NO: 1553088 - RNA, 19 nt, Artificial Sequence
  Description of Artificial Sequence: Synthetic oligonucleotide
  Sense strand starting at position 2147 of SEQ ID NO: 1245311
uugguuaagacacgauuau

SEQ ID NO: 1553089 - RNA, 19 nt, Artificial Sequence
  Description of Artificial Sequence: Synthetic oligonucleotide
  Antisense strand to SEQ ID NO: 1553088
auaaucgugucuuaaccaa

SEQ ID NO: 1553090 - RNA, 19 nt, Artificial Sequence
  Description of Artificial Sequence: Synthetic oligonucleotide
  Sense strand starting at position 2148 of SEQ ID NO: 1245311
ugguuaagacacgauuauu

SEQ ID NO: 1553091 - RNA, 19 nt, Artificial Sequence
  Description of Artificial Sequence: Synthetic oligonucleotide
  Antisense strand to SEQ ID NO: 1553090
aauaaucgugucuuaacca

SEQ ID NO: 1553092 - RNA, 19 nt, Artificial Sequence
  Description of Artificial Sequence: Synthetic oligonucleotide
  Sense strand starting at position 2297 of SEQ ID NO: 1245311
agcagugaauuccuaagaa

SEQ ID NO: 1553093 - RNA, 19 nt, Artificial Sequence
  Description of Artificial Sequence: Synthetic oligonucleotide
  Antisense strand to SEQ ID NO: 1553092
uucuuaggaauucacugcu

SEQ ID NO: 1553094 - RNA, 19 nt, Artificial Sequence
  Description of Artificial Sequence: Synthetic oligonucleotide
  Sense strand starting at position 2301 of SEQ ID NO: 1245311
gugaauuccuaagaaaccu

SEQ ID NO: 1553095 - RNA, 19 nt, Artificial Sequence
  Description of Artificial Sequence: Synthetic oligonucleotide
  Antisense strand to SEQ ID NO: 1553094
agguuucuuaggaauucac

SEQ ID NO: 1553096 - RNA, 19 nt, Artificial Sequence
  Description of Artificial Sequence: Synthetic oligonucleotide
  Sense strand starting at position 2339 of SEQ ID NO: 1245311
auaggagccguuggaauaa

SEQ ID NO: 1553097 - RNA, 19 nt, Artificial Sequence
  Description of Artificial Sequence: Synthetic oligonucleotide
  Antisense strand to SEQ ID NO: 1553096
uuauuccaacggcuccuau

SEQ ID NO: 1553098 - RNA, 19 nt, Artificial Sequence
  Description of Artificial Sequence: Synthetic oligonucleotide
  Sense strand starting at position 2383 of SEQ ID NO: 1245311
aguaacgauaguuguaacu

SEQ ID NO: 1553099 - RNA, 19 nt, Artificial Sequence
  Description of Artificial Sequence: Synthetic oligonucleotide
  Antisense strand to SEQ ID NO: 1553098
aguuacaacuaucguuacu

SEQ ID NO: 1553100 - RNA, 19 nt, Artificial Sequence
  Description of Artificial Sequence: Synthetic oligonucleotide
  Sense strand starting at position 2464 of SEQ ID NO: 1245311
cugucauucucauuugcuu

SEQ ID NO: 1553101 - RNA, 19 nt, Artificial Sequence
  Description of Artificial Sequence: Synthetic oligonucleotide
  Antisense strand to SEQ ID NO: 1553100
aagcaaaugagaaugacag

SEQ ID NO: 1553102 - RNA, 19 nt, Artificial Sequence
  Description of Artificial Sequence: Synthetic oligonucleotide
  Sense strand starting at position 2472 of SEQ ID NO: 1245311
cucauuugcuuggagauag

SEQ ID NO: 1553103 - RNA, 19 nt, Artificial Sequence
  Description of Artificial Sequence: Synthetic oligonucleotide
  Antisense strand to SEQ ID NO: 1553102
cuaucuccaagcaaaugag

SEQ ID NO: 1553104 - RNA, 19 nt, Artificial Sequence
  Description of Artificial Sequence: Synthetic oligonucleotide
  Sense strand starting at position 2578 of SEQ ID NO: 1245311
gguugaaacacaggucauu

SEQ ID NO: 1553105 - RNA, 19 nt, Artificial Sequence
  Description of Artificial Sequence: Synthetic oligonucleotide
  Antisense strand to SEQ ID NO: 1553104
aaugaccuguguuucaacc

SEQ ID NO: 1553106 - RNA, 19 nt, Artificial Sequence
  Description of Artificial Sequence: Synthetic oligonucleotide
  Sense strand starting at position 2768 of SEQ ID NO: 1245311
ggucucagaugguuaggua

SEQ ID NO: 1553107 - RNA, 19 nt, Artificial Sequence
  Description of Artificial Sequence: Synthetic oligonucleotide
  Antisense strand to SEQ ID NO: 1553106
uaccuaaccaucugagacc

SEQ ID NO: 1553108 - RNA, 19 nt, Artificial Sequence
  Description of Artificial Sequence: Synthetic oligonucleotide
  Sense strand starting at position 3060 of SEQ ID NO: 1245311
cuagguaaucuaugggagu

SEQ ID NO: 1553109 - RNA, 19 nt, Artificial Sequence
  Description of Artificial Sequence: Synthetic oligonucleotide
  Antisense strand to SEQ ID NO: 1553108
acucccauagauuaccuag

SEQ ID NO: 1553110 - RNA, 19 nt, Artificial Sequence
  Description of Artificial Sequence: Synthetic oligonucleotide
  Sense strand starting at position 3062 of SEQ ID NO: 1245311
agguaaucuaugggagugu

SEQ ID NO: 1553111 - RNA, 19 nt, Artificial Sequence
  Description of Artificial Sequence: Synthetic oligonucleotide
  Antisense strand to SEQ ID NO: 1553110
acacucccauagauuaccu

SEQ ID NO: 1553112 - RNA, 19 nt, Artificial Sequence
  Description of Artificial Sequence: Synthetic oligonucleotide
  Sense strand starting at position 3066 of SEQ ID NO: 1245311
aaucuaugggaguguugaa

SEQ ID NO: 1553113 - RNA, 19 nt, Artificial Sequence
  Description of Artificial Sequence: Synthetic oligonucleotide
  Antisense strand to SEQ ID NO: 1553112
uucaacacucccauagauu

SEQ ID NO: 1553114 - RNA, 19 nt, Artificial Sequence
  Description of Artificial Sequence: Synthetic oligonucleotide
  Sense strand starting at position 3076 of SEQ ID NO: 1245311
aguguugaaagucgaaauc

SEQ ID NO: 1553115 - RNA, 19 nt, Artificial Sequence
  Description of Artificial Sequence: Synthetic oligonucleotide
  Antisense strand to SEQ ID NO: 1553114
gauuucgacuuucaacacu

SEQ ID NO: 1553116 - RNA, 19 nt, Artificial Sequence
  Description of Artificial Sequence: Synthetic oligonucleotide
  Sense strand starting at position 3095 of SEQ ID NO: 1245311
ccagguugggucuguggua

SEQ ID NO: 1553117 - RNA, 19 nt, Artificial Sequence
  Description of Artificial Sequence: Synthetic oligonucleotide
  Antisense strand to SEQ ID NO: 1553116
uaccacagacccaaccugg

SEQ ID NO: 1553118 - RNA, 19 nt, Artificial Sequence
  Description of Artificial Sequence: Synthetic oligonucleotide
  Sense strand starting at position 3096 of SEQ ID NO: 1245311
cagguugggucugugguaa

SEQ ID NO: 1553119 - RNA, 19 nt, Artificial Sequence
  Description of Artificial Sequence: Synthetic oligonucleotide
  Antisense strand to SEQ ID NO: 1553118
uuaccacagacccaaccug

SEQ ID NO: 1553120 - RNA, 19 nt, Artificial Sequence
  Description of Artificial Sequence: Synthetic oligonucleotide
  Sense strand starting at position 3243 of SEQ ID NO: 1245311
uggcucacucccuaggaaa

SEQ ID NO: 1553121 - RNA, 19 nt, Artificial Sequence
  Description of Artificial Sequence: Synthetic oligonucleotide
  Antisense strand to SEQ ID NO: 1553120
uuuccuagggagugagcca

SEQ ID NO: 1553122 - RNA, 19 nt, Artificial Sequence
  Description of Artificial Sequence: Synthetic oligonucleotide
  Sense strand starting at position 3367 of SEQ ID NO: 1245311
cagcgaguucgcuauuaca

SEQ ID NO: 1553123 - RNA, 19 nt, Artificial Sequence
  Description of Artificial Sequence: Synthetic oligonucleotide
  Antisense strand to SEQ ID NO: 1553122
uguaauagcgaacucgcug

SEQ ID NO: 1553124 - RNA, 19 nt, Artificial Sequence
  Description of Artificial Sequence: Synthetic oligonucleotide
  Sense strand starting at position 3369 of SEQ ID NO: 1245311
gcgaguucgcuauuacagu

SEQ ID NO: 1553125 - RNA, 19 nt, Artificial Sequence
  Description of Artificial Sequence: Synthetic oligonucleotide
  Antisense strand to SEQ ID NO: 1553124
acuguaauagcgaacucgc

SEQ ID NO: 1553126 - RNA, 19 nt, Artificial Sequence
  Description of Artificial Sequence: Synthetic oligonucleotide
  Sense strand starting at position 3541 of SEQ ID NO: 1245311
aaaccucgacgcgaucaaa

SEQ ID NO: 1553127 - RNA, 19 nt, Artificial Sequence
  Description of Artificial Sequence: Synthetic oligonucleotide
  Antisense strand to SEQ ID NO: 1553126
uuugaucgcgucgagguuu

SEQ ID NO: 1553128 - RNA, 19 nt, Artificial Sequence
  Description of Artificial Sequence: Synthetic oligonucleotide
  Sense strand starting at position 3577 of SEQ ID NO: 1245311
ugucacuuuggguggauca

SEQ ID NO: 1553129 - RNA, 19 nt, Artificial Sequence
  Description of Artificial Sequence: Synthetic oligonucleotide
  Antisense strand to SEQ ID NO: 1553128
ugauccacccaaagugaca

SEQ ID NO: 1553130 - RNA, 19 nt, Artificial Sequence
  Description of Artificial Sequence: Synthetic oligonucleotide
  Sense strand starting at position 3736 of SEQ ID NO: 1245311
auaagacccugggauaauu

SEQ ID NO: 1553131 - RNA, 19 nt, Artificial Sequence
  Description of Artificial Sequence: Synthetic oligonucleotide
  Antisense strand to SEQ ID NO: 1553130
aauuaucccagggucuuau

SEQ ID NO: 1553132 - RNA, 19 nt, Artificial Sequence
  Description of Artificial Sequence: Synthetic oligonucleotide
  Sense strand starting at position 3744 of SEQ ID NO: 1245311
cugggauaauuccaacucu

SEQ ID NO: 1553133 - RNA, 19 nt, Artificial Sequence
  Description of Artificial Sequence: Synthetic oligonucleotide
  Antisense strand to SEQ ID NO: 1553132
agaguuggaauuaucccag

SEQ ID NO: 1553134 - RNA, 19 nt, Artificial Sequence
  Description of Artificial Sequence: Synthetic oligonucleotide
  Sense strand starting at position 3805 of SEQ ID NO: 1245311
gcuggcucugcguuaagga

SEQ ID NO: 1553135 - RNA, 19 nt, Artificial Sequence
  Description of Artificial Sequence: Synthetic oligonucleotide
  Antisense strand to SEQ ID NO: 1553134
uccuuaacgcagagccagc

SEQ ID NO: 1553136 - RNA, 19 nt, Artificial Sequence
  Description of Artificial Sequence: Synthetic oligonucleotide
  Sense strand starting at position 3853 of SEQ ID NO: 1245311
agaagugucuccucacuuu

SEQ ID NO: 1553137 - RNA, 19 nt, Artificial Sequence
  Description of Artificial Sequence: Synthetic oligonucleotide
  Antisense strand to SEQ ID NO: 1553136
aaagugaggagacacuucu

SEQ ID NO: 1553138 - RNA, 19 nt, Artificial Sequence
  Description of Artificial Sequence: Synthetic oligonucleotide
  Sense strand starting at position 279 of SEQ ID NO: 1245312
uugagagcuagguaggauu

SEQ ID NO: 1553139 - RNA, 19 nt, Artificial Sequence
  Description of Artificial Sequence: Synthetic oligonucleotide
  Antisense strand to SEQ ID NO: 1553138
aauccuaccuagcucucaa

SEQ ID NO: 1553140 - RNA, 19 nt, Artificial Sequence
  Description of Artificial Sequence: Synthetic oligonucleotide
  Sense strand starting at position 346 of SEQ ID NO: 1245312
ggaucagagugggcaucau

SEQ ID NO: 1553141 - RNA, 19 nt, Artificial Sequence
  Description of Artificial Sequence: Synthetic oligonucleotide
  Antisense strand to SEQ ID NO: 1553140
augaugcccacucugaucc

SEQ ID NO: 1553142 - RNA, 19 nt, Artificial Sequence
  Description of Artificial Sequence: Synthetic oligonucleotide
  Sense strand starting at position 397 of SEQ ID NO: 1245312
ggucuuauggaauagguca

SEQ ID NO: 1553143 - RNA, 19 nt, Artificial Sequence
  Description of Artificial Sequence: Synthetic oligonucleotide
  Antisense strand to SEQ ID NO: 1553142
ugaccuauuccauaagacc

SEQ ID NO: 1553144 - RNA, 19 nt, Artificial Sequence
  Description of Artificial Sequence: Synthetic oligonucleotide
  Sense strand starting at position 665 of SEQ ID NO: 1245312
agcaguuacucucugacaa

SEQ ID NO: 1553145 - RNA, 19 nt, Artificial Sequence
  Description of Artificial Sequence: Synthetic oligonucleotide
  Antisense strand to SEQ ID NO: 1553144
uugucagagaguaacugcu

SEQ ID NO: 1553146 - RNA, 19 nt, Artificial Sequence
  Description of Artificial Sequence: Synthetic oligonucleotide
  Sense strand starting at position 666 of SEQ ID NO: 1245312
gcaguuacucucugacaaa

SEQ ID NO: 1553147 - RNA, 19 nt, Artificial Sequence
  Description of Artificial Sequence: Synthetic oligonucleotide
  Antisense strand to SEQ ID NO: 1553146
uuugucagagaguaacugc

SEQ ID NO: 1553148 - RNA, 19 nt, Artificial Sequence
  Description of Artificial Sequence: Synthetic oligonucleotide
  Sense strand starting at position 1016 of SEQ ID NO: 1245312
auaugaaguguuggauaug

SEQ ID NO: 1553149 - RNA, 19 nt, Artificial Sequence
  Description of Artificial Sequence: Synthetic oligonucleotide
  Antisense strand to SEQ ID NO: 1553148
cauauccaacacuucauau

SEQ ID NO: 1553150 - RNA, 19 nt, Artificial Sequence
  Description of Artificial Sequence: Synthetic oligonucleotide
  Sense strand starting at position 1021 of SEQ ID NO: 1245312
aaguguuggauauggauau

SEQ ID NO: 1553151 - RNA, 19 nt, Artificial Sequence
  Description of Artificial Sequence: Synthetic oligonucleotide
  Antisense strand to SEQ ID NO: 1553150
auauccauauccaacacuu

SEQ ID NO: 1553152 - RNA, 19 nt, Artificial Sequence
  Description of Artificial Sequence: Synthetic oligonucleotide
  Sense strand starting at position 1056 of SEQ ID NO: 1245312
acacucauggucuagcaua

SEQ ID NO: 1553153 - RNA, 19 nt, Artificial Sequence
  Description of Artificial Sequence: Synthetic oligonucleotide
  Antisense strand to SEQ ID NO: 1553152
uaugcuagaccaugagugu

SEQ ID NO: 1553154 - RNA, 19 nt, Artificial Sequence
  Description of Artificial Sequence: Synthetic oligonucleotide
  Sense strand starting at position 1259 of SEQ ID NO: 1245312
cccagaagucuugauucca

SEQ ID NO: 1553155 - RNA, 19 nt, Artificial Sequence
  Description of Artificial Sequence: Synthetic oligonucleotide
  Antisense strand to SEQ ID NO: 1553154
uggaaucaagacuucuggg

SEQ ID NO: 1553156 - RNA, 19 nt, Artificial Sequence
  Description of Artificial Sequence: Synthetic oligonucleotide
  Sense strand starting at position 1462 of SEQ ID NO: 1245312
gacacucgccucgaacuua

SEQ ID NO: 1553157 - RNA, 19 nt, Artificial Sequence
  Description of Artificial Sequence: Synthetic oligonucleotide
  Antisense strand to SEQ ID NO: 1553156
uaaguucgaggcgaguguc

SEQ ID NO: 1553158 - RNA, 19 nt, Artificial Sequence
  Description of Artificial Sequence: Synthetic oligonucleotide
  Sense strand starting at position 1530 of SEQ ID NO: 1245312
ccuaauaguguugauuaac

SEQ ID NO: 1553159 - RNA, 19 nt, Artificial Sequence
  Description of Artificial Sequence: Synthetic oligonucleotide
  Antisense strand to SEQ ID NO: 1553158
guuaaucaacacuauuagg

SEQ ID NO: 1553160 - RNA, 19 nt, Artificial Sequence
  Description of Artificial Sequence: Synthetic oligonucleotide
  Sense strand starting at position 1536 of SEQ ID NO: 1245312
aguguugauuaacccagaa

SEQ ID NO: 1553161 - RNA, 19 nt, Artificial Sequence
  Description of Artificial Sequence: Synthetic oligonucleotide
  Antisense strand to SEQ ID NO: 1553160
uucuggguuaaucaacacu

SEQ ID NO: 1553162 - RNA, 19 nt, Artificial Sequence
  Description of Artificial Sequence: Synthetic oligonucleotide
  Sense strand starting at position 1694 of SEQ ID NO: 1245312
ugcuuucuagucuaccaga

SEQ ID NO: 1553163 - RNA, 19 nt, Artificial Sequence
  Description of Artificial Sequence: Synthetic oligonucleotide
  Antisense strand to SEQ ID NO: 1553162
ucugguagacuagaaagca

SEQ ID NO: 1553164 - RNA, 19 nt, Artificial Sequence
  Description of Artificial Sequence: Synthetic oligonucleotide
  Sense strand starting at position 1733 of SEQ ID NO: 1245312
gaucaauuccggugauaua

SEQ ID NO: 1553165 - RNA, 19 nt, Artificial Sequence
  Description of Artificial Sequence: Synthetic oligonucleotide
  Antisense strand to SEQ ID NO: 1553164
uauaucaccggaauugauc

SEQ ID NO: 1553166 - RNA, 19 nt, Artificial Sequence
  Description of Artificial Sequence: Synthetic oligonucleotide
  Sense strand starting at position 1734 of SEQ ID NO: 1245312
aucaauuccggugauauaa

SEQ ID NO: 1553167 - RNA, 19 nt, Artificial Sequence
  Description of Artificial Sequence: Synthetic oligonucleotide
  Antisense strand to SEQ ID NO: 1553166
uuauaucaccggaauugau

SEQ ID NO: 1553168 - RNA, 19 nt, Artificial Sequence
  Description of Artificial Sequence: Synthetic oligonucleotide
  Sense strand starting at position 2139 of SEQ ID NO: 1245312
acagcauuccaaggucuuu

SEQ ID NO: 1553169 - RNA, 19 nt, Artificial Sequence
  Description of Artificial Sequence: Synthetic oligonucleotide
  Antisense strand to SEQ ID NO: 1553168
aaagaccuuggaaugcugu

SEQ ID NO: 1553170 - RNA, 19 nt, Artificial Sequence
  Description of Artificial Sequence: Synthetic oligonucleotide
  Sense strand starting at position 2148 of SEQ ID NO: 1245312
caaggucuuugaccagcaa

SEQ ID NO: 1553171 - RNA, 19 nt, Artificial Sequence
  Description of Artificial Sequence: Synthetic oligonucleotide
  Antisense strand to SEQ ID NO: 1553170
uugcuggucaaagaccuug

SEQ ID NO: 1553172 - RNA, 19 nt, Artificial Sequence
  Description of Artificial Sequence: Synthetic oligonucleotide
  Sense strand starting at position 2149 of SEQ ID NO: 1245312
aaggucuuugaccagcaau

SEQ ID NO: 1553173 - RNA, 19 nt, Artificial Sequence
  Description of Artificial Sequence: Synthetic oligonucleotide
  Antisense strand to SEQ ID NO: 1553172
auugcuggucaaagaccuu

SEQ ID NO: 1553174 - RNA, 19 nt, Artificial Sequence
  Description of Artificial Sequence: Synthetic oligonucleotide
  Sense strand starting at position 2152 of SEQ ID NO: 1245312
gucuuugaccagcaauaau

SEQ ID NO: 1553175 - RNA, 19 nt, Artificial Sequence
  Description of Artificial Sequence: Synthetic oligonucleotide
  Antisense strand to SEQ ID NO: 1553174
auuauugcuggucaaagac

SEQ ID NO: 1553176 - RNA, 19 nt, Artificial Sequence
  Description of Artificial Sequence: Synthetic oligonucleotide
  Sense strand starting at position 2249 of SEQ ID NO: 1245312
ggaucaacacggugucaaa

SEQ ID NO: 1553177 - RNA, 19 nt, Artificial Sequence
  Description of Artificial Sequence: Synthetic oligonucleotide
  Antisense strand to SEQ ID NO: 1553176
uuugacaccguguugaucc

SEQ ID NO: 1553178 - RNA, 19 nt, Artificial Sequence
  Description of Artificial Sequence: Synthetic oligonucleotide
  Sense strand starting at position 2336 of SEQ ID NO: 1245312
uuucuuagacuuggcacaa

SEQ ID NO: 1553179 - RNA, 19 nt, Artificial Sequence
  Description of Artificial Sequence: Synthetic oligonucleotide
  Antisense strand to SEQ ID NO: 1553178
uugugccaagucuaagaaa

SEQ ID NO: 1553180 - RNA, 19 nt, Artificial Sequence
  Description of Artificial Sequence: Synthetic oligonucleotide
  Sense strand starting at position 2482 of SEQ ID NO: 1245312
aucaguguuucccuggaau

SEQ ID NO: 1553181 - RNA, 19 nt, Artificial Sequence
  Description of Artificial Sequence: Synthetic oligonucleotide
  Antisense strand to SEQ ID NO: 1553180
auuccagggaaacacugau

SEQ ID NO: 1553182 - RNA, 19 nt, Artificial Sequence
  Description of Artificial Sequence: Synthetic oligonucleotide
  Sense strand starting at position 2485 of SEQ ID NO: 1245312
aguguuucccuggaauguc

SEQ ID NO: 1553183 - RNA, 19 nt, Artificial Sequence
  Description of Artificial Sequence: Synthetic oligonucleotide
  Antisense strand to SEQ ID NO: 1553182
gacauuccagggaaacacu

SEQ ID NO: 1553184 - RNA, 19 nt, Artificial Sequence
  Description of Artificial Sequence: Synthetic oligonucleotide
  Sense strand starting at position 2502 of SEQ ID NO: 1245312
ucugucuucccaggugaga

SEQ ID NO: 1553185 - RNA, 19 nt, Artificial Sequence
  Description of Artificial Sequence: Synthetic oligonucleotide
  Antisense strand to SEQ ID NO: 1553184
ucucaccugggaagacaga

SEQ ID NO: 1553186 - RNA, 19 nt, Artificial Sequence
  Description of Artificial Sequence: Synthetic oligonucleotide
  Sense strand starting at position 2504 of SEQ ID NO: 1245312
ugucuucccaggugagaau

SEQ ID NO: 1553187 - RNA, 19 nt, Artificial Sequence
  Description of Artificial Sequence: Synthetic oligonucleotide
  Antisense strand to SEQ ID NO: 1553186
auucucaccugggaagaca

SEQ ID NO: 1553188 - RNA, 19 nt, Artificial Sequence
  Description of Artificial Sequence: Synthetic oligonucleotide
  Sense strand starting at position 2505 of SEQ ID NO: 1245312
gucuucccaggugagaauu

SEQ ID NO: 1553189 - RNA, 19 nt, Artificial Sequence
  Description of Artificial Sequence: Synthetic oligonucleotide
  Antisense strand to SEQ ID NO: 1553188
aauucucaccugggaagac

SEQ ID NO: 1553190 - RNA, 19 nt, Artificial Sequence
  Description of Artificial Sequence: Synthetic oligonucleotide
  Sense strand starting at position 2515 of SEQ ID NO: 1245312
gugagaauucuuggacaua

SEQ ID NO: 1553191 - RNA, 19 nt, Artificial Sequence
  Description of Artificial Sequence: Synthetic oligonucleotide
  Antisense strand to SEQ ID NO: 1553190
uauguccaagaauucucac

SEQ ID NO: 1553192 - RNA, 19 nt, Artificial Sequence
  Description of Artificial Sequence: Synthetic oligonucleotide
  Sense strand starting at position 2567 of SEQ ID NO: 1245312
auucuauagcagggaaauc

SEQ ID NO: 1553193 - RNA, 19 nt, Artificial Sequence
  Description of Artificial Sequence: Synthetic oligonucleotide
  Antisense strand to SEQ ID NO: 1553192
gauuucccugcuauagaau

SEQ ID NO: 1553194 - RNA, 19 nt, Artificial Sequence
  Description of Artificial Sequence: Synthetic oligonucleotide
  Sense strand starting at position 2969 of SEQ ID NO: 1245312
cuuggaugugcagauagua

SEQ ID NO: 1553195 - RNA, 19 nt, Artificial Sequence
  Description of Artificial Sequence: Synthetic oligonucleotide
  Antisense strand to SEQ ID NO: 1553194
uacuaucugcacauccaag

SEQ ID NO: 1553196 - RNA, 19 nt, Artificial Sequence
  Description of Artificial Sequence: Synthetic oligonucleotide
  Sense strand starting at position 3080 of SEQ ID NO: 1245312
ggacauccuuccuccaagu

SEQ ID NO: 1553197 - RNA, 19 nt, Artificial Sequence
  Description of Artificial Sequence: Synthetic oligonucleotide
  Antisense strand to SEQ ID NO: 1553196
acuuggaggaaggaugucc

SEQ ID NO: 1553198 - RNA, 19 nt, Artificial Sequence
  Description of Artificial Sequence: Synthetic oligonucleotide
  Sense strand starting at position 3143 of SEQ ID NO: 1245312
uaauaagaguuuccagguu

SEQ ID NO: 1553199 - RNA, 19 nt, Artificial Sequence
  Description of Artificial Sequence: Synthetic oligonucleotide
  Antisense strand to SEQ ID NO: 1553198
aaccuggaaacucuuauua

SEQ ID NO: 1553200 - RNA, 19 nt, Artificial Sequence
  Description of Artificial Sequence: Synthetic oligonucleotide
  Sense strand starting at position 3219 of SEQ ID NO: 1245312
ucggguuucccugaaggag

SEQ ID NO: 1553201 - RNA, 19 nt, Artificial Sequence
  Description of Artificial Sequence: Synthetic oligonucleotide
  Antisense strand to SEQ ID NO: 1553200
cuccuucagggaaacccga

SEQ ID NO: 1553202 - RNA, 19 nt, Artificial Sequence
  Description of Artificial Sequence: Synthetic oligonucleotide
  Sense strand starting at position 3294 of SEQ ID NO: 1245312
auacuagugucuccaugac

SEQ ID NO: 1553203 - RNA, 19 nt, Artificial Sequence
  Description of Artificial Sequence: Synthetic oligonucleotide
  Antisense strand to SEQ ID NO: 1553202
gucauggagacacuaguau

SEQ ID NO: 1553204 - RNA, 19 nt, Artificial Sequence
  Description of Artificial Sequence: Synthetic oligonucleotide
  Sense strand starting at position 3328 of SEQ ID NO: 1245312
gaccacugucccugauaga

SEQ ID NO: 1553205 - RNA, 19 nt, Artificial Sequence
  Description of Artificial Sequence: Synthetic oligonucleotide
  Antisense strand to SEQ ID NO: 1553204
ucuaucagggacagugguc

SEQ ID NO: 1553206 - RNA, 19 nt, Artificial Sequence
  Description of Artificial Sequence: Synthetic oligonucleotide
  Sense strand starting at position 3385 of SEQ ID NO: 1245312
ccacaaaugguagagcauu

SEQ ID NO: 1553207 - RNA, 19 nt, Artificial Sequence
  Description of Artificial Sequence: Synthetic oligonucleotide
  Antisense strand to SEQ ID NO: 1553206
aaugcucuaccauuugugg

SEQ ID NO: 1553208 - RNA, 19 nt, Artificial Sequence
  Description of Artificial Sequence: Synthetic oligonucleotide
  Sense strand starting at position 3449 of SEQ ID NO: 1245312
caaucugaggcucagaguu

SEQ ID NO: 1553209 - RNA, 19 nt, Artificial Sequence
  Description of Artificial Sequence: Synthetic oligonucleotide
  Antisense strand to SEQ ID NO: 1553208
aacucugagccucagauug

SEQ ID NO: 1553210 - RNA, 19 nt, Artificial Sequence
  Description of Artificial Sequence: Synthetic oligonucleotide
  Sense strand starting at position 3671 of SEQ ID NO: 1245312
gcugaagguguguagugaa

SEQ ID NO: 1553211 - RNA, 19 nt, Artificial Sequence
  Description of Artificial Sequence: Synthetic oligonucleotide
  Antisense strand to SEQ ID NO: 1553210
uucacuacacaccuucagc

SEQ ID NO: 1553212 - RNA, 19 nt, Artificial Sequence
  Description of Artificial Sequence: Synthetic oligonucleotide
  Sense strand starting at position 3795 of SEQ ID NO: 1245312
acagccuugccauauugua

SEQ ID NO: 1553213 - RNA, 19 nt, Artificial Sequence
  Description of Artificial Sequence: Synthetic oligonucleotide
  Antisense strand to SEQ ID NO: 1553212
uacaauauggcaaggcugu

SEQ ID NO: 1553214 - RNA, 19 nt, Artificial Sequence
  Description of Artificial Sequence: Synthetic oligonucleotide
  Sense strand starting at position 3930 of SEQ ID NO: 1245312
ucagauuccucaguguaaa

SEQ ID NO: 1553215 - RNA, 19 nt, Artificial Sequence
  Description of Artificial Sequence: Synthetic oligonucleotide
  Antisense strand to SEQ ID NO: 1553214
uuuacacugaggaaucuga

SEQ ID NO: 1553216 - RNA, 19 nt, Artificial Sequence
  Description of Artificial Sequence: Synthetic oligonucleotide
  Sense strand starting at position 3931 of SEQ ID NO: 1245312
cagauuccucaguguaaag

SEQ ID NO: 1553217 - RNA, 19 nt, Artificial Sequence
  Description of Artificial Sequence: Synthetic oligonucleotide
  Antisense strand to SEQ ID NO: 1553216
cuuuacacugaggaaucug

SEQ ID NO: 1553218 - RNA, 19 nt, Artificial Sequence
  Description of Artificial Sequence: Synthetic oligonucleotide
  Sense strand starting at position 178 of SEQ ID NO: 1245313
guuagauaccaacaucugu

SEQ ID NO: 1553219 - RNA, 19 nt, Artificial Sequence
  Description of Artificial Sequence: Synthetic oligonucleotide
  Antisense strand to SEQ ID NO: 1553218
acagauguugguaucuaac

SEQ ID NO: 1553220 - RNA, 19 nt, Artificial Sequence
  Description of Artificial Sequence: Synthetic oligonucleotide
  Sense strand starting at position 186 of SEQ ID NO: 1245313
ccaacaucugugugacuug

SEQ ID NO: 1553221 - RNA, 19 nt, Artificial Sequence
  Description of Artificial Sequence: Synthetic oligonucleotide
  Antisense strand to SEQ ID NO: 1553220
caagucacacagauguugg

SEQ ID NO: 1553222 - RNA, 19 nt, Artificial Sequence
  Description of Artificial Sequence: Synthetic oligonucleotide
  Sense strand starting at position 189 of SEQ ID NO: 1245313
acaucugugugacuugcaa

SEQ ID NO: 1553223 - RNA, 19 nt, Artificial Sequence
  Description of Artificial Sequence: Synthetic oligonucleotide
  Antisense strand to SEQ ID NO: 1553222
uugcaagucacacagaugu

SEQ ID NO: 1553224 - RNA, 19 nt, Artificial Sequence
  Description of Artificial Sequence: Synthetic oligonucleotide
  Sense strand starting at position 196 of SEQ ID NO: 1245313
ugugacuugcaaugaaucu

SEQ ID NO: 1553225 - RNA, 19 nt, Artificial Sequence
  Description of Artificial Sequence: Synthetic oligonucleotide
  Antisense strand to SEQ ID NO: 1553224
agauucauugcaagucaca

SEQ ID NO: 1553226 - RNA, 19 nt, Artificial Sequence
  Description of Artificial Sequence: Synthetic oligonucleotide
  Sense strand starting at position 250 of SEQ ID NO: 1245313
cugaguuggcuccauaguu

SEQ ID NO: 1553227 - RNA, 19 nt, Artificial Sequence
  Description of Artificial Sequence: Synthetic oligonucleotide
  Antisense strand to SEQ ID NO: 1553226
aacuauggagccaacucag

SEQ ID NO: 1553228 - RNA, 19 nt, Artificial Sequence
  Description of Artificial Sequence: Synthetic oligonucleotide
  Sense strand starting at position 255 of SEQ ID NO: 1245313
uuggcuccauaguuaaaga

SEQ ID NO: 1553229 - RNA, 19 nt, Artificial Sequence
  Description of Artificial Sequence: Synthetic oligonucleotide
  Antisense strand to SEQ ID NO: 1553228
ucuuuaacuauggagccaa

SEQ ID NO: 1553230 - RNA, 19 nt, Artificial Sequence
  Description of Artificial Sequence: Synthetic oligonucleotide
  Sense strand starting at position 281 of SEQ ID NO: 1245313
ccguaugaauaauuaagca

SEQ ID NO: 1553231 - RNA, 19 nt, Artificial Sequence
  Description of Artificial Sequence: Synthetic oligonucleotide
  Antisense strand to SEQ ID NO: 1553230
ugcuuaauuauucauacgg

SEQ ID NO: 1553232 - RNA, 19 nt, Artificial Sequence
  Description of Artificial Sequence: Synthetic oligonucleotide
  Sense strand starting at position 383 of SEQ ID NO: 1245313
cugaacauauugcuugaua

SEQ ID NO: 1553233 - RNA, 19 nt, Artificial Sequence
  Description of Artificial Sequence: Synthetic oligonucleotide
  Antisense strand to SEQ ID NO: 1553232
uaucaagcaauauguucag

SEQ ID NO: 1553234 - RNA, 19 nt, Artificial Sequence
  Description of Artificial Sequence: Synthetic oligonucleotide
  Sense strand starting at position 384 of SEQ ID NO: 1245313
ugaacauauugcuugauaa

SEQ ID NO: 1553235 - RNA, 19 nt, Artificial Sequence
  Description of Artificial Sequence: Synthetic oligonucleotide
  Antisense strand to SEQ ID NO: 1553234
uuaucaagcaauauguuca

SEQ ID NO: 1553236 - RNA, 19 nt, Artificial Sequence
  Description of Artificial Sequence: Synthetic oligonucleotide
  Sense strand starting at position 444 of SEQ ID NO: 1245313
caacuuaugggaggcauca

SEQ ID NO: 1553237 - RNA, 19 nt, Artificial Sequence
  Description of Artificial Sequence: Synthetic oligonucleotide
  Antisense strand to SEQ ID NO: 1553236
ugaugccucccauaaguug

SEQ ID NO: 1553238 - RNA, 19 nt, Artificial Sequence
  Description of Artificial Sequence: Synthetic oligonucleotide
  Sense strand starting at position 495 of SEQ ID NO: 1245313
agagauaaaugccuugagu

SEQ ID NO: 1553239 - RNA, 19 nt, Artificial Sequence
  Description of Artificial Sequence: Synthetic oligonucleotide
  Antisense strand to SEQ ID NO: 1553238
acucaaggcauuuaucucu

SEQ ID NO: 1553240 - RNA, 19 nt, Artificial Sequence
  Description of Artificial Sequence: Synthetic oligonucleotide
  Sense strand starting at position 497 of SEQ ID NO: 1245313
agauaaaugccuugaguuu

SEQ ID NO: 1553241 - RNA, 19 nt, Artificial Sequence
  Description of Artificial Sequence: Synthetic oligonucleotide
  Antisense strand to SEQ ID NO: 1553240
aaacucaaggcauuuaucu

SEQ ID NO: 1553242 - RNA, 19 nt, Artificial Sequence
  Description of Artificial Sequence: Synthetic oligonucleotide
  Sense strand starting at position 498 of SEQ ID NO: 1245313
gauaaaugccuugaguuuc

SEQ ID NO: 1553243 - RNA, 19 nt, Artificial Sequence
  Description of Artificial Sequence: Synthetic oligonucleotide
  Antisense strand to SEQ ID NO: 1553242
gaaacucaaggcauuuauc

SEQ ID NO: 1553244 - RNA, 19 nt, Artificial Sequence
  Description of Artificial Sequence: Synthetic oligonucleotide
  Sense strand starting at position 838 of SEQ ID NO: 1245313
auagaagacuuauugccau

SEQ ID NO: 1553245 - RNA, 19 nt, Artificial Sequence
  Description of Artificial Sequence: Synthetic oligonucleotide
  Antisense strand to SEQ ID NO: 1553244
auggcaauaagucuucuau

SEQ ID NO: 1553246 - RNA, 19 nt, Artificial Sequence
  Description of Artificial Sequence: Synthetic oligonucleotide
  Sense strand starting at position 876 of SEQ ID NO: 1245313
auaauugggauggguugua

SEQ ID NO: 1553247 - RNA, 19 nt, Artificial Sequence
  Description of Artificial Sequence: Synthetic oligonucleotide
  Antisense strand to SEQ ID NO: 1553246
uacaacccaucccaauuau

SEQ ID NO: 1553248 - RNA, 19 nt, Artificial Sequence
  Description of Artificial Sequence: Synthetic oligonucleotide
  Sense strand starting at position 1017 of SEQ ID NO: 1245313
cugacuccuugcuccagaa

SEQ ID NO: 1553249 - RNA, 19 nt, Artificial Sequence
  Description of Artificial Sequence: Synthetic oligonucleotide
  Antisense strand to SEQ ID NO: 1553248
uucuggagcaaggagucag

SEQ ID NO: 1553250 - RNA, 19 nt, Artificial Sequence
  Description of Artificial Sequence: Synthetic oligonucleotide
  Sense strand starting at position 1019 of SEQ ID NO: 1245313
gacuccuugcuccagaagu

SEQ ID NO: 1553251 - RNA, 19 nt, Artificial Sequence
  Description of Artificial Sequence: Synthetic oligonucleotide
  Antisense strand to SEQ ID NO: 1553250
acuucuggagcaaggaguc

SEQ ID NO: 1553252 - RNA, 19 nt, Artificial Sequence
  Description of Artificial Sequence: Synthetic oligonucleotide
  Sense strand starting at position 1032 of SEQ ID NO: 1245313
agaagucaggcaugagaac

SEQ ID NO: 1553253 - RNA, 19 nt, Artificial Sequence
  Description of Artificial Sequence: Synthetic oligonucleotide
  Antisense strand to SEQ ID NO: 1553252
guucucaugccugacuucu

SEQ ID NO: 1553254 - RNA, 19 nt, Artificial Sequence
  Description of Artificial Sequence: Synthetic oligonucleotide
  Sense strand starting at position 1046 of SEQ ID NO: 1245313
agaaccacuuaggagaaau

SEQ ID NO: 1553255 - RNA, 19 nt, Artificial Sequence
  Description of Artificial Sequence: Synthetic oligonucleotide
  Antisense strand to SEQ ID NO: 1553254
auuucuccuaagugguucu

SEQ ID NO: 1553256 - RNA, 19 nt, Artificial Sequence
  Description of Artificial Sequence: Synthetic oligonucleotide
  Sense strand starting at position 1218 of SEQ ID NO: 1245313
agugaagcaggccauuaau

SEQ ID NO: 1553257 - RNA, 19 nt, Artificial Sequence
  Description of Artificial Sequence: Synthetic oligonucleotide
  Antisense strand to SEQ ID NO: 1553256
auuaauggccugcuucacu

SEQ ID NO: 1553258 - RNA, 19 nt, Artificial Sequence
  Description of Artificial Sequence: Synthetic oligonucleotide
  Sense strand starting at position 1359 of SEQ ID NO: 1245313
uggucuagccucuaaacca

SEQ ID NO: 1553259 - RNA, 19 nt, Artificial Sequence
  Description of Artificial Sequence: Synthetic oligonucleotide
  Antisense strand to SEQ ID NO: 1553258
ugguuuagaggcuagacca

SEQ ID NO: 1553260 - RNA, 19 nt, Artificial Sequence
  Description of Artificial Sequence: Synthetic oligonucleotide
  Sense strand starting at position 2019 of SEQ ID NO: 1245313
ugagguugcuucuuccaga

SEQ ID NO: 1553261 - RNA, 19 nt, Artificial Sequence
  Description of Artificial Sequence: Synthetic oligonucleotide
  Antisense strand to SEQ ID NO: 1553260
ucuggaagaagcaaccuca

SEQ ID NO: 1553262 - RNA, 19 nt, Artificial Sequence
  Description of Artificial Sequence: Synthetic oligonucleotide
  Sense strand starting at position 2141 of SEQ ID NO: 1245313
cuuggccuuguuuaugaaa

SEQ ID NO: 1553263 - RNA, 19 nt, Artificial Sequence
  Description of Artificial Sequence: Synthetic oligonucleotide
  Antisense strand to SEQ ID NO: 1553262
uuucauaaacaaggccaag

SEQ ID NO: 1553264 - RNA, 19 nt, Artificial Sequence
  Description of Artificial Sequence: Synthetic oligonucleotide
  Sense strand starting at position 2148 of SEQ ID NO: 1245313
uuguuuaugaaaugugaga

SEQ ID NO: 1553265 - RNA, 19 nt, Artificial Sequence
  Description of Artificial Sequence: Synthetic oligonucleotide
  Antisense strand to SEQ ID NO: 1553264
ucucacauuucauaaacaa

SEQ ID NO: 1553266 - RNA, 19 nt, Artificial Sequence
  Description of Artificial Sequence: Synthetic oligonucleotide
  Sense strand starting at position 2150 of SEQ ID NO: 1245313
guuuaugaaaugugagaag

SEQ ID NO: 1553267 - RNA, 19 nt, Artificial Sequence
  Description of Artificial Sequence: Synthetic oligonucleotide
  Antisense strand to SEQ ID NO: 1553266
cuucucacauuucauaaac

SEQ ID NO: 1553268 - RNA, 19 nt, Artificial Sequence
  Description of Artificial Sequence: Synthetic oligonucleotide
  Sense strand starting at position 2153 of SEQ ID NO: 1245313
uaugaaaugugagaagaag

SEQ ID NO: 1553269 - RNA, 19 nt, Artificial Sequence
  Description of Artificial Sequence: Synthetic oligonucleotide
  Antisense strand to SEQ ID NO: 1553268
cuucuucucacauuucaua

SEQ ID NO: 1553270 - RNA, 19 nt, Artificial Sequence
  Description of Artificial Sequence: Synthetic oligonucleotide
  Sense strand starting at position 2232 of SEQ ID NO: 1245313
acaagcugccuuuaagaga

SEQ ID NO: 1553271 - RNA, 19 nt, Artificial Sequence
  Description of Artificial Sequence: Synthetic oligonucleotide
  Antisense strand to SEQ ID NO: 1553270
ucucuuaaaggcagcuugu

SEQ ID NO: 1553272 - RNA, 19 nt, Artificial Sequence
  Description of Artificial Sequence: Synthetic oligonucleotide
  Sense strand starting at position 2419 of SEQ ID NO: 1245313
ggcauaagucaucaugcca

SEQ ID NO: 1553273 - RNA, 19 nt, Artificial Sequence
  Description of Artificial Sequence: Synthetic oligonucleotide
  Antisense strand to SEQ ID NO: 1553272
uggcaugaugacuuaugcc

SEQ ID NO: 1553274 - RNA, 19 nt, Artificial Sequence
  Description of Artificial Sequence: Synthetic oligonucleotide
  Sense strand starting at position 2491 of SEQ ID NO: 1245313
aguugaauuccacaaaugu

SEQ ID NO: 1553275 - RNA, 19 nt, Artificial Sequence
  Description of Artificial Sequence: Synthetic oligonucleotide
  Antisense strand to SEQ ID NO: 1553274
acauuuguggaauucaacu

SEQ ID NO: 1553276 - RNA, 19 nt, Artificial Sequence
  Description of Artificial Sequence: Synthetic oligonucleotide
  Sense strand starting at position 2771 of SEQ ID NO: 1245313
guguauauuuaccuauagu

SEQ ID NO: 1553277 - RNA, 19 nt, Artificial Sequence
  Description of Artificial Sequence: Synthetic oligonucleotide
  Antisense strand to SEQ ID NO: 1553276
acuauagguaaauauacac

SEQ ID NO: 1553278 - RNA, 19 nt, Artificial Sequence
  Description of Artificial Sequence: Synthetic oligonucleotide
  Sense strand starting at position 2798 of SEQ ID NO: 1245313
uggcuaguucuguaccaca

SEQ ID NO: 1553279 - RNA, 19 nt, Artificial Sequence
  Description of Artificial Sequence: Synthetic oligonucleotide
  Antisense strand to SEQ ID NO: 1553278
ugugguacagaacuagcca

SEQ ID NO: 1553280 - RNA, 19 nt, Artificial Sequence
  Description of Artificial Sequence: Synthetic oligonucleotide
  Sense strand starting at position 2803 of SEQ ID NO: 1245313
aguucuguaccacacugau

SEQ ID NO: 1553281 - RNA, 19 nt, Artificial Sequence
  Description of Artificial Sequence: Synthetic oligonucleotide
  Antisense strand to SEQ ID NO: 1553280
aucagugugguacagaacu

SEQ ID NO: 1553282 - RNA, 19 nt, Artificial Sequence
  Description of Artificial Sequence: Synthetic oligonucleotide
  Sense strand starting at position 3105 of SEQ ID NO: 1245313
uugagagcuagguaggauu

SEQ ID NO: 1553283 - RNA, 19 nt, Artificial Sequence
  Description of Artificial Sequence: Synthetic oligonucleotide
  Antisense strand to SEQ ID NO: 1553282
aauccuaccuagcucucaa

SEQ ID NO: 1553284 - RNA, 19 nt, Artificial Sequence
  Description of Artificial Sequence: Synthetic oligonucleotide
  Sense strand starting at position 3172 of SEQ ID NO: 1245313
ggaucagagugggcaucau

SEQ ID NO: 1553285 - RNA, 19 nt, Artificial Sequence
  Description of Artificial Sequence: Synthetic oligonucleotide
  Antisense strand to SEQ ID NO: 1553284
augaugcccacucugaucc

SEQ ID NO: 1553286 - RNA, 19 nt, Artificial Sequence
  Description of Artificial Sequence: Synthetic oligonucleotide
  Sense strand starting at position 3223 of SEQ ID NO: 1245313
ggucuuauggaauagguca

SEQ ID NO: 1553287 - RNA, 19 nt, Artificial Sequence
  Description of Artificial Sequence: Synthetic oligonucleotide
  Antisense strand to SEQ ID NO: 1553286
ugaccuauuccauaagacc

SEQ ID NO: 1553288 - RNA, 19 nt, Artificial Sequence
  Description of Artificial Sequence: Synthetic oligonucleotide
  Sense strand starting at position 3491 of SEQ ID NO: 1245313
agcaguuacucucugacaa

SEQ ID NO: 1553289 - RNA, 19 nt, Artificial Sequence
  Description of Artificial Sequence: Synthetic oligonucleotide
  Antisense strand to SEQ ID NO: 1553288
uugucagagaguaacugcu

SEQ ID NO: 1553290 - RNA, 19 nt, Artificial Sequence
  Description of Artificial Sequence: Synthetic oligonucleotide
  Sense strand starting at position 3492 of SEQ ID NO: 1245313
gcaguuacucucugacaaa

SEQ ID NO: 1553291 - RNA, 19 nt, Artificial Sequence
  Description of Artificial Sequence: Synthetic oligonucleotide
  Antisense strand to SEQ ID NO: 1553290
uuugucagagaguaacugc

SEQ ID NO: 1553292 - RNA, 19 nt, Artificial Sequence
  Description of Artificial Sequence: Synthetic oligonucleotide
  Sense strand starting at position 3842 of SEQ ID NO: 1245313
auaugaaguguuggauaug

SEQ ID NO: 1553293 - RNA, 19 nt, Artificial Sequence
  Description of Artificial Sequence: Synthetic oligonucleotide
  Antisense strand to SEQ ID NO: 1553292
cauauccaacacuucauau

SEQ ID NO: 1553294 - RNA, 19 nt, Artificial Sequence
  Description of Artificial Sequence: Synthetic oligonucleotide
  Sense strand starting at position 3847 of SEQ ID NO: 1245313
aaguguuggauauggauau

SEQ ID NO: 1553295 - RNA, 19 nt, Artificial Sequence
  Description of Artificial Sequence: Synthetic oligonucleotide
  Antisense strand to SEQ ID NO: 1553294
auauccauauccaacacuu

SEQ ID NO: 1553296 - RNA, 19 nt, Artificial Sequence
  Description of Artificial Sequence: Synthetic oligonucleotide
  Sense strand starting at position 3882 of SEQ ID NO: 1245313
acacucauggucuagcaua

SEQ ID NO: 1553297 - RNA, 19 nt, Artificial Sequence
  Description of Artificial Sequence: Synthetic oligonucleotide
  Antisense strand to SEQ ID NO: 1553296
uaugcuagaccaugagugu

SEQ ID NO: 1553298 - RNA, 19 nt, Artificial Sequence
  Description of Artificial Sequence: Synthetic oligonucleotide
  Sense strand starting at position 69 of SEQ ID NO: 1245314
aaagacaugguccgauaga

SEQ ID NO: 1553299 - RNA, 19 nt, Artificial Sequence
  Description of Artificial Sequence: Synthetic oligonucleotide
  Antisense strand to SEQ ID NO: 1553298
ucuaucggaccaugucuuu

SEQ ID NO: 1553300 - RNA, 19 nt, Artificial Sequence
  Description of Artificial Sequence: Synthetic oligonucleotide
  Sense strand starting at position 191 of SEQ ID NO: 1245314
guuguuaaugaugacaugu

SEQ ID NO: 1553301 - RNA, 19 nt, Artificial Sequence
  Description of Artificial Sequence: Synthetic oligonucleotide
  Antisense strand to SEQ ID NO: 1553300
acaugucaucauuaacaac

SEQ ID NO: 1553302 - RNA, 19 nt, Artificial Sequence
  Description of Artificial Sequence: Synthetic oligonucleotide
  Sense strand starting at position 298 of SEQ ID NO: 1245314
auaugagagagcugucuga

SEQ ID NO: 1553303 - RNA, 19 nt, Artificial Sequence
  Description of Artificial Sequence: Synthetic oligonucleotide
  Antisense strand to SEQ ID NO: 1553302
ucagacagcucucucauau

SEQ ID NO: 1553304 - RNA, 19 nt, Artificial Sequence
  Description of Artificial Sequence: Synthetic oligonucleotide
  Sense strand starting at position 313 of SEQ ID NO: 1245314
cugaguaccaagugaaaga

SEQ ID NO: 1553305 - RNA, 19 nt, Artificial Sequence
  Description of Artificial Sequence: Synthetic oligonucleotide
  Antisense strand to SEQ ID NO: 1553304
ucuuucacuugguacucag

SEQ ID NO: 1553306 - RNA, 19 nt, Artificial Sequence
  Description of Artificial Sequence: Synthetic oligonucleotide
  Sense strand starting at position 364 of SEQ ID NO: 1245314
uaacauggugauggauuau

SEQ ID NO: 1553307 - RNA, 19 nt, Artificial Sequence
  Description of Artificial Sequence: Synthetic oligonucleotide
  Antisense strand to SEQ ID NO: 1553306
auaauccaucaccauguua

SEQ ID NO: 1553308 - RNA, 19 nt, Artificial Sequence
  Description of Artificial Sequence: Synthetic oligonucleotide
  Sense strand starting at position 399 of SEQ ID NO: 1245314
gauaaagaccaauguaguc

SEQ ID NO: 1553309 - RNA, 19 nt, Artificial Sequence
  Description of Artificial Sequence: Synthetic oligonucleotide
  Antisense strand to SEQ ID NO: 1553308
gacuacauuggucuuuauc

SEQ ID NO: 1553310 - RNA, 19 nt, Artificial Sequence
  Description of Artificial Sequence: Synthetic oligonucleotide
  Sense strand starting at position 404 of SEQ ID NO: 1245314
agaccaauguagucacaau

SEQ ID NO: 1553311 - RNA, 19 nt, Artificial Sequence
  Description of Artificial Sequence: Synthetic oligonucleotide
  Antisense strand to SEQ ID NO: 1553310
auugugacuacauuggucu

SEQ ID NO: 1553312 - RNA, 19 nt, Artificial Sequence
  Description of Artificial Sequence: Synthetic oligonucleotide
  Sense strand starting at position 481 of SEQ ID NO: 1245314
gcagaacugagaggccauu

SEQ ID NO: 1553313 - RNA, 19 nt, Artificial Sequence
  Description of Artificial Sequence: Synthetic oligonucleotide
  Antisense strand to SEQ ID NO: 1553312
aauggccucucaguucugc

SEQ ID NO: 1553314 - RNA, 19 nt, Artificial Sequence
  Description of Artificial Sequence: Synthetic oligonucleotide
  Sense strand starting at position 487 of SEQ ID NO: 1245314
cugagaggccauuguggaa

SEQ ID NO: 1553315 - RNA, 19 nt, Artificial Sequence
  Description of Artificial Sequence: Synthetic oligonucleotide
  Antisense strand to SEQ ID NO: 1553314
uuccacaauggccucucag

SEQ ID NO: 1553316 - RNA, 19 nt, Artificial Sequence
  Description of Artificial Sequence: Synthetic oligonucleotide
  Sense strand starting at position 753 of SEQ ID NO: 1245314
augagucggguugaguaaa

SEQ ID NO: 1553317 - RNA, 19 nt, Artificial Sequence
  Description of Artificial Sequence: Synthetic oligonucleotide
  Antisense strand to SEQ ID NO: 1553316
uuuacucaacccgacucau

SEQ ID NO: 1553318 - RNA, 19 nt, Artificial Sequence
  Description of Artificial Sequence: Synthetic oligonucleotide
  Sense strand starting at position 853 of SEQ ID NO: 1245314
agauuuggcuuauuaacgu

SEQ ID NO: 1553319 - RNA, 19 nt, Artificial Sequence
  Description of Artificial Sequence: Synthetic oligonucleotide
  Antisense strand to SEQ ID NO: 1553318
acguuaauaagccaaaucu

SEQ ID NO: 1553320 - RNA, 19 nt, Artificial Sequence
  Description of Artificial Sequence: Synthetic oligonucleotide
  Sense strand starting at position 878 of SEQ ID NO: 1245314
agaaguuugggccaaaucu

SEQ ID NO: 1553321 - RNA, 19 nt, Artificial Sequence
  Description of Artificial Sequence: Synthetic oligonucleotide
  Antisense strand to SEQ ID NO: 1553320
agauuuggcccaaacuucu

SEQ ID NO: 1553322 - RNA, 19 nt, Artificial Sequence
  Description of Artificial Sequence: Synthetic oligonucleotide
  Sense strand starting at position 984 of SEQ ID NO: 1245314
gggaaugcuuaggcagaaa

SEQ ID NO: 1553323 - RNA, 19 nt, Artificial Sequence
  Description of Artificial Sequence: Synthetic oligonucleotide
  Antisense strand to SEQ ID NO: 1553322
uuucugccuaagcauuccc

SEQ ID NO: 1553324 - RNA, 19 nt, Artificial Sequence
  Description of Artificial Sequence: Synthetic oligonucleotide
  Sense strand starting at position 996 of SEQ ID NO: 1245314
gcagaaagcucggccauuu

SEQ ID NO: 1553325 - RNA, 19 nt, Artificial Sequence
  Description of Artificial Sequence: Synthetic oligonucleotide
  Antisense strand to SEQ ID NO: 1553324
aaauggccgagcuuucugc

SEQ ID NO: 1553326 - RNA, 19 nt, Artificial Sequence
  Description of Artificial Sequence: Synthetic oligonucleotide
  Sense strand starting at position 1018 of SEQ ID NO: 1245314
uugaucauauagguaacau

SEQ ID NO: 1553327 - RNA, 19 nt, Artificial Sequence
  Description of Artificial Sequence: Synthetic oligonucleotide
  Antisense strand to SEQ ID NO: 1553326
auguuaccuauaugaucaa

SEQ ID NO: 1553328 - RNA, 19 nt, Artificial Sequence
  Description of Artificial Sequence: Synthetic oligonucleotide
  Sense strand starting at position 1140 of SEQ ID NO: 1245314
cgagaaucauggguugaua

SEQ ID NO: 1553329 - RNA, 19 nt, Artificial Sequence
  Description of Artificial Sequence: Synthetic oligonucleotide
  Antisense strand to SEQ ID NO: 1553328
uaucaacccaugauucucg

SEQ ID NO: 1553330 - RNA, 19 nt, Artificial Sequence
  Description of Artificial Sequence: Synthetic oligonucleotide
  Sense strand starting at position 1142 of SEQ ID NO: 1245314
agaaucauggguugauacu

SEQ ID NO: 1553331 - RNA, 19 nt, Artificial Sequence
  Description of Artificial Sequence: Synthetic oligonucleotide
  Antisense strand to SEQ ID NO: 1553330
aguaucaacccaugauucu

SEQ ID NO: 1553332 - RNA, 19 nt, Artificial Sequence
  Description of Artificial Sequence: Synthetic oligonucleotide
  Sense strand starting at position 1277 of SEQ ID NO: 1245314
acuaguuauguggacuaau

SEQ ID NO: 1553333 - RNA, 19 nt, Artificial Sequence
  Description of Artificial Sequence: Synthetic oligonucleotide
  Antisense strand to SEQ ID NO: 1553332
auuaguccacauaacuagu

SEQ ID NO: 1553334 - RNA, 19 nt, Artificial Sequence
  Description of Artificial Sequence: Synthetic oligonucleotide
  Sense strand starting at position 1423 of SEQ ID NO: 1245314
gccauaauggccugcauuu

SEQ ID NO: 1553335 - RNA, 19 nt, Artificial Sequence
  Description of Artificial Sequence: Synthetic oligonucleotide
  Antisense strand to SEQ ID NO: 1553334
aaaugcaggccauuauggc

SEQ ID NO: 1553336 - RNA, 19 nt, Artificial Sequence
  Description of Artificial Sequence: Synthetic oligonucleotide
  Sense strand starting at position 1497 of SEQ ID NO: 1245314
aauugaauaccauggguua

SEQ ID NO: 1553337 - RNA, 19 nt, Artificial Sequence
  Description of Artificial Sequence: Synthetic oligonucleotide
  Antisense strand to SEQ ID NO: 1553336
uaacccaugguauucaauu

SEQ ID NO: 1553338 - RNA, 19 nt, Artificial Sequence
  Description of Artificial Sequence: Synthetic oligonucleotide
  Sense strand starting at position 1498 of SEQ ID NO: 1245314
auugaauaccauggguuaa

SEQ ID NO: 1553339 - RNA, 19 nt, Artificial Sequence
  Description of Artificial Sequence: Synthetic oligonucleotide
  Antisense strand to SEQ ID NO: 1553338
uuaacccaugguauucaau

SEQ ID NO: 1553340 - RNA, 19 nt, Artificial Sequence
  Description of Artificial Sequence: Synthetic oligonucleotide
  Sense strand starting at position 1509 of SEQ ID NO: 1245314
uggguuaaucuagguauag

SEQ ID NO: 1553341 - RNA, 19 nt, Artificial Sequence
  Description of Artificial Sequence: Synthetic oligonucleotide
  Antisense strand to SEQ ID NO: 1553340
cuauaccuagauuaaccca

SEQ ID NO: 1553342 - RNA, 19 nt, Artificial Sequence
  Description of Artificial Sequence: Synthetic oligonucleotide
  Sense strand starting at position 1511 of SEQ ID NO: 1245314
gguuaaucuagguauagua

SEQ ID NO: 1553343 - RNA, 19 nt, Artificial Sequence
  Description of Artificial Sequence: Synthetic oligonucleotide
  Antisense strand to SEQ ID NO: 1553342
uacuauaccuagauuaacc

SEQ ID NO: 1553344 - RNA, 19 nt, Artificial Sequence
  Description of Artificial Sequence: Synthetic oligonucleotide
  Sense strand starting at position 1629 of SEQ ID NO: 1245314
gggucaauauucucauuga

SEQ ID NO: 1553345 - RNA, 19 nt, Artificial Sequence
  Description of Artificial Sequence: Synthetic oligonucleotide
  Antisense strand to SEQ ID NO: 1553344
ucaaugagaauauugaccc

SEQ ID NO: 1553346 - RNA, 19 nt, Artificial Sequence
  Description of Artificial Sequence: Synthetic oligonucleotide
  Sense strand starting at position 2073 of SEQ ID NO: 1245314
aggacacaucuauggcaua

SEQ ID NO: 1553347 - RNA, 19 nt, Artificial Sequence
  Description of Artificial Sequence: Synthetic oligonucleotide
  Antisense strand to SEQ ID NO: 1553346
uaugccauagauguguccu

SEQ ID NO: 1553348 - RNA, 19 nt, Artificial Sequence
  Description of Artificial Sequence: Synthetic oligonucleotide
  Sense strand starting at position 2264 of SEQ ID NO: 1245314
uguucuuuggaguaugauu

SEQ ID NO: 1553349 - RNA, 19 nt, Artificial Sequence
  Description of Artificial Sequence: Synthetic oligonucleotide
  Antisense strand to SEQ ID NO: 1553348
aaucauacuccaaagaaca

SEQ ID NO: 1553350 - RNA, 19 nt, Artificial Sequence
  Description of Artificial Sequence: Synthetic oligonucleotide
  Sense strand starting at position 2269 of SEQ ID NO: 1245314
uuuggaguaugauuaccua

SEQ ID NO: 1553351 - RNA, 19 nt, Artificial Sequence
  Description of Artificial Sequence: Synthetic oligonucleotide
  Antisense strand to SEQ ID NO: 1553350
uagguaaucauacuccaaa

SEQ ID NO: 1553352 - RNA, 19 nt, Artificial Sequence
  Description of Artificial Sequence: Synthetic oligonucleotide
  Sense strand starting at position 2376 of SEQ ID NO: 1245314
ucaauauagguguagcuaa

SEQ ID NO: 1553353 - RNA, 19 nt, Artificial Sequence
  Description of Artificial Sequence: Synthetic oligonucleotide
  Antisense strand to SEQ ID NO: 1553352
uuagcuacaccuauauuga

SEQ ID NO: 1553354 - RNA, 19 nt, Artificial Sequence
  Description of Artificial Sequence: Synthetic oligonucleotide
  Sense strand starting at position 2550 of SEQ ID NO: 1245314
aaggaaauuugauggacuu

SEQ ID NO: 1553355 - RNA, 19 nt, Artificial Sequence
  Description of Artificial Sequence: Synthetic oligonucleotide
  Antisense strand to SEQ ID NO: 1553354
aaguccaucaaauuuccuu

SEQ ID NO: 1553356 - RNA, 19 nt, Artificial Sequence
  Description of Artificial Sequence: Synthetic oligonucleotide
  Sense strand starting at position 2561 of SEQ ID NO: 1245314
auggacuuuguauagguua

SEQ ID NO: 1553357 - RNA, 19 nt, Artificial Sequence
  Description of Artificial Sequence: Synthetic oligonucleotide
  Antisense strand to SEQ ID NO: 1553356
uaaccuauacaaaguccau

SEQ ID NO: 1553358 - RNA, 19 nt, Artificial Sequence
  Description of Artificial Sequence: Synthetic oligonucleotide
  Sense strand starting at position 2563 of SEQ ID NO: 1245314
ggacuuuguauagguuaag

SEQ ID NO: 1553359 - RNA, 19 nt, Artificial Sequence
  Description of Artificial Sequence: Synthetic oligonucleotide
  Antisense strand to SEQ ID NO: 1553358
cuuaaccuauacaaagucc

SEQ ID NO: 1553360 - RNA, 19 nt, Artificial Sequence
  Description of Artificial Sequence: Synthetic oligonucleotide
  Sense strand starting at position 2610 of SEQ ID NO: 1245314
aauuacagggcuuggauua

SEQ ID NO: 1553361 - RNA, 19 nt, Artificial Sequence
  Description of Artificial Sequence: Synthetic oligonucleotide
  Antisense strand to SEQ ID NO: 1553360
uaauccaagcccuguaauu

SEQ ID NO: 1553362 - RNA, 19 nt, Artificial Sequence
  Description of Artificial Sequence: Synthetic oligonucleotide
  Sense strand starting at position 2762 of SEQ ID NO: 1245314
acaugugcacuauacgaaa

SEQ ID NO: 1553363 - RNA, 19 nt, Artificial Sequence
  Description of Artificial Sequence: Synthetic oligonucleotide
  Antisense strand to SEQ ID NO: 1553362
uuucguauagugcacaugu

SEQ ID NO: 1553364 - RNA, 19 nt, Artificial Sequence
  Description of Artificial Sequence: Synthetic oligonucleotide
  Sense strand starting at position 3045 of SEQ ID NO: 1245314
auacauuagcauuaaggua

SEQ ID NO: 1553365 - RNA, 19 nt, Artificial Sequence
  Description of Artificial Sequence: Synthetic oligonucleotide
  Antisense strand to SEQ ID NO: 1553364
uaccuuaaugcuaauguau

SEQ ID NO: 1553366 - RNA, 19 nt, Artificial Sequence
  Description of Artificial Sequence: Synthetic oligonucleotide
  Sense strand starting at position 3325 of SEQ ID NO: 1245314
ugauuacaauggcuauaaa

SEQ ID NO: 1553367 - RNA, 19 nt, Artificial Sequence
  Description of Artificial Sequence: Synthetic oligonucleotide
  Antisense strand to SEQ ID NO: 1553366
uuuauagccauuguaauca

SEQ ID NO: 1553368 - RNA, 19 nt, Artificial Sequence
  Description of Artificial Sequence: Synthetic oligonucleotide
  Sense strand starting at position 3679 of SEQ ID NO: 1245314
cugagacugugggauuuaa

SEQ ID NO: 1553369 - RNA, 19 nt, Artificial Sequence
  Description of Artificial Sequence: Synthetic oligonucleotide
  Antisense strand to SEQ ID NO: 1553368
uuaaaucccacagucucag

SEQ ID NO: 1553370 - RNA, 19 nt, Artificial Sequence
  Description of Artificial Sequence: Synthetic oligonucleotide
  Sense strand starting at position 3734 of SEQ ID NO: 1245314
uacuuugggcacugggaaa

SEQ ID NO: 1553371 - RNA, 19 nt, Artificial Sequence
  Description of Artificial Sequence: Synthetic oligonucleotide
  Antisense strand to SEQ ID NO: 1553370
uuucccagugcccaaagua

SEQ ID NO: 1553372 - RNA, 19 nt, Artificial Sequence
  Description of Artificial Sequence: Synthetic oligonucleotide
  Sense strand starting at position 3792 of SEQ ID NO: 1245314
gcaugauaaaggugaacuc

SEQ ID NO: 1553373 - RNA, 19 nt, Artificial Sequence
  Description of Artificial Sequence: Synthetic oligonucleotide
  Antisense strand to SEQ ID NO: 1553372
gaguucaccuuuaucaugc

SEQ ID NO: 1553374 - RNA, 19 nt, Artificial Sequence
  Description of Artificial Sequence: Synthetic oligonucleotide
  Sense strand starting at position 3898 of SEQ ID NO: 1245314
ccguaagaacauuaucuga

SEQ ID NO: 1553375 - RNA, 19 nt, Artificial Sequence
  Description of Artificial Sequence: Synthetic oligonucleotide
  Antisense strand to SEQ ID NO: 1553374
ucagauaauguucuuacgg

SEQ ID NO: 1553376 - RNA, 19 nt, Artificial Sequence
  Description of Artificial Sequence: Synthetic oligonucleotide
  Sense strand starting at position 3960 of SEQ ID NO: 1245314
uugccuguugccuuuagua

SEQ ID NO: 1553377 - RNA, 19 nt, Artificial Sequence
  Description of Artificial Sequence: Synthetic oligonucleotide
  Antisense strand to SEQ ID NO: 1553376
uacuaaaggcaacaggcaa

SEQ ID NO: 1553378 - RNA, 19 nt, Artificial Sequence
  Description of Artificial Sequence: Synthetic oligonucleotide
  Sense strand starting at position 82 of SEQ ID NO: 1245315
ugcauuccaucaguugcaa

SEQ ID NO: 1553379 - RNA, 19 nt, Artificial Sequence
  Description of Artificial Sequence: Synthetic oligonucleotide
  Antisense strand to SEQ ID NO: 1553378
uugcaacugauggaaugca

SEQ ID NO: 1553380 - RNA, 19 nt, Artificial Sequence
  Description of Artificial Sequence: Synthetic oligonucleotide
  Sense strand starting at position 186 of SEQ ID NO: 1245315
gucaccuucuagcugauuu

SEQ ID NO: 1553381 - RNA, 19 nt, Artificial Sequence
  Description of Artificial Sequence: Synthetic oligonucleotide
  Antisense strand to SEQ ID NO: 1553380
aaaucagcuagaaggugac

SEQ ID NO: 1553382 - RNA, 19 nt, Artificial Sequence
  Description of Artificial Sequence: Synthetic oligonucleotide
  Sense strand starting at position 240 of SEQ ID NO: 1245315
gccacuggugauggguaaa

SEQ ID NO: 1553383 - RNA, 19 nt, Artificial Sequence
  Description of Artificial Sequence: Synthetic oligonucleotide
  Antisense strand to SEQ ID NO: 1553382
uuuacccaucaccaguggc

SEQ ID NO: 1553384 - RNA, 19 nt, Artificial Sequence
  Description of Artificial Sequence: Synthetic oligonucleotide
  Sense strand starting at position 278 of SEQ ID NO: 1245315
ggucgugccacugcucaaa

SEQ ID NO: 1553385 - RNA, 19 nt, Artificial Sequence
  Description of Artificial Sequence: Synthetic oligonucleotide
  Antisense strand to SEQ ID NO: 1553384
uuugagcaguggcacgacc

SEQ ID NO: 1553386 - RNA, 19 nt, Artificial Sequence
  Description of Artificial Sequence: Synthetic oligonucleotide
  Sense strand starting at position 304 of SEQ ID NO: 1245315
ugaggugcuccaugucuga

SEQ ID NO: 1553387 - RNA, 19 nt, Artificial Sequence
  Description of Artificial Sequence: Synthetic oligonucleotide
  Antisense strand to SEQ ID NO: 1553386
ucagacauggagcaccuca

SEQ ID NO: 1553388 - RNA, 19 nt, Artificial Sequence
  Description of Artificial Sequence: Synthetic oligonucleotide
  Sense strand starting at position 319 of SEQ ID NO: 1245315
cugagugcuucgcuccuga

SEQ ID NO: 1553389 - RNA, 19 nt, Artificial Sequence
  Description of Artificial Sequence: Synthetic oligonucleotide
  Antisense strand to SEQ ID NO: 1553388
ucaggagcgaagcacucag

SEQ ID NO: 1553390 - RNA, 19 nt, Artificial Sequence
  Description of Artificial Sequence: Synthetic oligonucleotide
  Sense strand starting at position 323 of SEQ ID NO: 1245315
gugcuucgcuccugaaacu

SEQ ID NO: 1553391 - RNA, 19 nt, Artificial Sequence
  Description of Artificial Sequence: Synthetic oligonucleotide
  Antisense strand to SEQ ID NO: 1553390
aguuucaggagcgaagcac

SEQ ID NO: 1553392 - RNA, 19 nt, Artificial Sequence
  Description of Artificial Sequence: Synthetic oligonucleotide
  Sense strand starting at position 350 of SEQ ID NO: 1245315
aacucugagccagaguagu

SEQ ID NO: 1553393 - RNA, 19 nt, Artificial Sequence
  Description of Artificial Sequence: Synthetic oligonucleotide
  Antisense strand to SEQ ID NO: 1553392
acuacucuggcucagaguu

SEQ ID NO: 1553394 - RNA, 19 nt, Artificial Sequence
  Description of Artificial Sequence: Synthetic oligonucleotide
  Sense strand starting at position 401 of SEQ ID NO: 1245315
uggaaugcugauugagcuu

SEQ ID NO: 1553395 - RNA, 19 nt, Artificial Sequence
  Description of Artificial Sequence: Synthetic oligonucleotide
  Antisense strand to SEQ ID NO: 1553394
aagcucaaucagcauucca

SEQ ID NO: 1553396 - RNA, 19 nt, Artificial Sequence
  Description of Artificial Sequence: Synthetic oligonucleotide
  Sense strand starting at position 407 of SEQ ID NO: 1245315
gcugauugagcuugauaug

SEQ ID NO: 1553397 - RNA, 19 nt, Artificial Sequence
  Description of Artificial Sequence: Synthetic oligonucleotide
  Antisense strand to SEQ ID NO: 1553396
cauaucaagcucaaucagc

SEQ ID NO: 1553398 - RNA, 19 nt, Artificial Sequence
  Description of Artificial Sequence: Synthetic oligonucleotide
  Sense strand starting at position 410 of SEQ ID NO: 1245315
gauugagcuugauaugaac

SEQ ID NO: 1553399 - RNA, 19 nt, Artificial Sequence
  Description of Artificial Sequence: Synthetic oligonucleotide
  Antisense strand to SEQ ID NO: 1553398
guucauaucaagcucaauc

SEQ ID NO: 1553400 - RNA, 19 nt, Artificial Sequence
  Description of Artificial Sequence: Synthetic oligonucleotide
  Sense strand starting at position 413 of SEQ ID NO: 1245315
ugagcuugauaugaacuaa

SEQ ID NO: 1553401 - RNA, 19 nt, Artificial Sequence
  Description of Artificial Sequence: Synthetic oligonucleotide
  Antisense strand to SEQ ID NO: 1553400
uuaguucauaucaagcuca

SEQ ID NO: 1553402 - RNA, 19 nt, Artificial Sequence
  Description of Artificial Sequence: Synthetic oligonucleotide
  Sense strand starting at position 582 of SEQ ID NO: 1245315
ugugucaauucucccauca

SEQ ID NO: 1553403 - RNA, 19 nt, Artificial Sequence
  Description of Artificial Sequence: Synthetic oligonucleotide
  Antisense strand to SEQ ID NO: 1553402
ugaugggagaauugacaca

SEQ ID NO: 1553404 - RNA, 19 nt, Artificial Sequence
  Description of Artificial Sequence: Synthetic oligonucleotide
  Sense strand starting at position 684 of SEQ ID NO: 1245315
uccacuugugcccaagaca

SEQ ID NO: 1553405 - RNA, 19 nt, Artificial Sequence
  Description of Artificial Sequence: Synthetic oligonucleotide
  Antisense strand to SEQ ID NO: 1553404
ugucuugggcacaagugga

SEQ ID NO: 1553406 - RNA, 19 nt, Artificial Sequence
  Description of Artificial Sequence: Synthetic oligonucleotide
  Sense strand starting at position 687 of SEQ ID NO: 1245315
acuugugcccaagacaauu

SEQ ID NO: 1553407 - RNA, 19 nt, Artificial Sequence
  Description of Artificial Sequence: Synthetic oligonucleotide
  Antisense strand to SEQ ID NO: 1553406
aauugucuugggcacaagu

SEQ ID NO: 1553408 - RNA, 19 nt, Artificial Sequence
  Description of Artificial Sequence: Synthetic oligonucleotide
  Sense strand starting at position 780 of SEQ ID NO: 1245315
guuccacaugcacgaauau

SEQ ID NO: 1553409 - RNA, 19 nt, Artificial Sequence
  Description of Artificial Sequence: Synthetic oligonucleotide
  Antisense strand to SEQ ID NO: 1553408
auauucgugcauguggaac

SEQ ID NO: 1553410 - RNA, 19 nt, Artificial Sequence
  Description of Artificial Sequence: Synthetic oligonucleotide
  Sense strand starting at position 781 of SEQ ID NO: 1245315
uuccacaugcacgaauauu

SEQ ID NO: 1553411 - RNA, 19 nt, Artificial Sequence
  Description of Artificial Sequence: Synthetic oligonucleotide
  Antisense strand to SEQ ID NO: 1553410
aauauucgugcauguggaa

SEQ ID NO: 1553412 - RNA, 19 nt, Artificial Sequence
  Description of Artificial Sequence: Synthetic oligonucleotide
  Sense strand starting at position 895 of SEQ ID NO: 1245315
uggcuugugugguggacua

SEQ ID NO: 1553413 - RNA, 19 nt, Artificial Sequence
  Description of Artificial Sequence: Synthetic oligonucleotide
  Antisense strand to SEQ ID NO: 1553412
uaguccaccacacaagcca

SEQ ID NO: 1553414 - RNA, 19 nt, Artificial Sequence
  Description of Artificial Sequence: Synthetic oligonucleotide
  Sense strand starting at position 897 of SEQ ID NO: 1245315
gcuugugugguggacuauu

SEQ ID NO: 1553415 - RNA, 19 nt, Artificial Sequence
  Description of Artificial Sequence: Synthetic oligonucleotide
  Antisense strand to SEQ ID NO: 1553414
aauaguccaccacacaagc

SEQ ID NO: 1553416 - RNA, 19 nt, Artificial Sequence
  Description of Artificial Sequence: Synthetic oligonucleotide
  Sense strand starting at position 1040 of SEQ ID NO: 1245315
gguggcucuagguaguuaa

SEQ ID NO: 1553417 - RNA, 19 nt, Artificial Sequence
  Description of Artificial Sequence: Synthetic oligonucleotide
  Antisense strand to SEQ ID NO: 1553416
uuaacuaccuagagccacc

SEQ ID NO: 1553418 - RNA, 19 nt, Artificial Sequence
  Description of Artificial Sequence: Synthetic oligonucleotide
  Sense strand starting at position 1043 of SEQ ID NO: 1245315
ggcucuagguaguuaauuu

SEQ ID NO: 1553419 - RNA, 19 nt, Artificial Sequence
  Description of Artificial Sequence: Synthetic oligonucleotide
  Antisense strand to SEQ ID NO: 1553418
aaauuaacuaccuagagcc

SEQ ID NO: 1553420 - RNA, 19 nt, Artificial Sequence
  Description of Artificial Sequence: Synthetic oligonucleotide
  Sense strand starting at position 1063 of SEQ ID NO: 1245315
aguguuauuagacaguggu

SEQ ID NO: 1553421 - RNA, 19 nt, Artificial Sequence
  Description of Artificial Sequence: Synthetic oligonucleotide
  Antisense strand to SEQ ID NO: 1553420
accacugucuaauaacacu

SEQ ID NO: 1553422 - RNA, 19 nt, Artificial Sequence
  Description of Artificial Sequence: Synthetic oligonucleotide
  Sense strand starting at position 2041 of SEQ ID NO: 1245315
gcaggaggcauuggauaaa

SEQ ID NO: 1553423 - RNA, 19 nt, Artificial Sequence
  Description of Artificial Sequence: Synthetic oligonucleotide
  Antisense strand to SEQ ID NO: 1553422
uuuauccaaugccuccugc

SEQ ID NO: 1553424 - RNA, 19 nt, Artificial Sequence
  Description of Artificial Sequence: Synthetic oligonucleotide
  Sense strand starting at position 2131 of SEQ ID NO: 1245315
uggugcagucauuaaaucu

SEQ ID NO: 1553425 - RNA, 19 nt, Artificial Sequence
  Description of Artificial Sequence: Synthetic oligonucleotide
  Antisense strand to SEQ ID NO: 1553424
agauuuaaugacugcacca

SEQ ID NO: 1553426 - RNA, 19 nt, Artificial Sequence
  Description of Artificial Sequence: Synthetic oligonucleotide
  Sense strand starting at position 2846 of SEQ ID NO: 1245315
uuuggcuucugguuagaca

SEQ ID NO: 1553427 - RNA, 19 nt, Artificial Sequence
  Description of Artificial Sequence: Synthetic oligonucleotide
  Antisense strand to SEQ ID NO: 1553426
ugucuaaccagaagccaaa

SEQ ID NO: 1553428 - RNA, 19 nt, Artificial Sequence
  Description of Artificial Sequence: Synthetic oligonucleotide
  Sense strand starting at position 2847 of SEQ ID NO: 1245315
uuggcuucugguuagacaa

SEQ ID NO: 1553429 - RNA, 19 nt, Artificial Sequence
  Description of Artificial Sequence: Synthetic oligonucleotide
  Antisense strand to SEQ ID NO: 1553428
uugucuaaccagaagccaa

SEQ ID NO: 1553430 - RNA, 19 nt, Artificial Sequence
  Description of Artificial Sequence: Synthetic oligonucleotide
  Sense strand starting at position 2849 of SEQ ID NO: 1245315
ggcuucugguuagacaaau

SEQ ID NO: 1553431 - RNA, 19 nt, Artificial Sequence
  Description of Artificial Sequence: Synthetic oligonucleotide
  Antisense strand to SEQ ID NO: 1553430
auuugucuaaccagaagcc

SEQ ID NO: 1553432 - RNA, 19 nt, Artificial Sequence
  Description of Artificial Sequence: Synthetic oligonucleotide
  Sense strand starting at position 3117 of SEQ ID NO: 1245315
cacagaucucuagggaggu

SEQ ID NO: 1553433 - RNA, 19 nt, Artificial Sequence
  Description of Artificial Sequence: Synthetic oligonucleotide
  Antisense strand to SEQ ID NO: 1553432
accucccuagagaucugug

SEQ ID NO: 1553434 - RNA, 19 nt, Artificial Sequence
  Description of Artificial Sequence: Synthetic oligonucleotide
  Sense strand starting at position 3954 of SEQ ID NO: 1245315
acuaucagaccuugugaaa

SEQ ID NO: 1553435 - RNA, 19 nt, Artificial Sequence
  Description of Artificial Sequence: Synthetic oligonucleotide
  Antisense strand to SEQ ID NO: 1553434
uuucacaaggucugauagu

SEQ ID NO: 1553436 - RNA, 19 nt, Artificial Sequence
  Description of Artificial Sequence: Synthetic oligonucleotide
  Sense strand starting at position 280 of SEQ ID NO: 1245316
uauccaauaggugauuagu

SEQ ID NO: 1553437 - RNA, 19 nt, Artificial Sequence
  Description of Artificial Sequence: Synthetic oligonucleotide
  Antisense strand to SEQ ID NO: 1553436
acuaaucaccuauuggaua

SEQ ID NO: 1553438 - RNA, 19 nt, Artificial Sequence
  Description of Artificial Sequence: Synthetic oligonucleotide
  Sense strand starting at position 282 of SEQ ID NO: 1245316
uccaauaggugauuaguuu

SEQ ID NO: 1553439 - RNA, 19 nt, Artificial Sequence
  Description of Artificial Sequence: Synthetic oligonucleotide
  Antisense strand to SEQ ID NO: 1553438
aaacuaaucaccuauugga

SEQ ID NO: 1553440 - RNA, 19 nt, Artificial Sequence
  Description of Artificial Sequence: Synthetic oligonucleotide
  Sense strand starting at position 780 of SEQ ID NO: 1245316
ggaguuaugacacgaacuu

SEQ ID NO: 1553441 - RNA, 19 nt, Artificial Sequence
  Description of Artificial Sequence: Synthetic oligonucleotide
  Antisense strand to SEQ ID NO: 1553440
aaguucgugucauaacucc

SEQ ID NO: 1553442 - RNA, 19 nt, Artificial Sequence
  Description of Artificial Sequence: Synthetic oligonucleotide
  Sense strand starting at position 792 of SEQ ID NO: 1245316
cgaacuuguauuuggccaa

SEQ ID NO: 1553443 - RNA, 19 nt, Artificial Sequence
  Description of Artificial Sequence: Synthetic oligonucleotide
  Antisense strand to SEQ ID NO: 1553442
uuggccaaauacaaguucg

SEQ ID NO: 1553444 - RNA, 19 nt, Artificial Sequence
  Description of Artificial Sequence: Synthetic oligonucleotide
  Sense strand starting at position 1121 of SEQ ID NO: 1245316
auagaccuccaccgauaaa

SEQ ID NO: 1553445 - RNA, 19 nt, Artificial Sequence
  Description of Artificial Sequence: Synthetic oligonucleotide
  Antisense strand to SEQ ID NO: 1553444
uuuaucgguggaggucuau

SEQ ID NO: 1553446 - RNA, 19 nt, Artificial Sequence
  Description of Artificial Sequence: Synthetic oligonucleotide
  Sense strand starting at position 1295 of SEQ ID NO: 1245316
ccuugaaagccugauaagu

SEQ ID NO: 1553447 - RNA, 19 nt, Artificial Sequence
  Description of Artificial Sequence: Synthetic oligonucleotide
  Antisense strand to SEQ ID NO: 1553446
acuuaucaggcuuucaagg

SEQ ID NO: 1553448 - RNA, 19 nt, Artificial Sequence
  Description of Artificial Sequence: Synthetic oligonucleotide
  Sense strand starting at position 1305 of SEQ ID NO: 1245316
cugauaaguguugguaaau

SEQ ID NO: 1553449 - RNA, 19 nt, Artificial Sequence
  Description of Artificial Sequence: Synthetic oligonucleotide
  Antisense strand to SEQ ID NO: 1553448
auuuaccaacacuuaucag

SEQ ID NO: 1553450 - RNA, 19 nt, Artificial Sequence
  Description of Artificial Sequence: Synthetic oligonucleotide
  Sense strand starting at position 1306 of SEQ ID NO: 1245316
ugauaaguguugguaaauu

SEQ ID NO: 1553451 - RNA, 19 nt, Artificial Sequence
  Description of Artificial Sequence: Synthetic oligonucleotide
  Antisense strand to SEQ ID NO: 1553450
aauuuaccaacacuuauca

SEQ ID NO: 1553452 - RNA, 19 nt, Artificial Sequence
  Description of Artificial Sequence: Synthetic oligonucleotide
  Sense strand starting at position 1626 of SEQ ID NO: 1245316
cugaaugggauaugugauu

SEQ ID NO: 1553453 - RNA, 19 nt, Artificial Sequence
  Description of Artificial Sequence: Synthetic oligonucleotide
  Antisense strand to SEQ ID NO: 1553452
aaucacauaucccauucag

SEQ ID NO: 1553454 - RNA, 19 nt, Artificial Sequence
  Description of Artificial Sequence: Synthetic oligonucleotide
  Sense strand starting at position 1639 of SEQ ID NO: 1245316
gugauugcgacguuguuga

SEQ ID NO: 1553455 - RNA, 19 nt, Artificial Sequence
  Description of Artificial Sequence: Synthetic oligonucleotide
  Antisense strand to SEQ ID NO: 1553454
ucaacaacgucgcaaucac

SEQ ID NO: 1553456 - RNA, 19 nt, Artificial Sequence
  Description of Artificial Sequence: Synthetic oligonucleotide
  Sense strand starting at position 1731 of SEQ ID NO: 1245316
ugaagauguaaguauuggu

SEQ ID NO: 1553457 - RNA, 19 nt, Artificial Sequence
  Description of Artificial Sequence: Synthetic oligonucleotide
  Antisense strand to SEQ ID NO: 1553456
accaauacuuacaucuuca

SEQ ID NO: 1553458 - RNA, 19 nt, Artificial Sequence
  Description of Artificial Sequence: Synthetic oligonucleotide
  Sense strand starting at position 2206 of SEQ ID NO: 1245316
agacacaaguguuucuuaa

SEQ ID NO: 1553459 - RNA, 19 nt, Artificial Sequence
  Description of Artificial Sequence: Synthetic oligonucleotide
  Antisense strand to SEQ ID NO: 1553458
uuaagaaacacuugugucu

SEQ ID NO: 1553460 - RNA, 19 nt, Artificial Sequence
  Description of Artificial Sequence: Synthetic oligonucleotide
  Sense strand starting at position 2208 of SEQ ID NO: 1245316
acacaaguguuucuuaaau

SEQ ID NO: 1553461 - RNA, 19 nt, Artificial Sequence
  Description of Artificial Sequence: Synthetic oligonucleotide
  Antisense strand to SEQ ID NO: 1553460
auuuaagaaacacuugugu

SEQ ID NO: 1553462 - RNA, 19 nt, Artificial Sequence
  Description of Artificial Sequence: Synthetic oligonucleotide
  Sense strand starting at position 2274 of SEQ ID NO: 1245316
ucccuaagagacugugaaa

SEQ ID NO: 1553463 - RNA, 19 nt, Artificial Sequence
  Description of Artificial Sequence: Synthetic oligonucleotide
  Antisense strand to SEQ ID NO: 1553462
uuucacagucucuuaggga

SEQ ID NO: 1553464 - RNA, 19 nt, Artificial Sequence
  Description of Artificial Sequence: Synthetic oligonucleotide
  Sense strand starting at position 2334 of SEQ ID NO: 1245316
uguaaucuugcagaagaac

SEQ ID NO: 1553465 - RNA, 19 nt, Artificial Sequence
  Description of Artificial Sequence: Synthetic oligonucleotide
  Antisense strand to SEQ ID NO: 1553464
guucuucugcaagauuaca

SEQ ID NO: 1553466 - RNA, 19 nt, Artificial Sequence
  Description of Artificial Sequence: Synthetic oligonucleotide
  Sense strand starting at position 2683 of SEQ ID NO: 1245316
ggaggaaagugucugaggu

SEQ ID NO: 1553467 - RNA, 19 nt, Artificial Sequence
  Description of Artificial Sequence: Synthetic oligonucleotide
  Antisense strand to SEQ ID NO: 1553466
accucagacacuuuccucc

SEQ ID NO: 1553468 - RNA, 19 nt, Artificial Sequence
  Description of Artificial Sequence: Synthetic oligonucleotide
  Sense strand starting at position 2684 of SEQ ID NO: 1245316
gaggaaagugucugagguu

SEQ ID NO: 1553469 - RNA, 19 nt, Artificial Sequence
  Description of Artificial Sequence: Synthetic oligonucleotide
  Antisense strand to SEQ ID NO: 1553468
aaccucagacacuuuccuc

SEQ ID NO: 1553470 - RNA, 19 nt, Artificial Sequence
  Description of Artificial Sequence: Synthetic oligonucleotide
  Sense strand starting at position 2766 of SEQ ID NO: 1245316
uagaguaaccaauguguau

SEQ ID NO: 1553471 - RNA, 19 nt, Artificial Sequence
  Description of Artificial Sequence: Synthetic oligonucleotide
  Antisense strand to SEQ ID NO: 1553470
auacacauugguuacucua

SEQ ID NO: 1553472 - RNA, 19 nt, Artificial Sequence
  Description of Artificial Sequence: Synthetic oligonucleotide
  Sense strand starting at position 2781 of SEQ ID NO: 1245316
guauauuccauguauguga

SEQ ID NO: 1553473 - RNA, 19 nt, Artificial Sequence
  Description of Artificial Sequence: Synthetic oligonucleotide
  Antisense strand to SEQ ID NO: 1553472
ucacauacauggaauauac

SEQ ID NO: 1553474 - RNA, 19 nt, Artificial Sequence
  Description of Artificial Sequence: Synthetic oligonucleotide
  Sense strand starting at position 2783 of SEQ ID NO: 1245316
auauuccauguaugugaau

SEQ ID NO: 1553475 - RNA, 19 nt, Artificial Sequence
  Description of Artificial Sequence: Synthetic oligonucleotide
  Antisense strand to SEQ ID NO: 1553474
auucacauacauggaauau

SEQ ID NO: 1553476 - RNA, 19 nt, Artificial Sequence
  Description of Artificial Sequence: Synthetic oligonucleotide
  Sense strand starting at position 2789 of SEQ ID NO: 1245316
cauguaugugaaugagaga

SEQ ID NO: 1553477 - RNA, 19 nt, Artificial Sequence
  Description of Artificial Sequence: Synthetic oligonucleotide
  Antisense strand to SEQ ID NO: 1553476
ucucucauucacauacaug

SEQ ID NO: 1553478 - RNA, 19 nt, Artificial Sequence
  Description of Artificial Sequence: Synthetic oligonucleotide
  Sense strand starting at position 2931 of SEQ ID NO: 1245316
augacagcuuccuugagau

SEQ ID NO: 1553479 - RNA, 19 nt, Artificial Sequence
  Description of Artificial Sequence: Synthetic oligonucleotide
  Antisense strand to SEQ ID NO: 1553478
aucucaaggaagcugucau

SEQ ID NO: 1553480 - RNA, 19 nt, Artificial Sequence
  Description of Artificial Sequence: Synthetic oligonucleotide
  Sense strand starting at position 2933 of SEQ ID NO: 1245316
gacagcuuccuugagauua

SEQ ID NO: 1553481 - RNA, 19 nt, Artificial Sequence
  Description of Artificial Sequence: Synthetic oligonucleotide
  Antisense strand to SEQ ID NO: 1553480
uaaucucaaggaagcuguc

SEQ ID NO: 1553482 - RNA, 19 nt, Artificial Sequence
  Description of Artificial Sequence: Synthetic oligonucleotide
  Sense strand starting at position 2953 of SEQ ID NO: 1245316
augacaguuucccugacca

SEQ ID NO: 1553483 - RNA, 19 nt, Artificial Sequence
  Description of Artificial Sequence: Synthetic oligonucleotide
  Antisense strand to SEQ ID NO: 1553482
uggucagggaaacugucau

SEQ ID NO: 1553484 - RNA, 19 nt, Artificial Sequence
  Description of Artificial Sequence: Synthetic oligonucleotide
  Sense strand starting at position 2992 of SEQ ID NO: 1245316
gguggaucgcucuagaaug

SEQ ID NO: 1553485 - RNA, 19 nt, Artificial Sequence
  Description of Artificial Sequence: Synthetic oligonucleotide
  Antisense strand to SEQ ID NO: 1553484
cauucuagagcgauccacc

SEQ ID NO: 1553486 - RNA, 19 nt, Artificial Sequence
  Description of Artificial Sequence: Synthetic oligonucleotide
  Sense strand starting at position 2994 of SEQ ID NO: 1245316
uggaucgcucuagaaugaa

SEQ ID NO: 1553487 - RNA, 19 nt, Artificial Sequence
  Description of Artificial Sequence: Synthetic oligonucleotide
  Antisense strand to SEQ ID NO: 1553486
uucauucuagagcgaucca

SEQ ID NO: 1553488 - RNA, 19 nt, Artificial Sequence
  Description of Artificial Sequence: Synthetic oligonucleotide
  Sense strand starting at position 3019 of SEQ ID NO: 1245316
acccgaaguucucuuuaag

SEQ ID NO: 1553489 - RNA, 19 nt, Artificial Sequence
  Description of Artificial Sequence: Synthetic oligonucleotide
  Antisense strand to SEQ ID NO: 1553488
cuuaaagagaacuucgggu

SEQ ID NO: 1553490 - RNA, 19 nt, Artificial Sequence
  Description of Artificial Sequence: Synthetic oligonucleotide
  Sense strand starting at position 3029 of SEQ ID NO: 1245316
cucuuuaagcuuuagugaa

SEQ ID NO: 1553491 - RNA, 19 nt, Artificial Sequence
  Description of Artificial Sequence: Synthetic oligonucleotide
  Antisense strand to SEQ ID NO: 1553490
uucacuaaagcuuaaagag

SEQ ID NO: 1553492 - RNA, 19 nt, Artificial Sequence
  Description of Artificial Sequence: Synthetic oligonucleotide
  Sense strand starting at position 3031 of SEQ ID NO: 1245316
cuuuaagcuuuagugaaac

SEQ ID NO: 1553493 - RNA, 19 nt, Artificial Sequence
  Description of Artificial Sequence: Synthetic oligonucleotide
  Antisense strand to SEQ ID NO: 1553492
guuucacuaaagcuuaaag

SEQ ID NO: 1553494 - RNA, 19 nt, Artificial Sequence
  Description of Artificial Sequence: Synthetic oligonucleotide
  Sense strand starting at position 3033 of SEQ ID NO: 1245316
uuaagcuuuagugaaacga

SEQ ID NO: 1553495 - RNA, 19 nt, Artificial Sequence
  Description of Artificial Sequence: Synthetic oligonucleotide
  Antisense strand to SEQ ID NO: 1553494
ucguuucacuaaagcuuaa

SEQ ID NO: 1553496 - RNA, 19 nt, Artificial Sequence
  Description of Artificial Sequence: Synthetic oligonucleotide
  Sense strand starting at position 3037 of SEQ ID NO: 1245316
gcuuuagugaaacgaaaua

SEQ ID NO: 1553497 - RNA, 19 nt, Artificial Sequence
  Description of Artificial Sequence: Synthetic oligonucleotide
  Antisense strand to SEQ ID NO: 1553496
uauuucguuucacuaaagc

SEQ ID NO: 1553498 - RNA, 19 nt, Artificial Sequence
  Description of Artificial Sequence: Synthetic oligonucleotide
  Sense strand starting at position 3274 of SEQ ID NO: 1245316
gcuggcaaucaguauauca

SEQ ID NO: 1553499 - RNA, 19 nt, Artificial Sequence
  Description of Artificial Sequence: Synthetic oligonucleotide
  Antisense strand to SEQ ID NO: 1553498
ugauauacugauugccagc

SEQ ID NO: 1553500 - RNA, 19 nt, Artificial Sequence
  Description of Artificial Sequence: Synthetic oligonucleotide
  Sense strand starting at position 3276 of SEQ ID NO: 1245316
uggcaaucaguauaucaug

SEQ ID NO: 1553501 - RNA, 19 nt, Artificial Sequence
  Description of Artificial Sequence: Synthetic oligonucleotide
  Antisense strand to SEQ ID NO: 1553500
caugauauacugauugcca

SEQ ID NO: 1553502 - RNA, 19 nt, Artificial Sequence
  Description of Artificial Sequence: Synthetic oligonucleotide
  Sense strand starting at position 3762 of SEQ ID NO: 1245316
cuguacaauguccacgauu

SEQ ID NO: 1553503 - RNA, 19 nt, Artificial Sequence
  Description of Artificial Sequence: Synthetic oligonucleotide
  Antisense strand to SEQ ID NO: 1553502
aaucguggacauuguacag

SEQ ID NO: 1553504 - RNA, 19 nt, Artificial Sequence
  Description of Artificial Sequence: Synthetic oligonucleotide
  Sense strand starting at position 3871 of SEQ ID NO: 1245316
ucuccaacugcuuaagagu

SEQ ID NO: 1553505 - RNA, 19 nt, Artificial Sequence
  Description of Artificial Sequence: Synthetic oligonucleotide
  Antisense strand to SEQ ID NO: 1553504
acucuuaagcaguuggaga

SEQ ID NO: 1553506 - RNA, 19 nt, Artificial Sequence
  Description of Artificial Sequence: Synthetic oligonucleotide
  Sense strand starting at position 3877 of SEQ ID NO: 1245316
acugcuuaagaguguaaag

SEQ ID NO: 1553507 - RNA, 19 nt, Artificial Sequence
  Description of Artificial Sequence: Synthetic oligonucleotide
  Antisense strand to SEQ ID NO: 1553506
cuuuacacucuuaagcagu

SEQ ID NO: 1553508 - RNA, 19 nt, Artificial Sequence
  Description of Artificial Sequence: Synthetic oligonucleotide
  Sense strand starting at position 3879 of SEQ ID NO: 1245316
ugcuuaagaguguaaagag

SEQ ID NO: 1553509 - RNA, 19 nt, Artificial Sequence
  Description of Artificial Sequence: Synthetic oligonucleotide
  Antisense strand to SEQ ID NO: 1553508
cucuuuacacucuuaagca

SEQ ID NO: 1553510 - RNA, 19 nt, Artificial Sequence
  Description of Artificial Sequence: Synthetic oligonucleotide
  Sense strand starting at position 3886 of SEQ ID NO: 1245316
gaguguaaagaguguugau

SEQ ID NO: 1553511 - RNA, 19 nt, Artificial Sequence
  Description of Artificial Sequence: Synthetic oligonucleotide
  Antisense strand to SEQ ID NO: 1553510
aucaacacucuuuacacuc

SEQ ID NO: 1553512 - RNA, 19 nt, Artificial Sequence
  Description of Artificial Sequence: Synthetic oligonucleotide
  Sense strand starting at position 3901 of SEQ ID NO: 1245316
ugaugaguucuguauuacu

SEQ ID NO: 1553513 - RNA, 19 nt, Artificial Sequence
  Description of Artificial Sequence: Synthetic oligonucleotide
  Antisense strand to SEQ ID NO: 1553512
aguaauacagaacucauca

SEQ ID NO: 1553514 - RNA, 19 nt, Artificial Sequence
  Description of Artificial Sequence: Synthetic oligonucleotide
  Sense strand starting at position 3921 of SEQ ID NO: 1245316
augggucuugguuauaaga

SEQ ID NO: 1553515 - RNA, 19 nt, Artificial Sequence
  Description of Artificial Sequence: Synthetic oligonucleotide
  Antisense strand to SEQ ID NO: 1553514
ucuuauaaccaagacccau

SEQ ID NO: 1553516 - RNA, 19 nt, Artificial Sequence
  Description of Artificial Sequence: Synthetic oligonucleotide
  Sense strand starting at position 2028 of SEQ ID NO: 1245317
cugugaccucauuggaguu

SEQ ID NO: 1553517 - RNA, 19 nt, Artificial Sequence
  Description of Artificial Sequence: Synthetic oligonucleotide
  Antisense strand to SEQ ID NO: 1553516
aacuccaaugaggucacag

SEQ ID NO: 1553518 - RNA, 19 nt, Artificial Sequence
  Description of Artificial Sequence: Synthetic oligonucleotide
  Sense strand starting at position 2883 of SEQ ID NO: 1245317
cauguuguugggugcuaga

SEQ ID NO: 1553519 - RNA, 19 nt, Artificial Sequence
  Description of Artificial Sequence: Synthetic oligonucleotide
  Antisense strand to SEQ ID NO: 1553518
ucuagcacccaacaacaug

SEQ ID NO: 1553520 - RNA, 19 nt, Artificial Sequence
  Description of Artificial Sequence: Synthetic oligonucleotide
  Sense strand starting at position 2886 of SEQ ID NO: 1245317
guuguugggugcuagauuu

SEQ ID NO: 1553521 - RNA, 19 nt, Artificial Sequence
  Description of Artificial Sequence: Synthetic oligonucleotide
  Antisense strand to SEQ ID NO: 1553520
aaaucuagcacccaacaac

SEQ ID NO: 1553522 - RNA, 19 nt, Artificial Sequence
  Description of Artificial Sequence: Synthetic oligonucleotide
  Sense strand starting at position 2921 of SEQ ID NO: 1245317
uuaaauguuucugagacuu

SEQ ID NO: 1553523 - RNA, 19 nt, Artificial Sequence
  Description of Artificial Sequence: Synthetic oligonucleotide
  Antisense strand to SEQ ID NO: 1553522
aagucucagaaacauuuaa

SEQ ID NO: 1553524 - RNA, 19 nt, Artificial Sequence
  Description of Artificial Sequence: Synthetic oligonucleotide
  Sense strand starting at position 2923 of SEQ ID NO: 1245317
aaauguuucugagacuugu

SEQ ID NO: 1553525 - RNA, 19 nt, Artificial Sequence
  Description of Artificial Sequence: Synthetic oligonucleotide
  Antisense strand to SEQ ID NO: 1553524
acaagucucagaaacauuu

SEQ ID NO: 1553526 - RNA, 19 nt, Artificial Sequence
  Description of Artificial Sequence: Synthetic oligonucleotide
  Sense strand starting at position 2927 of SEQ ID NO: 1245317
guuucugagacuuguucug

SEQ ID NO: 1553527 - RNA, 19 nt, Artificial Sequence
  Description of Artificial Sequence: Synthetic oligonucleotide
  Antisense strand to SEQ ID NO: 1553526
cagaacaagucucagaaac

SEQ ID NO: 1553528 - RNA, 19 nt, Artificial Sequence
  Description of Artificial Sequence: Synthetic oligonucleotide
  Sense strand starting at position 2934 of SEQ ID NO: 1245317
agacuuguucugugaugca

SEQ ID NO: 1553529 - RNA, 19 nt, Artificial Sequence
  Description of Artificial Sequence: Synthetic oligonucleotide
  Antisense strand to SEQ ID NO: 1553528
ugcaucacagaacaagucu

SEQ ID NO: 1553530 - RNA, 19 nt, Artificial Sequence
  Description of Artificial Sequence: Synthetic oligonucleotide
  Sense strand starting at position 2939 of SEQ ID NO: 1245317
uguucugugaugcagucaa

SEQ ID NO: 1553531 - RNA, 19 nt, Artificial Sequence
  Description of Artificial Sequence: Synthetic oligonucleotide
  Antisense strand to SEQ ID NO: 1553530
uugacugcaucacagaaca

SEQ ID NO: 1553532 - RNA, 19 nt, Artificial Sequence
  Description of Artificial Sequence: Synthetic oligonucleotide
  Sense strand starting at position 2951 of SEQ ID NO: 1245317
cagucaaauuacugggaaa

SEQ ID NO: 1553533 - RNA, 19 nt, Artificial Sequence
  Description of Artificial Sequence: Synthetic oligonucleotide
  Antisense strand to SEQ ID NO: 1553532
uuucccaguaauuugacug

SEQ ID NO: 1553534 - RNA, 19 nt, Artificial Sequence
  Description of Artificial Sequence: Synthetic oligonucleotide
  Sense strand starting at position 2953 of SEQ ID NO: 1245317
gucaaauuacugggaaauc

SEQ ID NO: 1553535 - RNA, 19 nt, Artificial Sequence
  Description of Artificial Sequence: Synthetic oligonucleotide
  Antisense strand to SEQ ID NO: 1553534
gauuucccaguaauuugac

SEQ ID NO: 1553536 - RNA, 19 nt, Artificial Sequence
  Description of Artificial Sequence: Synthetic oligonucleotide
  Sense strand starting at position 2954 of SEQ ID NO: 1245317
ucaaauuacugggaaaucu

SEQ ID NO: 1553537 - RNA, 19 nt, Artificial Sequence
  Description of Artificial Sequence: Synthetic oligonucleotide
  Antisense strand to SEQ ID NO: 1553536
agauuucccaguaauuuga

SEQ ID NO: 1553538 - RNA, 19 nt, Artificial Sequence
  Description of Artificial Sequence: Synthetic oligonucleotide
  Sense strand starting at position 3177 of SEQ ID NO: 1245317
gggugaucagugcaccaaa

SEQ ID NO: 1553539 - RNA, 19 nt, Artificial Sequence
  Description of Artificial Sequence: Synthetic oligonucleotide
  Antisense strand to SEQ ID NO: 1553538
uuuggugcacugaucaccc

SEQ ID NO: 1553540 - RNA, 19 nt, Artificial Sequence
  Description of Artificial Sequence: Synthetic oligonucleotide
  Sense strand starting at position 3283 of SEQ ID NO: 1245317
aaugcaggagcugaguaau

SEQ ID NO: 1553541 - RNA, 19 nt, Artificial Sequence
  Description of Artificial Sequence: Synthetic oligonucleotide
  Antisense strand to SEQ ID NO: 1553540
auuacucagcuccugcauu

SEQ ID NO: 1553542 - RNA, 19 nt, Artificial Sequence
  Description of Artificial Sequence: Synthetic oligonucleotide
  Sense strand starting at position 3286 of SEQ ID NO: 1245317
gcaggagcugaguaaugga

SEQ ID NO: 1553543 - RNA, 19 nt, Artificial Sequence
  Description of Artificial Sequence: Synthetic oligonucleotide
  Antisense strand to SEQ ID NO: 1553542
uccauuacucagcuccugc

SEQ ID NO: 1553544 - RNA, 19 nt, Artificial Sequence
  Description of Artificial Sequence: Synthetic oligonucleotide
  Sense strand starting at position 3289 of SEQ ID NO: 1245317
ggagcugaguaauggagaa

SEQ ID NO: 1553545 - RNA, 19 nt, Artificial Sequence
  Description of Artificial Sequence: Synthetic oligonucleotide
  Antisense strand to SEQ ID NO: 1553544
uucuccauuacucagcucc

SEQ ID NO: 1553546 - RNA, 19 nt, Artificial Sequence
  Description of Artificial Sequence: Synthetic oligonucleotide
  Sense strand starting at position 3318 of SEQ ID NO: 1245317
uguagagauuuaugagguu

SEQ ID NO: 1553547 - RNA, 19 nt, Artificial Sequence
  Description of Artificial Sequence: Synthetic oligonucleotide
  Antisense strand to SEQ ID NO: 1553546
aaccucauaaaucucuaca

SEQ ID NO: 1553548 - RNA, 19 nt, Artificial Sequence
  Description of Artificial Sequence: Synthetic oligonucleotide
  Sense strand starting at position 3321 of SEQ ID NO: 1245317
agagauuuaugagguuuau

SEQ ID NO: 1553549 - RNA, 19 nt, Artificial Sequence
  Description of Artificial Sequence: Synthetic oligonucleotide
  Antisense strand to SEQ ID NO: 1553548
auaaaccucauaaaucucu

SEQ ID NO: 1553550 - RNA, 19 nt, Artificial Sequence
  Description of Artificial Sequence: Synthetic oligonucleotide
  Sense strand starting at position 3347 of SEQ ID NO: 1245317
aggaaaugcuaauagaaga

SEQ ID NO: 1553551 - RNA, 19 nt, Artificial Sequence
  Description of Artificial Sequence: Synthetic oligonucleotide
  Antisense strand to SEQ ID NO: 1553550
ucuucuauuagcauuuccu

SEQ ID NO: 1553552 - RNA, 19 nt, Artificial Sequence
  Description of Artificial Sequence: Synthetic oligonucleotide
  Sense strand starting at position 3403 of SEQ ID NO: 1245317
gccucuguuuccucugaac

SEQ ID NO: 1553553 - RNA, 19 nt, Artificial Sequence
  Description of Artificial Sequence: Synthetic oligonucleotide
  Antisense strand to SEQ ID NO: 1553552
guucagaggaaacagaggc

SEQ ID NO: 1553554 - RNA, 19 nt, Artificial Sequence
  Description of Artificial Sequence: Synthetic oligonucleotide
  Sense strand starting at position 3438 of SEQ ID NO: 1245317
aaccaugagucagcgguuu

SEQ ID NO: 1553555 - RNA, 19 nt, Artificial Sequence
  Description of Artificial Sequence: Synthetic oligonucleotide
  Antisense strand to SEQ ID NO: 1553554
aaaccgcugacucaugguu

SEQ ID NO: 1553556 - RNA, 19 nt, Artificial Sequence
  Description of Artificial Sequence: Synthetic oligonucleotide
  Sense strand starting at position 3440 of SEQ ID NO: 1245317
ccaugagucagcgguuuga

SEQ ID NO: 1553557 - RNA, 19 nt, Artificial Sequence
  Description of Artificial Sequence: Synthetic oligonucleotide
  Antisense strand to SEQ ID NO: 1553556
ucaaaccgcugacucaugg

SEQ ID NO: 1553558 - RNA, 19 nt, Artificial Sequence
  Description of Artificial Sequence: Synthetic oligonucleotide
  Sense strand starting at position 3444 of SEQ ID NO: 1245317
gagucagcgguuugacuua

SEQ ID NO: 1553559 - RNA, 19 nt, Artificial Sequence
  Description of Artificial Sequence: Synthetic oligonucleotide
  Antisense strand to SEQ ID NO: 1553558
uaagucaaaccgcugacuc

SEQ ID NO: 1553560 - RNA, 19 nt, Artificial Sequence
  Description of Artificial Sequence: Synthetic oligonucleotide
  Sense strand starting at position 3449 of SEQ ID NO: 1245317
agcgguuugacuuaacucu

SEQ ID NO: 1553561 - RNA, 19 nt, Artificial Sequence
  Description of Artificial Sequence: Synthetic oligonucleotide
  Antisense strand to SEQ ID NO: 1553560
agaguuaagucaaaccgcu

SEQ ID NO: 1553562 - RNA, 19 nt, Artificial Sequence
  Description of Artificial Sequence: Synthetic oligonucleotide
  Sense strand starting at position 3486 of SEQ ID NO: 1245317
gcuggcucugaucacagaa

SEQ ID NO: 1553563 - RNA, 19 nt, Artificial Sequence
  Description of Artificial Sequence: Synthetic oligonucleotide
  Antisense strand to SEQ ID NO: 1553562
uucugugaucagagccagc

SEQ ID NO: 1553564 - RNA, 19 nt, Artificial Sequence
  Description of Artificial Sequence: Synthetic oligonucleotide
  Sense strand starting at position 3631 of SEQ ID NO: 1245317
aaggaagguuccuuaugca

SEQ ID NO: 1553565 - RNA, 19 nt, Artificial Sequence
  Description of Artificial Sequence: Synthetic oligonucleotide
  Antisense strand to SEQ ID NO: 1553564
ugcauaaggaaccuuccuu

SEQ ID NO: 1553566 - RNA, 19 nt, Artificial Sequence
  Description of Artificial Sequence: Synthetic oligonucleotide
  Sense strand starting at position 3655 of SEQ ID NO: 1245317
gcacuacuaugucugaauu

SEQ ID NO: 1553567 - RNA, 19 nt, Artificial Sequence
  Description of Artificial Sequence: Synthetic oligonucleotide
  Antisense strand to SEQ ID NO: 1553566
aauucagacauaguagugc

SEQ ID NO: 1553568 - RNA, 19 nt, Artificial Sequence
  Description of Artificial Sequence: Synthetic oligonucleotide
  Sense strand starting at position 3753 of SEQ ID NO: 1245317
aaguuauaggguuguaaag

SEQ ID NO: 1553569 - RNA, 19 nt, Artificial Sequence
  Description of Artificial Sequence: Synthetic oligonucleotide
  Antisense strand to SEQ ID NO: 1553568
cuuuacaacccuauaacuu

SEQ ID NO: 1553570 - RNA, 19 nt, Artificial Sequence
  Description of Artificial Sequence: Synthetic oligonucleotide
  Sense strand starting at position 3755 of SEQ ID NO: 1245317
guuauaggguuguaaagag

SEQ ID NO: 1553571 - RNA, 19 nt, Artificial Sequence
  Description of Artificial Sequence: Synthetic oligonucleotide
  Antisense strand to SEQ ID NO: 1553570
cucuuuacaacccuauaac

SEQ ID NO: 1553572 - RNA, 19 nt, Artificial Sequence
  Description of Artificial Sequence: Synthetic oligonucleotide
  Sense strand starting at position 3759 of SEQ ID NO: 1245317
uaggguuguaaagagcauu

SEQ ID NO: 1553573 - RNA, 19 nt, Artificial Sequence
  Description of Artificial Sequence: Synthetic oligonucleotide
  Antisense strand to SEQ ID NO: 1553572
aaugcucuuuacaacccua

SEQ ID NO: 1553574 - RNA, 19 nt, Artificial Sequence
  Description of Artificial Sequence: Synthetic oligonucleotide
  Sense strand starting at position 3762 of SEQ ID NO: 1245317
gguuguaaagagcauuaaa

SEQ ID NO: 1553575 - RNA, 19 nt, Artificial Sequence
  Description of Artificial Sequence: Synthetic oligonucleotide
  Antisense strand to SEQ ID NO: 1553574
uuuaaugcucuuuacaacc

SEQ ID NO: 1553576 - RNA, 19 nt, Artificial Sequence
  Description of Artificial Sequence: Synthetic oligonucleotide
  Sense strand starting at position 3783 of SEQ ID NO: 1245317
agguaauauuuguaaugca

SEQ ID NO: 1553577 - RNA, 19 nt, Artificial Sequence
  Description of Artificial Sequence: Synthetic oligonucleotide
  Antisense strand to SEQ ID NO: 1553576
ugcauuacaaauauuaccu

SEQ ID NO: 1553578 - RNA, 19 nt, Artificial Sequence
  Description of Artificial Sequence: Synthetic oligonucleotide
  Sense strand starting at position 3819 of SEQ ID NO: 1245317
aaacacuaguuguugugaa

SEQ ID NO: 1553579 - RNA, 19 nt, Artificial Sequence
  Description of Artificial Sequence: Synthetic oligonucleotide
  Antisense strand to SEQ ID NO: 1553578
uucacaacaacuaguguuu

SEQ ID NO: 1553580 - RNA, 19 nt, Artificial Sequence
  Description of Artificial Sequence: Synthetic oligonucleotide
  Sense strand starting at position 3858 of SEQ ID NO: 1245317
acgguuugauccuuugaga

SEQ ID NO: 1553581 - RNA, 19 nt, Artificial Sequence
  Description of Artificial Sequence: Synthetic oligonucleotide
  Antisense strand to SEQ ID NO: 1553580
ucucaaaggaucaaaccgu

SEQ ID NO: 1553582 - RNA, 19 nt, Artificial Sequence
  Description of Artificial Sequence: Synthetic oligonucleotide
  Sense strand starting at position 3861 of SEQ ID NO: 1245317
guuugauccuuugagacug

SEQ ID NO: 1553583 - RNA, 19 nt, Artificial Sequence
  Description of Artificial Sequence: Synthetic oligonucleotide
  Antisense strand to SEQ ID NO: 1553582
cagucucaaaggaucaaac

SEQ ID NO: 1553584 - RNA, 19 nt, Artificial Sequence
  Description of Artificial Sequence: Synthetic oligonucleotide
  Sense strand starting at position 3863 of SEQ ID NO: 1245317
uugauccuuugagacugaa

SEQ ID NO: 1553585 - RNA, 19 nt, Artificial Sequence
  Description of Artificial Sequence: Synthetic oligonucleotide
  Antisense strand to SEQ ID NO: 1553584
uucagucucaaaggaucaa

SEQ ID NO: 1553586 - RNA, 19 nt, Artificial Sequence
  Description of Artificial Sequence: Synthetic oligonucleotide
  Sense strand starting at position 3884 of SEQ ID NO: 1245317
gaccuuacuuuauggguua

SEQ ID NO: 1553587 - RNA, 19 nt, Artificial Sequence
  Description of Artificial Sequence: Synthetic oligonucleotide
  Antisense strand to SEQ ID NO: 1553586
uaacccauaaaguaagguc

SEQ ID NO: 1553588 - RNA, 19 nt, Artificial Sequence
  Description of Artificial Sequence: Synthetic oligonucleotide
  Sense strand starting at position 3920 of SEQ ID NO: 1245317
gugauacccuuucuggauu

SEQ ID NO: 1553589 - RNA, 19 nt, Artificial Sequence
  Description of Artificial Sequence: Synthetic oligonucleotide
  Antisense strand to SEQ ID NO: 1553588
aauccagaaaggguaucac

SEQ ID NO: 1553590 - RNA, 19 nt, Artificial Sequence
  Description of Artificial Sequence: Synthetic oligonucleotide
  Sense strand starting at position 3921 of SEQ ID NO: 1245317
ugauacccuuucuggauua

SEQ ID NO: 1553591 - RNA, 19 nt, Artificial Sequence
  Description of Artificial Sequence: Synthetic oligonucleotide
  Antisense strand to SEQ ID NO: 1553590
uaauccagaaaggguauca

SEQ ID NO: 1553592 - RNA, 19 nt, Artificial Sequence
  Description of Artificial Sequence: Synthetic oligonucleotide
  Sense strand starting at position 3934 of SEQ ID NO: 1245317
ggauuagguuuauuccacu

SEQ ID NO: 1553593 - RNA, 19 nt, Artificial Sequence
  Description of Artificial Sequence: Synthetic oligonucleotide
  Antisense strand to SEQ ID NO: 1553592
aguggaauaaaccuaaucc

SEQ ID NO: 1553594 - RNA, 19 nt, Artificial Sequence
  Description of Artificial Sequence: Synthetic oligonucleotide
  Sense strand starting at position 3975 of SEQ ID NO: 1245317
cugacugguucugugggaa

SEQ ID NO: 1553595 - RNA, 19 nt, Artificial Sequence
  Description of Artificial Sequence: Synthetic oligonucleotide
  Antisense strand to SEQ ID NO: 1553594
uucccacagaaccagucag

SEQ ID NO: 1553596 - RNA, 19 nt, Artificial Sequence
  Description of Artificial Sequence: Synthetic oligonucleotide
  Sense strand starting at position 316 of SEQ ID NO: 1245318
gccaguguaucccucagga

SEQ ID NO: 1553597 - RNA, 19 nt, Artificial Sequence
  Description of Artificial Sequence: Synthetic oligonucleotide
  Antisense strand to SEQ ID NO: 1553596
uccugagggauacacuggc

SEQ ID NO: 1553598 - RNA, 19 nt, Artificial Sequence
  Description of Artificial Sequence: Synthetic oligonucleotide
  Sense strand starting at position 318 of SEQ ID NO: 1245318
caguguaucccucaggaua

SEQ ID NO: 1553599 - RNA, 19 nt, Artificial Sequence
  Description of Artificial Sequence: Synthetic oligonucleotide
  Antisense strand to SEQ ID NO: 1553598
uauccugagggauacacug

SEQ ID NO: 1553600 - RNA, 19 nt, Artificial Sequence
  Description of Artificial Sequence: Synthetic oligonucleotide
  Sense strand starting at position 517 of SEQ ID NO: 1245318
cucaaauaaguguauacuu

SEQ ID NO: 1553601 - RNA, 19 nt, Artificial Sequence
  Description of Artificial Sequence: Synthetic oligonucleotide
  Antisense strand to SEQ ID NO: 1553600
aaguauacacuuauuugag

SEQ ID NO: 1553602 - RNA, 19 nt, Artificial Sequence
  Description of Artificial Sequence: Synthetic oligonucleotide
  Sense strand starting at position 559 of SEQ ID NO: 1245318
ccgacuugacaaugaauca

SEQ ID NO: 1553603 - RNA, 19 nt, Artificial Sequence
  Description of Artificial Sequence: Synthetic oligonucleotide
  Antisense strand to SEQ ID NO: 1553602
ugauucauugucaagucgg

SEQ ID NO: 1553604 - RNA, 19 nt, Artificial Sequence
  Description of Artificial Sequence: Synthetic oligonucleotide
  Sense strand starting at position 643 of SEQ ID NO: 1245318
auccuuguguuacuacaaa

SEQ ID NO: 1553605 - RNA, 19 nt, Artificial Sequence
  Description of Artificial Sequence: Synthetic oligonucleotide
  Antisense strand to SEQ ID NO: 1553604
uuuguaguaacacaaggau

SEQ ID NO: 1553606 - RNA, 19 nt, Artificial Sequence
  Description of Artificial Sequence: Synthetic oligonucleotide
  Sense strand starting at position 673 of SEQ ID NO: 1245318
uuaaucacaggcuguuaau

SEQ ID NO: 1553607 - RNA, 19 nt, Artificial Sequence
  Description of Artificial Sequence: Synthetic oligonucleotide
  Antisense strand to SEQ ID NO: 1553606
auuaacagccugugauuaa

SEQ ID NO: 1553608 - RNA, 19 nt, Artificial Sequence
  Description of Artificial Sequence: Synthetic oligonucleotide
  Sense strand starting at position 682 of SEQ ID NO: 1245318
ggcuguuaaucauccacag

SEQ ID NO: 1553609 - RNA, 19 nt, Artificial Sequence
  Description of Artificial Sequence: Synthetic oligonucleotide
  Antisense strand to SEQ ID NO: 1553608
cuguggaugauuaacagcc

SEQ ID NO: 1553610 - RNA, 19 nt, Artificial Sequence
  Description of Artificial Sequence: Synthetic oligonucleotide
  Sense strand starting at position 686 of SEQ ID NO: 1245318
guuaaucauccacaguagu

SEQ ID NO: 1553611 - RNA, 19 nt, Artificial Sequence
  Description of Artificial Sequence: Synthetic oligonucleotide
  Antisense strand to SEQ ID NO: 1553610
acuacuguggaugauuaac

SEQ ID NO: 1553612 - RNA, 19 nt, Artificial Sequence
  Description of Artificial Sequence: Synthetic oligonucleotide
  Sense strand starting at position 735 of SEQ ID NO: 1245318
ggaggaagcaauugaguug

SEQ ID NO: 1553613 - RNA, 19 nt, Artificial Sequence
  Description of Artificial Sequence: Synthetic oligonucleotide
  Antisense strand to SEQ ID NO: 1553612
caacucaauugcuuccucc

SEQ ID NO: 1553614 - RNA, 19 nt, Artificial Sequence
  Description of Artificial Sequence: Synthetic oligonucleotide
  Sense strand starting at position 836 of SEQ ID NO: 1245318
aggugaugguggucaaacu

SEQ ID NO: 1553615 - RNA, 19 nt, Artificial Sequence
  Description of Artificial Sequence: Synthetic oligonucleotide
  Antisense strand to SEQ ID NO: 1553614
aguuugaccaccaucaccu

SEQ ID NO: 1553616 - RNA, 19 nt, Artificial Sequence
  Description of Artificial Sequence: Synthetic oligonucleotide
  Sense strand starting at position 929 of SEQ ID NO: 1245318
gucagcuguucuuuggaca

SEQ ID NO: 1553617 - RNA, 19 nt, Artificial Sequence
  Description of Artificial Sequence: Synthetic oligonucleotide
  Antisense strand to SEQ ID NO: 1553616
uguccaaagaacagcugac

SEQ ID NO: 1553618 - RNA, 19 nt, Artificial Sequence
  Description of Artificial Sequence: Synthetic oligonucleotide
  Sense strand starting at position 1029 of SEQ ID NO: 1245318
guauauuacaaguacucgu

SEQ ID NO: 1553619 - RNA, 19 nt, Artificial Sequence
  Description of Artificial Sequence: Synthetic oligonucleotide
  Antisense strand to SEQ ID NO: 1553618
acgaguacuuguaauauac

SEQ ID NO: 1553620 - RNA, 19 nt, Artificial Sequence
  Description of Artificial Sequence: Synthetic oligonucleotide
  Sense strand starting at position 1036 of SEQ ID NO: 1245318
acaaguacucguuaaacuc

SEQ ID NO: 1553621 - RNA, 19 nt, Artificial Sequence
  Description of Artificial Sequence: Synthetic oligonucleotide
  Antisense strand to SEQ ID NO: 1553620
gaguuuaacgaguacuugu

SEQ ID NO: 1553622 - RNA, 19 nt, Artificial Sequence
  Description of Artificial Sequence: Synthetic oligonucleotide
  Sense strand starting at position 1042 of SEQ ID NO: 1245318
acucguuaaacucaugugu

SEQ ID NO: 1553623 - RNA, 19 nt, Artificial Sequence
  Description of Artificial Sequence: Synthetic oligonucleotide
  Antisense strand to SEQ ID NO: 1553622
acacaugaguuuaacgagu

SEQ ID NO: 1553624 - RNA, 19 nt, Artificial Sequence
  Description of Artificial Sequence: Synthetic oligonucleotide
  Sense strand starting at position 1064 of SEQ ID NO: 1245318
acaagugcgagguaucaua

SEQ ID NO: 1553625 - RNA, 19 nt, Artificial Sequence
  Description of Artificial Sequence: Synthetic oligonucleotide
  Antisense strand to SEQ ID NO: 1553624
uaugauaccucgcacuugu

SEQ ID NO: 1553626 - RNA, 19 nt, Artificial Sequence
  Description of Artificial Sequence: Synthetic oligonucleotide
  Sense strand starting at position 1192 of SEQ ID NO: 1245318
agaaaucauucccaggaga

SEQ ID NO: 1553627 - RNA, 19 nt, Artificial Sequence
  Description of Artificial Sequence: Synthetic oligonucleotide
  Antisense strand to SEQ ID NO: 1553626
ucuccugggaaugauuucu

SEQ ID NO: 1553628 - RNA, 19 nt, Artificial Sequence
  Description of Artificial Sequence: Synthetic oligonucleotide
  Sense strand starting at position 1258 of SEQ ID NO: 1245318
agccuuucuccagggagga

SEQ ID NO: 1553629 - RNA, 19 nt, Artificial Sequence
  Description of Artificial Sequence: Synthetic oligonucleotide
  Antisense strand to SEQ ID NO: 1553628
uccucccuggagaaaggcu

SEQ ID NO: 1553630 - RNA, 19 nt, Artificial Sequence
  Description of Artificial Sequence: Synthetic oligonucleotide
  Sense strand starting at position 1259 of SEQ ID NO: 1245318
gccuuucuccagggaggau

SEQ ID NO: 1553631 - RNA, 19 nt, Artificial Sequence
  Description of Artificial Sequence: Synthetic oligonucleotide
  Antisense strand to SEQ ID NO: 1553630
auccucccuggagaaaggc

SEQ ID NO: 1553632 - RNA, 19 nt, Artificial Sequence
  Description of Artificial Sequence: Synthetic oligonucleotide
  Sense strand starting at position 1324 of SEQ ID NO: 1245318
uuggugugugcuggaggaa

SEQ ID NO: 1553633 - RNA, 19 nt, Artificial Sequence
  Description of Artificial Sequence: Synthetic oligonucleotide
  Antisense strand to SEQ ID NO: 1553632
uuccuccagcacacaccaa

SEQ ID NO: 1553634 - RNA, 19 nt, Artificial Sequence
  Description of Artificial Sequence: Synthetic oligonucleotide
  Sense strand starting at position 1325 of SEQ ID NO: 1245318
uggugugugcuggaggaaa

SEQ ID NO: 1553635 - RNA, 19 nt, Artificial Sequence
  Description of Artificial Sequence: Synthetic oligonucleotide
  Antisense strand to SEQ ID NO: 1553634
uuuccuccagcacacacca

SEQ ID NO: 1553636 - RNA, 19 nt, Artificial Sequence
  Description of Artificial Sequence: Synthetic oligonucleotide
  Sense strand starting at position 1445 of SEQ ID NO: 1245318
ucagucccuucuucgaaua

SEQ ID NO: 1553637 - RNA, 19 nt, Artificial Sequence
  Description of Artificial Sequence: Synthetic oligonucleotide
  Antisense strand to SEQ ID NO: 1553636
uauucgaagaagggacuga

SEQ ID NO: 1553638 - RNA, 19 nt, Artificial Sequence
  Description of Artificial Sequence: Synthetic oligonucleotide
  Sense strand starting at position 1450 of SEQ ID NO: 1245318
cccuucuucgaauauggga

SEQ ID NO: 1553639 - RNA, 19 nt, Artificial Sequence
  Description of Artificial Sequence: Synthetic oligonucleotide
  Antisense strand to SEQ ID NO: 1553638
ucccauauucgaagaaggg

SEQ ID NO: 1553640 - RNA, 19 nt, Artificial Sequence
  Description of Artificial Sequence: Synthetic oligonucleotide
  Sense strand starting at position 1582 of SEQ ID NO: 1245318
ccagcauccucuuucugua

SEQ ID NO: 1553641 - RNA, 19 nt, Artificial Sequence
  Description of Artificial Sequence: Synthetic oligonucleotide
  Antisense strand to SEQ ID NO: 1553640
uacagaaagaggaugcugg

SEQ ID NO: 1553642 - RNA, 19 nt, Artificial Sequence
  Description of Artificial Sequence: Synthetic oligonucleotide
  Sense strand starting at position 1808 of SEQ ID NO: 1245318
uggugucuucgagaaaucu

SEQ ID NO: 1553643 - RNA, 19 nt, Artificial Sequence
  Description of Artificial Sequence: Synthetic oligonucleotide
  Antisense strand to SEQ ID NO: 1553642
agauuucucgaagacacca

SEQ ID NO: 1553644 - RNA, 19 nt, Artificial Sequence
  Description of Artificial Sequence: Synthetic oligonucleotide
  Sense strand starting at position 2962 of SEQ ID NO: 1245318
gaagccuuccuugggaacu

SEQ ID NO: 1553645 - RNA, 19 nt, Artificial Sequence
  Description of Artificial Sequence: Synthetic oligonucleotide
  Antisense strand to SEQ ID NO: 1553644
aguucccaaggaaggcuuc

SEQ ID NO: 1553646 - RNA, 19 nt, Artificial Sequence
  Description of Artificial Sequence: Synthetic oligonucleotide
  Sense strand starting at position 2968 of SEQ ID NO: 1245318
uuccuugggaacuguagua

SEQ ID NO: 1553647 - RNA, 19 nt, Artificial Sequence
  Description of Artificial Sequence: Synthetic oligonucleotide
  Antisense strand to SEQ ID NO: 1553646
uacuacaguucccaaggaa

SEQ ID NO: 1553648 - RNA, 19 nt, Artificial Sequence
  Description of Artificial Sequence: Synthetic oligonucleotide
  Sense strand starting at position 2988 of SEQ ID NO: 1245318
cguuaaucaauuuggguuu

SEQ ID NO: 1553649 - RNA, 19 nt, Artificial Sequence
  Description of Artificial Sequence: Synthetic oligonucleotide
  Antisense strand to SEQ ID NO: 1553648
aaacccaaauugauuaacg

SEQ ID NO: 1553650 - RNA, 19 nt, Artificial Sequence
  Description of Artificial Sequence: Synthetic oligonucleotide
  Sense strand starting at position 3243 of SEQ ID NO: 1245318
cccagucaguugguuauuu

SEQ ID NO: 1553651 - RNA, 19 nt, Artificial Sequence
  Description of Artificial Sequence: Synthetic oligonucleotide
  Antisense strand to SEQ ID NO: 1553650
aaauaaccaacugacuggg

SEQ ID NO: 1553652 - RNA, 19 nt, Artificial Sequence
  Description of Artificial Sequence: Synthetic oligonucleotide
  Sense strand starting at position 3265 of SEQ ID NO: 1245318
uggugcuuuccucaccaua

SEQ ID NO: 1553653 - RNA, 19 nt, Artificial Sequence
  Description of Artificial Sequence: Synthetic oligonucleotide
  Antisense strand to SEQ ID NO: 1553652
uauggugaggaaagcacca

SEQ ID NO: 1553654 - RNA, 19 nt, Artificial Sequence
  Description of Artificial Sequence: Synthetic oligonucleotide
  Sense strand starting at position 3267 of SEQ ID NO: 1245318
gugcuuuccucaccauauu

SEQ ID NO: 1553655 - RNA, 19 nt, Artificial Sequence
  Description of Artificial Sequence: Synthetic oligonucleotide
  Antisense strand to SEQ ID NO: 1553654
aauauggugaggaaagcac

SEQ ID NO: 1553656 - RNA, 19 nt, Artificial Sequence
  Description of Artificial Sequence: Synthetic oligonucleotide
  Sense strand starting at position 3341 of SEQ ID NO: 1245318
auggcuaaguuggucuaua

SEQ ID NO: 1553657 - RNA, 19 nt, Artificial Sequence
  Description of Artificial Sequence: Synthetic oligonucleotide
  Antisense strand to SEQ ID NO: 1553656
uauagaccaacuuagccau

SEQ ID NO: 1553658 - RNA, 19 nt, Artificial Sequence
  Description of Artificial Sequence: Synthetic oligonucleotide
  Sense strand starting at position 3342 of SEQ ID NO: 1245318
uggcuaaguuggucuauac

SEQ ID NO: 1553659 - RNA, 19 nt, Artificial Sequence
  Description of Artificial Sequence: Synthetic oligonucleotide
  Antisense strand to SEQ ID NO: 1553658
guauagaccaacuuagcca

SEQ ID NO: 1553660 - RNA, 19 nt, Artificial Sequence
  Description of Artificial Sequence: Synthetic oligonucleotide
  Sense strand starting at position 3346 of SEQ ID NO: 1245318
uaaguuggucuauacaguu

SEQ ID NO: 1553661 - RNA, 19 nt, Artificial Sequence
  Description of Artificial Sequence: Synthetic oligonucleotide
  Antisense strand to SEQ ID NO: 1553660
aacuguauagaccaacuua

SEQ ID NO: 1553662 - RNA, 19 nt, Artificial Sequence
  Description of Artificial Sequence: Synthetic oligonucleotide
  Sense strand starting at position 3352 of SEQ ID NO: 1245318
ggucuauacaguuagucuu

SEQ ID NO: 1553663 - RNA, 19 nt, Artificial Sequence
  Description of Artificial Sequence: Synthetic oligonucleotide
  Antisense strand to SEQ ID NO: 1553662
aagacuaacuguauagacc

SEQ ID NO: 1553664 - RNA, 19 nt, Artificial Sequence
  Description of Artificial Sequence: Synthetic oligonucleotide
  Sense strand starting at position 3379 of SEQ ID NO: 1245318
aaaggaggcucaguguaaa

SEQ ID NO: 1553665 - RNA, 19 nt, Artificial Sequence
  Description of Artificial Sequence: Synthetic oligonucleotide
  Antisense strand to SEQ ID NO: 1553664
uuuacacugagccuccuuu

SEQ ID NO: 1553666 - RNA, 19 nt, Artificial Sequence
  Description of Artificial Sequence: Synthetic oligonucleotide
  Sense strand starting at position 3427 of SEQ ID NO: 1245318
gcaggagauggcuauaugu

SEQ ID NO: 1553667 - RNA, 19 nt, Artificial Sequence
  Description of Artificial Sequence: Synthetic oligonucleotide
  Antisense strand to SEQ ID NO: 1553666
acauauagccaucuccugc

SEQ ID NO: 1553668 - RNA, 19 nt, Artificial Sequence
  Description of Artificial Sequence: Synthetic oligonucleotide
  Sense strand starting at position 3436 of SEQ ID NO: 1245318
ggcuauauguauuucuguu

SEQ ID NO: 1553669 - RNA, 19 nt, Artificial Sequence
  Description of Artificial Sequence: Synthetic oligonucleotide
  Antisense strand to SEQ ID NO: 1553668
aacagaaauacauauagcc

SEQ ID NO: 1553670 - RNA, 19 nt, Artificial Sequence
  Description of Artificial Sequence: Synthetic oligonucleotide
  Sense strand starting at position 3501 of SEQ ID NO: 1245318
gcgugucucaugucuguaa

SEQ ID NO: 1553671 - RNA, 19 nt, Artificial Sequence
  Description of Artificial Sequence: Synthetic oligonucleotide
  Antisense strand to SEQ ID NO: 1553670
uuacagacaugagacacgc

SEQ ID NO: 1553672 - RNA, 19 nt, Artificial Sequence
  Description of Artificial Sequence: Synthetic oligonucleotide
  Sense strand starting at position 3882 of SEQ ID NO: 1245318
uguuucuuguuauuugcau

SEQ ID NO: 1553673 - RNA, 19 nt, Artificial Sequence
  Description of Artificial Sequence: Synthetic oligonucleotide
  Antisense strand to SEQ ID NO: 1553672
augcaaauaacaagaaaca

SEQ ID NO: 1553674 - RNA, 19 nt, Artificial Sequence
  Description of Artificial Sequence: Synthetic oligonucleotide
  Sense strand starting at position 3883 of SEQ ID NO: 1245318
guuucuuguuauuugcauu

SEQ ID NO: 1553675 - RNA, 19 nt, Artificial Sequence
  Description of Artificial Sequence: Synthetic oligonucleotide
  Antisense strand to SEQ ID NO: 1553674
aaugcaaauaacaagaaac

SEQ ID NO: 1553676 - RNA, 19 nt, Artificial Sequence
  Description of Artificial Sequence: Synthetic oligonucleotide
  Sense strand starting at position 36 of SEQ ID NO: 1245319
uaaaguauccuucgguaaa

SEQ ID NO: 1553677 - RNA, 19 nt, Artificial Sequence
  Description of Artificial Sequence: Synthetic oligonucleotide
  Antisense strand to SEQ ID NO: 1553676
uuuaccgaaggauacuuua

SEQ ID NO: 1553678 - RNA, 19 nt, Artificial Sequence
  Description of Artificial Sequence: Synthetic oligonucleotide
  Sense strand starting at position 135 of SEQ ID NO: 1245319
auuugugcuuguccacaga

SEQ ID NO: 1553679 - RNA, 19 nt, Artificial Sequence
  Description of Artificial Sequence: Synthetic oligonucleotide
  Antisense strand to SEQ ID NO: 1553678
ucuguggacaagcacaaau

SEQ ID NO: 1553680 - RNA, 19 nt, Artificial Sequence
  Description of Artificial Sequence: Synthetic oligonucleotide
  Sense strand starting at position 138 of SEQ ID NO: 1245319
ugugcuuguccacagacau

SEQ ID NO: 1553681 - RNA, 19 nt, Artificial Sequence
  Description of Artificial Sequence: Synthetic oligonucleotide
  Antisense strand to SEQ ID NO: 1553680
augucuguggacaagcaca

SEQ ID NO: 1553682 - RNA, 19 nt, Artificial Sequence
  Description of Artificial Sequence: Synthetic oligonucleotide
  Sense strand starting at position 180 of SEQ ID NO: 1245319
ucggccauuccaugagaaa

SEQ ID NO: 1553683 - RNA, 19 nt, Artificial Sequence
  Description of Artificial Sequence: Synthetic oligonucleotide
  Antisense strand to SEQ ID NO: 1553682
uuucucauggaauggccga

SEQ ID NO: 1553684 - RNA, 19 nt, Artificial Sequence
  Description of Artificial Sequence: Synthetic oligonucleotide
  Sense strand starting at position 223 of SEQ ID NO: 1245319
ccugguaugcaaugacuua

SEQ ID NO: 1553685 - RNA, 19 nt, Artificial Sequence
  Description of Artificial Sequence: Synthetic oligonucleotide
  Antisense strand to SEQ ID NO: 1553684
uaagucauugcauaccagg

SEQ ID NO: 1553686 - RNA, 19 nt, Artificial Sequence
  Description of Artificial Sequence: Synthetic oligonucleotide
  Sense strand starting at position 279 of SEQ ID NO: 1245319
auccuuguugcugauggaa

SEQ ID NO: 1553687 - RNA, 19 nt, Artificial Sequence
  Description of Artificial Sequence: Synthetic oligonucleotide
  Antisense strand to SEQ ID NO: 1553686
uuccaucagcaacaaggau

SEQ ID NO: 1553688 - RNA, 19 nt, Artificial Sequence
  Description of Artificial Sequence: Synthetic oligonucleotide
  Sense strand starting at position 924 of SEQ ID NO: 1245319
gucacagaucacugacuua

SEQ ID NO: 1553689 - RNA, 19 nt, Artificial Sequence
  Description of Artificial Sequence: Synthetic oligonucleotide
  Antisense strand to SEQ ID NO: 1553688
uaagucagugaucugugac

SEQ ID NO: 1553690 - RNA, 19 nt, Artificial Sequence
  Description of Artificial Sequence: Synthetic oligonucleotide
  Sense strand starting at position 993 of SEQ ID NO: 1245319
ugcacaauucuauggagua

SEQ ID NO: 1553691 - RNA, 19 nt, Artificial Sequence
  Description of Artificial Sequence: Synthetic oligonucleotide
  Antisense strand to SEQ ID NO: 1553690
uacuccauagaauugugca

SEQ ID NO: 1553692 - RNA, 19 nt, Artificial Sequence
  Description of Artificial Sequence: Synthetic oligonucleotide
  Sense strand starting at position 998 of SEQ ID NO: 1245319
aauucuauggaguauaugu

SEQ ID NO: 1553693 - RNA, 19 nt, Artificial Sequence
  Description of Artificial Sequence: Synthetic oligonucleotide
  Antisense strand to SEQ ID NO: 1553692
acauauacuccauagaauu

SEQ ID NO: 1553694 - RNA, 19 nt, Artificial Sequence
  Description of Artificial Sequence: Synthetic oligonucleotide
  Sense strand starting at position 1003 of SEQ ID NO: 1245319
uauggaguauaugugcaau

SEQ ID NO: 1553695 - RNA, 19 nt, Artificial Sequence
  Description of Artificial Sequence: Synthetic oligonucleotide
  Antisense strand to SEQ ID NO: 1553694
auugcacauauacuccaua

SEQ ID NO: 1553696 - RNA, 19 nt, Artificial Sequence
  Description of Artificial Sequence: Synthetic oligonucleotide
  Sense strand starting at position 1013 of SEQ ID NO: 1245319
augugcaauuucguuacau

SEQ ID NO: 1553697 - RNA, 19 nt, Artificial Sequence
  Description of Artificial Sequence: Synthetic oligonucleotide
  Antisense strand to SEQ ID NO: 1553696
auguaacgaaauugcacau

SEQ ID NO: 1553698 - RNA, 19 nt, Artificial Sequence
  Description of Artificial Sequence: Synthetic oligonucleotide
  Sense strand starting at position 1014 of SEQ ID NO: 1245319
ugugcaauuucguuacaug

SEQ ID NO: 1553699 - RNA, 19 nt, Artificial Sequence
  Description of Artificial Sequence: Synthetic oligonucleotide
  Antisense strand to SEQ ID NO: 1553698
cauguaacgaaauugcaca

SEQ ID NO: 1553700 - RNA, 19 nt, Artificial Sequence
  Description of Artificial Sequence: Synthetic oligonucleotide
  Sense strand starting at position 1058 of SEQ ID NO: 1245319
ggacuucuaggguaugcau

SEQ ID NO: 1553701 - RNA, 19 nt, Artificial Sequence
  Description of Artificial Sequence: Synthetic oligonucleotide
  Antisense strand to SEQ ID NO: 1553700
augcauacccuagaagucc

SEQ ID NO: 1553702 - RNA, 19 nt, Artificial Sequence
  Description of Artificial Sequence: Synthetic oligonucleotide
  Sense strand starting at position 1071 of SEQ ID NO: 1245319
augcauuacccgggaaggu

SEQ ID NO: 1553703 - RNA, 19 nt, Artificial Sequence
  Description of Artificial Sequence: Synthetic oligonucleotide
  Antisense strand to SEQ ID NO: 1553702
accuucccggguaaugcau

SEQ ID NO: 1553704 - RNA, 19 nt, Artificial Sequence
  Description of Artificial Sequence: Synthetic oligonucleotide
  Sense strand starting at position 1187 of SEQ ID NO: 1245319
gugaacacauucuuaagca

SEQ ID NO: 1553705 - RNA, 19 nt, Artificial Sequence
  Description of Artificial Sequence: Synthetic oligonucleotide
  Antisense strand to SEQ ID NO: 1553704
ugcuuaagaauguguucac

SEQ ID NO: 1553706 - RNA, 19 nt, Artificial Sequence
  Description of Artificial Sequence: Synthetic oligonucleotide
  Sense strand starting at position 1219 of SEQ ID NO: 1245319
gggaacaugcgauacuugu

SEQ ID NO: 1553707 - RNA, 19 nt, Artificial Sequence
  Description of Artificial Sequence: Synthetic oligonucleotide
  Antisense strand to SEQ ID NO: 1553706
acaaguaucgcauguuccc

SEQ ID NO: 1553708 - RNA, 19 nt, Artificial Sequence
  Description of Artificial Sequence: Synthetic oligonucleotide
  Sense strand starting at position 1341 of SEQ ID NO: 1245319
cuuccaugccuacaaguga

SEQ ID NO: 1553709 - RNA, 19 nt, Artificial Sequence
  Description of Artificial Sequence: Synthetic oligonucleotide
  Antisense strand to SEQ ID NO: 1553708
ucacuuguaggcauggaag

SEQ ID NO: 1553710 - RNA, 19 nt, Artificial Sequence
  Description of Artificial Sequence: Synthetic oligonucleotide
  Sense strand starting at position 2310 of SEQ ID NO: 1245319
acauuaaaccagcauguga

SEQ ID NO: 1553711 - RNA, 19 nt, Artificial Sequence
  Description of Artificial Sequence: Synthetic oligonucleotide
  Antisense strand to SEQ ID NO: 1553710
ucacaugcugguuuaaugu

SEQ ID NO: 1553712 - RNA, 19 nt, Artificial Sequence
  Description of Artificial Sequence: Synthetic oligonucleotide
  Sense strand starting at position 2817 of SEQ ID NO: 1245319
auccuaaauucgccugaug

SEQ ID NO: 1553713 - RNA, 19 nt, Artificial Sequence
  Description of Artificial Sequence: Synthetic oligonucleotide
  Antisense strand to SEQ ID NO: 1553712
caucaggcgaauuuaggau

SEQ ID NO: 1553714 - RNA, 19 nt, Artificial Sequence
  Description of Artificial Sequence: Synthetic oligonucleotide
  Sense strand starting at position 2820 of SEQ ID NO: 1245319
cuaaauucgccugaugaug

SEQ ID NO: 1553715 - RNA, 19 nt, Artificial Sequence
  Description of Artificial Sequence: Synthetic oligonucleotide
  Antisense strand to SEQ ID NO: 1553714
caucaucaggcgaauuuag

SEQ ID NO: 1553716 - RNA, 19 nt, Artificial Sequence
  Description of Artificial Sequence: Synthetic oligonucleotide
  Sense strand starting at position 2837 of SEQ ID NO: 1245319
uggaguggccauugguaaa

SEQ ID NO: 1553717 - RNA, 19 nt, Artificial Sequence
  Description of Artificial Sequence: Synthetic oligonucleotide
  Antisense strand to SEQ ID NO: 1553716
uuuaccaauggccacucca

SEQ ID NO: 1553718 - RNA, 19 nt, Artificial Sequence
  Description of Artificial Sequence: Synthetic oligonucleotide
  Sense strand starting at position 2914 of SEQ ID NO: 1245319
accuuuaugacaggaggua

SEQ ID NO: 1553719 - RNA, 19 nt, Artificial Sequence
  Description of Artificial Sequence: Synthetic oligonucleotide
  Antisense strand to SEQ ID NO: 1553718
uaccuccugucauaaaggu

SEQ ID NO: 1553720 - RNA, 19 nt, Artificial Sequence
  Description of Artificial Sequence: Synthetic oligonucleotide
  Sense strand starting at position 3122 of SEQ ID NO: 1245319
ugauuacaacuuggcaaau

SEQ ID NO: 1553721 - RNA, 19 nt, Artificial Sequence
  Description of Artificial Sequence: Synthetic oligonucleotide
  Antisense strand to SEQ ID NO: 1553720
auuugccaaguuguaauca

SEQ ID NO: 1553722 - RNA, 19 nt, Artificial Sequence
  Description of Artificial Sequence: Synthetic oligonucleotide
  Sense strand starting at position 3236 of SEQ ID NO: 1245319
ugagaugcuuguucuaaga

SEQ ID NO: 1553723 - RNA, 19 nt, Artificial Sequence
  Description of Artificial Sequence: Synthetic oligonucleotide
  Antisense strand to SEQ ID NO: 1553722
ucuuagaacaagcaucuca

SEQ ID NO: 1553724 - RNA, 19 nt, Artificial Sequence
  Description of Artificial Sequence: Synthetic oligonucleotide
  Sense strand starting at position 3264 of SEQ ID NO: 1245319
ucuucuccaggaugagaua

SEQ ID NO: 1553725 - RNA, 19 nt, Artificial Sequence
  Description of Artificial Sequence: Synthetic oligonucleotide
  Antisense strand to SEQ ID NO: 1553724
uaucucauccuggagaaga

SEQ ID NO: 1553726 - RNA, 19 nt, Artificial Sequence
  Description of Artificial Sequence: Synthetic oligonucleotide
  Sense strand starting at position 3374 of SEQ ID NO: 1245319
gcauuugugcagugaggca

SEQ ID NO: 1553727 - RNA, 19 nt, Artificial Sequence
  Description of Artificial Sequence: Synthetic oligonucleotide
  Antisense strand to SEQ ID NO: 1553726
ugccucacugcacaaaugc

SEQ ID NO: 1553728 - RNA, 19 nt, Artificial Sequence
  Description of Artificial Sequence: Synthetic oligonucleotide
  Sense strand starting at position 3484 of SEQ ID NO: 1245319
cguuaagcucaggaugauc

SEQ ID NO: 1553729 - RNA, 19 nt, Artificial Sequence
  Description of Artificial Sequence: Synthetic oligonucleotide
  Antisense strand to SEQ ID NO: 1553728
gaucauccugagcuuaacg

SEQ ID NO: 1553730 - RNA, 19 nt, Artificial Sequence
  Description of Artificial Sequence: Synthetic oligonucleotide
  Sense strand starting at position 3513 of SEQ ID NO: 1245319
ggugcuauucuucccguuu

SEQ ID NO: 1553731 - RNA, 19 nt, Artificial Sequence
  Description of Artificial Sequence: Synthetic oligonucleotide
  Antisense strand to SEQ ID NO: 1553730
aaacgggaagaauagcacc

SEQ ID NO: 1553732 - RNA, 19 nt, Artificial Sequence
  Description of Artificial Sequence: Synthetic oligonucleotide
  Sense strand starting at position 3647 of SEQ ID NO: 1245319
cuagauuaucacugggcca

SEQ ID NO: 1553733 - RNA, 19 nt, Artificial Sequence
  Description of Artificial Sequence: Synthetic oligonucleotide
  Antisense strand to SEQ ID NO: 1553732
uggcccagugauaaucuag

SEQ ID NO: 1553734 - RNA, 19 nt, Artificial Sequence
  Description of Artificial Sequence: Synthetic oligonucleotide
  Sense strand starting at position 3669 of SEQ ID NO: 1245319
guugaacacuucuuguaug

SEQ ID NO: 1553735 - RNA, 19 nt, Artificial Sequence
  Description of Artificial Sequence: Synthetic oligonucleotide
  Antisense strand to SEQ ID NO: 1553734
cauacaagaaguguucaac

SEQ ID NO: 1553736 - RNA, 19 nt, Artificial Sequence
  Description of Artificial Sequence: Synthetic oligonucleotide
  Sense strand starting at position 3721 of SEQ ID NO: 1245319
cuuguuccaggucacauau

SEQ ID NO: 1553737 - RNA, 19 nt, Artificial Sequence
  Description of Artificial Sequence: Synthetic oligonucleotide
  Antisense strand to SEQ ID NO: 1553736
auaugugaccuggaacaag

SEQ ID NO: 1553738 - RNA, 19 nt, Artificial Sequence
  Description of Artificial Sequence: Synthetic oligonucleotide
  Sense strand starting at position 3731 of SEQ ID NO: 1245319
gucacauaucuaggaguua

SEQ ID NO: 1553739 - RNA, 19 nt, Artificial Sequence
  Description of Artificial Sequence: Synthetic oligonucleotide
  Antisense strand to SEQ ID NO: 1553738
uaacuccuagauaugugac

SEQ ID NO: 1553740 - RNA, 19 nt, Artificial Sequence
  Description of Artificial Sequence: Synthetic oligonucleotide
  Sense strand starting at position 3786 of SEQ ID NO: 1245319
aguccagucuugccauuua

SEQ ID NO: 1553741 - RNA, 19 nt, Artificial Sequence
  Description of Artificial Sequence: Synthetic oligonucleotide
  Antisense strand to SEQ ID NO: 1553740
uaaauggcaagacuggacu

SEQ ID NO: 1553742 - RNA, 19 nt, Artificial Sequence
  Description of Artificial Sequence: Synthetic oligonucleotide
  Sense strand starting at position 3801 of SEQ ID NO: 1245319
uuuauuauccucuaggagu

SEQ ID NO: 1553743 - RNA, 19 nt, Artificial Sequence
  Description of Artificial Sequence: Synthetic oligonucleotide
  Antisense strand to SEQ ID NO: 1553742
acuccuagaggauaauaaa

SEQ ID NO: 1553744 - RNA, 19 nt, Artificial Sequence
  Description of Artificial Sequence: Synthetic oligonucleotide
  Sense strand starting at position 3825 of SEQ ID NO: 1245319
cagaucuagcuguggaaca

SEQ ID NO: 1553745 - RNA, 19 nt, Artificial Sequence
  Description of Artificial Sequence: Synthetic oligonucleotide
  Antisense strand to SEQ ID NO: 1553744
uguuccacagcuagaucug

SEQ ID NO: 1553746 - RNA, 19 nt, Artificial Sequence
  Description of Artificial Sequence: Synthetic oligonucleotide
  Sense strand starting at position 3827 of SEQ ID NO: 1245319
gaucuagcuguggaacauu

SEQ ID NO: 1553747 - RNA, 19 nt, Artificial Sequence
  Description of Artificial Sequence: Synthetic oligonucleotide
  Antisense strand to SEQ ID NO: 1553746
aauguuccacagcuagauc

SEQ ID NO: 1553748 - RNA, 19 nt, Artificial Sequence
  Description of Artificial Sequence: Synthetic oligonucleotide
  Sense strand starting at position 3904 of SEQ ID NO: 1245319
gugugugguaaggauuaga

SEQ ID NO: 1553749 - RNA, 19 nt, Artificial Sequence
  Description of Artificial Sequence: Synthetic oligonucleotide
  Antisense strand to SEQ ID NO: 1553748
ucuaauccuuaccacacac

SEQ ID NO: 1553750 - RNA, 19 nt, Artificial Sequence
  Description of Artificial Sequence: Synthetic oligonucleotide
  Sense strand starting at position 3925 of SEQ ID NO: 1245319
cauccauguguggacauua

SEQ ID NO: 1553751 - RNA, 19 nt, Artificial Sequence
  Description of Artificial Sequence: Synthetic oligonucleotide
  Antisense strand to SEQ ID NO: 1553750
uaauguccacacauggaug

SEQ ID NO: 1553752 - RNA, 19 nt, Artificial Sequence
  Description of Artificial Sequence: Synthetic oligonucleotide
  Sense strand starting at position 3937 of SEQ ID NO: 1245319
gacauuacgguuuacuagu

SEQ ID NO: 1553753 - RNA, 19 nt, Artificial Sequence
  Description of Artificial Sequence: Synthetic oligonucleotide
  Antisense strand to SEQ ID NO: 1553752
acuaguaaaccguaauguc

SEQ ID NO: 1553754 - RNA, 19 nt, Artificial Sequence
  Description of Artificial Sequence: Synthetic oligonucleotide
  Sense strand starting at position 3946 of SEQ ID NO: 1245319
guuuacuaguaucuuuaga

SEQ ID NO: 1553755 - RNA, 19 nt, Artificial Sequence
  Description of Artificial Sequence: Synthetic oligonucleotide
  Antisense strand to SEQ ID NO: 1553754
ucuaaagauacuaguaaac

SEQ ID NO: 1553756 - RNA, 19 nt, Artificial Sequence
  Description of Artificial Sequence: Synthetic oligonucleotide
  Sense strand starting at position 71 of SEQ ID NO: 1245320
ugacuaacuucucuguaag

SEQ ID NO: 1553757 - RNA, 19 nt, Artificial Sequence
  Description of Artificial Sequence: Synthetic oligonucleotide
  Antisense strand to SEQ ID NO: 1553756
cuuacagagaaguuaguca

SEQ ID NO: 1553758 - RNA, 19 nt, Artificial Sequence
  Description of Artificial Sequence: Synthetic oligonucleotide
  Sense strand starting at position 74 of SEQ ID NO: 1245320
cuaacuucucuguaagaug

SEQ ID NO: 1553759 - RNA, 19 nt, Artificial Sequence
  Description of Artificial Sequence: Synthetic oligonucleotide
  Antisense strand to SEQ ID NO: 1553758
caucuuacagagaaguuag

SEQ ID NO: 1553760 - RNA, 19 nt, Artificial Sequence
  Description of Artificial Sequence: Synthetic oligonucleotide
  Sense strand starting at position 286 of SEQ ID NO: 1245320
agauguaauuauuccaagu

SEQ ID NO: 1553761 - RNA, 19 nt, Artificial Sequence
  Description of Artificial Sequence: Synthetic oligonucleotide
  Antisense strand to SEQ ID NO: 1553760
acuuggaauaauuacaucu

SEQ ID NO: 1553762 - RNA, 19 nt, Artificial Sequence
  Description of Artificial Sequence: Synthetic oligonucleotide
  Sense strand starting at position 665 of SEQ ID NO: 1245320
aaaucacuucgagggcuuu

SEQ ID NO: 1553763 - RNA, 19 nt, Artificial Sequence
  Description of Artificial Sequence: Synthetic oligonucleotide
  Antisense strand to SEQ ID NO: 1553762
aaagcccucgaagugauuu

SEQ ID NO: 1553764 - RNA, 19 nt, Artificial Sequence
  Description of Artificial Sequence: Synthetic oligonucleotide
  Sense strand starting at position 683 of SEQ ID NO: 1245320
uccaaaggcgugugauaaa

SEQ ID NO: 1553765 - RNA, 19 nt, Artificial Sequence
  Description of Artificial Sequence: Synthetic oligonucleotide
  Antisense strand to SEQ ID NO: 1553764
uuuaucacacgccuuugga

SEQ ID NO: 1553766 - RNA, 19 nt, Artificial Sequence
  Description of Artificial Sequence: Synthetic oligonucleotide
  Sense strand starting at position 809 of SEQ ID NO: 1245320
cgagacuaccacuguuaac

SEQ ID NO: 1553767 - RNA, 19 nt, Artificial Sequence
  Description of Artificial Sequence: Synthetic oligonucleotide
  Antisense strand to SEQ ID NO: 1553766
guuaacagugguagucucg

SEQ ID NO: 1553768 - RNA, 19 nt, Artificial Sequence
  Description of Artificial Sequence: Synthetic oligonucleotide
  Sense strand starting at position 945 of SEQ ID NO: 1245320
caaacuauggagugugaga

SEQ ID NO: 1553769 - RNA, 19 nt, Artificial Sequence
  Description of Artificial Sequence: Synthetic oligonucleotide
  Antisense strand to SEQ ID NO: 1553768
ucucacacuccauaguuug

SEQ ID NO: 1553770 - RNA, 19 nt, Artificial Sequence
  Description of Artificial Sequence: Synthetic oligonucleotide
  Sense strand starting at position 2499 of SEQ ID NO: 1245320
ggguucgcgauguaaauaa

SEQ ID NO: 1553771 - RNA, 19 nt, Artificial Sequence
  Description of Artificial Sequence: Synthetic oligonucleotide
  Antisense strand to SEQ ID NO: 1553770
uuauuuacaucgcgaaccc

SEQ ID NO: 1553772 - RNA, 19 nt, Artificial Sequence
  Description of Artificial Sequence: Synthetic oligonucleotide
  Sense strand starting at position 2569 of SEQ ID NO: 1245320
agguauaaguguuuaaccu

SEQ ID NO: 1553773 - RNA, 19 nt, Artificial Sequence
  Description of Artificial Sequence: Synthetic oligonucleotide
  Antisense strand to SEQ ID NO: 1553772
agguuaaacacuuauaccu

SEQ ID NO: 1553774 - RNA, 19 nt, Artificial Sequence
  Description of Artificial Sequence: Synthetic oligonucleotide
  Sense strand starting at position 2570 of SEQ ID NO: 1245320
gguauaaguguuuaaccua

SEQ ID NO: 1553775 - RNA, 19 nt, Artificial Sequence
  Description of Artificial Sequence: Synthetic oligonucleotide
  Antisense strand to SEQ ID NO: 1553774
uagguuaaacacuuauacc

SEQ ID NO: 1553776 - RNA, 19 nt, Artificial Sequence
  Description of Artificial Sequence: Synthetic oligonucleotide
  Sense strand starting at position 2634 of SEQ ID NO: 1245320
cccgaagggucuuugugaa

SEQ ID NO: 1553777 - RNA, 19 nt, Artificial Sequence
  Description of Artificial Sequence: Synthetic oligonucleotide
  Antisense strand to SEQ ID NO: 1553776
uucacaaagacccuucggg

SEQ ID NO: 1553778 - RNA, 19 nt, Artificial Sequence
  Description of Artificial Sequence: Synthetic oligonucleotide
  Sense strand starting at position 2658 of SEQ ID NO: 1245320
aaagaaacaucugucacga

SEQ ID NO: 1553779 - RNA, 19 nt, Artificial Sequence
  Description of Artificial Sequence: Synthetic oligonucleotide
  Antisense strand to SEQ ID NO: 1553778
ucgugacagauguuucuuu

SEQ ID NO: 1553780 - RNA, 19 nt, Artificial Sequence
  Description of Artificial Sequence: Synthetic oligonucleotide
  Sense strand starting at position 2679 of SEQ ID NO: 1245320
ucccuuaauggcugggaua

SEQ ID NO: 1553781 - RNA, 19 nt, Artificial Sequence
  Description of Artificial Sequence: Synthetic oligonucleotide
  Antisense strand to SEQ ID NO: 1553780
uaucccagccauuaaggga

SEQ ID NO: 1553782 - RNA, 19 nt, Artificial Sequence
  Description of Artificial Sequence: Synthetic oligonucleotide
  Sense strand starting at position 2680 of SEQ ID NO: 1245320
cccuuaauggcugggauau

SEQ ID NO: 1553783 - RNA, 19 nt, Artificial Sequence
  Description of Artificial Sequence: Synthetic oligonucleotide
  Antisense strand to SEQ ID NO: 1553782
auaucccagccauuaaggg

SEQ ID NO: 1553784 - RNA, 19 nt, Artificial Sequence
  Description of Artificial Sequence: Synthetic oligonucleotide
  Sense strand starting at position 2681 of SEQ ID NO: 1245320
ccuuaauggcugggauauc

SEQ ID NO: 1553785 - RNA, 19 nt, Artificial Sequence
  Description of Artificial Sequence: Synthetic oligonucleotide
  Antisense strand to SEQ ID NO: 1553784
gauaucccagccauuaagg

SEQ ID NO: 1553786 - RNA, 19 nt, Artificial Sequence
  Description of Artificial Sequence: Synthetic oligonucleotide
  Sense strand starting at position 2766 of SEQ ID NO: 1245320
gcagcaaggcccuaaacuu

SEQ ID NO: 1553787 - RNA, 19 nt, Artificial Sequence
  Description of Artificial Sequence: Synthetic oligonucleotide
  Antisense strand to SEQ ID NO: 1553786
aaguuuagggccuugcugc

SEQ ID NO: 1553788 - RNA, 19 nt, Artificial Sequence
  Description of Artificial Sequence: Synthetic oligonucleotide
  Sense strand starting at position 2922 of SEQ ID NO: 1245320
cagggaguaccguagaacu

SEQ ID NO: 1553789 - RNA, 19 nt, Artificial Sequence
  Description of Artificial Sequence: Synthetic oligonucleotide
  Antisense strand to SEQ ID NO: 1553788
aguucuacgguacucccug

SEQ ID NO: 1553790 - RNA, 19 nt, Artificial Sequence
  Description of Artificial Sequence: Synthetic oligonucleotide
  Sense strand starting at position 2924 of SEQ ID NO: 1245320
gggaguaccguagaacuaa

SEQ ID NO: 1553791 - RNA, 19 nt, Artificial Sequence
  Description of Artificial Sequence: Synthetic oligonucleotide
  Antisense strand to SEQ ID NO: 1553790
uuaguucuacgguacuccc

SEQ ID NO: 1553792 - RNA, 19 nt, Artificial Sequence
  Description of Artificial Sequence: Synthetic oligonucleotide
  Sense strand starting at position 3036 of SEQ ID NO: 1245320
uguggcuuaguuuauagau

SEQ ID NO: 1553793 - RNA, 19 nt, Artificial Sequence
  Description of Artificial Sequence: Synthetic oligonucleotide
  Antisense strand to SEQ ID NO: 1553792
aucuauaaacuaagccaca

SEQ ID NO: 1553794 - RNA, 19 nt, Artificial Sequence
  Description of Artificial Sequence: Synthetic oligonucleotide
  Sense strand starting at position 3165 of SEQ ID NO: 1245320
ucuucugagaaaugaacgu

SEQ ID NO: 1553795 - RNA, 19 nt, Artificial Sequence
  Description of Artificial Sequence: Synthetic oligonucleotide
  Antisense strand to SEQ ID NO: 1553794
acguucauuucucagaaga

SEQ ID NO: 1553796 - RNA, 19 nt, Artificial Sequence
  Description of Artificial Sequence: Synthetic oligonucleotide
  Sense strand starting at position 3206 of SEQ ID NO: 1245320
gauggaccuuaagagagau

SEQ ID NO: 1553797 - RNA, 19 nt, Artificial Sequence
  Description of Artificial Sequence: Synthetic oligonucleotide
  Antisense strand to SEQ ID NO: 1553796
aucucucuuaagguccauc

SEQ ID NO: 1553798 - RNA, 19 nt, Artificial Sequence
  Description of Artificial Sequence: Synthetic oligonucleotide
  Sense strand starting at position 3214 of SEQ ID NO: 1245320
uuaagagagauguggccau

SEQ ID NO: 1553799 - RNA, 19 nt, Artificial Sequence
  Description of Artificial Sequence: Synthetic oligonucleotide
  Antisense strand to SEQ ID NO: 1553798
auggccacaucucucuuaa

SEQ ID NO: 1553800 - RNA, 19 nt, Artificial Sequence
  Description of Artificial Sequence: Synthetic oligonucleotide
  Sense strand starting at position 3342 of SEQ ID NO: 1245320
agcauaaacccaggaguca

SEQ ID NO: 1553801 - RNA, 19 nt, Artificial Sequence
  Description of Artificial Sequence: Synthetic oligonucleotide
  Antisense strand to SEQ ID NO: 1553800
ugacuccuggguuuaugcu

SEQ ID NO: 1553802 - RNA, 19 nt, Artificial Sequence
  Description of Artificial Sequence: Synthetic oligonucleotide
  Sense strand starting at position 3362 of SEQ ID NO: 1245320
gcacguuguagcuuugagu

SEQ ID NO: 1553803 - RNA, 19 nt, Artificial Sequence
  Description of Artificial Sequence: Synthetic oligonucleotide
  Antisense strand to SEQ ID NO: 1553802
acucaaagcuacaacgugc

SEQ ID NO: 1553804 - RNA, 19 nt, Artificial Sequence
  Description of Artificial Sequence: Synthetic oligonucleotide
  Sense strand starting at position 3383 of SEQ ID NO: 1245320
gacucuguuccagaucugu

SEQ ID NO: 1553805 - RNA, 19 nt, Artificial Sequence
  Description of Artificial Sequence: Synthetic oligonucleotide
  Antisense strand to SEQ ID NO: 1553804
acagaucuggaacagaguc

SEQ ID NO: 1553806 - RNA, 19 nt, Artificial Sequence
  Description of Artificial Sequence: Synthetic oligonucleotide
  Sense strand starting at position 3388 of SEQ ID NO: 1245320
uguuccagaucuguaaucu

SEQ ID NO: 1553807 - RNA, 19 nt, Artificial Sequence
  Description of Artificial Sequence: Synthetic oligonucleotide
  Antisense strand to SEQ ID NO: 1553806
agauuacagaucuggaaca

SEQ ID NO: 1553808 - RNA, 19 nt, Artificial Sequence
  Description of Artificial Sequence: Synthetic oligonucleotide
  Sense strand starting at position 3389 of SEQ ID NO: 1245320
guuccagaucuguaaucuu

SEQ ID NO: 1553809 - RNA, 19 nt, Artificial Sequence
  Description of Artificial Sequence: Synthetic oligonucleotide
  Antisense strand to SEQ ID NO: 1553808
aagauuacagaucuggaac

SEQ ID NO: 1553810 - RNA, 19 nt, Artificial Sequence
  Description of Artificial Sequence: Synthetic oligonucleotide
  Sense strand starting at position 3396 of SEQ ID NO: 1245320
aucuguaaucuuuggcaaa

SEQ ID NO: 1553811 - RNA, 19 nt, Artificial Sequence
  Description of Artificial Sequence: Synthetic oligonucleotide
  Antisense strand to SEQ ID NO: 1553810
uuugccaaagauuacagau

SEQ ID NO: 1553812 - RNA, 19 nt, Artificial Sequence
  Description of Artificial Sequence: Synthetic oligonucleotide
  Sense strand starting at position 3398 of SEQ ID NO: 1245320
cuguaaucuuuggcaaaug

SEQ ID NO: 1553813 - RNA, 19 nt, Artificial Sequence
  Description of Artificial Sequence: Synthetic oligonucleotide
  Antisense strand to SEQ ID NO: 1553812
cauuugccaaagauuacag

SEQ ID NO: 1553814 - RNA, 19 nt, Artificial Sequence
  Description of Artificial Sequence: Synthetic oligonucleotide
  Sense strand starting at position 3440 of SEQ ID NO: 1245320
cuuaaauauaguuguguga

SEQ ID NO: 1553815 - RNA, 19 nt, Artificial Sequence
  Description of Artificial Sequence: Synthetic oligonucleotide
  Antisense strand to SEQ ID NO: 1553814
ucacacaacuauauuuaag

SEQ ID NO: 1553816 - RNA, 19 nt, Artificial Sequence
  Description of Artificial Sequence: Synthetic oligonucleotide
  Sense strand starting at position 3443 of SEQ ID NO: 1245320
aaauauaguugugugauga

SEQ ID NO: 1553817 - RNA, 19 nt, Artificial Sequence
  Description of Artificial Sequence: Synthetic oligonucleotide
  Antisense strand to SEQ ID NO: 1553816
ucaucacacaacuauauuu

SEQ ID NO: 1553818 - RNA, 19 nt, Artificial Sequence
  Description of Artificial Sequence: Synthetic oligonucleotide
  Sense strand starting at position 3444 of SEQ ID NO: 1245320
aauauaguugugugaugau

SEQ ID NO: 1553819 - RNA, 19 nt, Artificial Sequence
  Description of Artificial Sequence: Synthetic oligonucleotide
  Antisense strand to SEQ ID NO: 1553818
aucaucacacaacuauauu

SEQ ID NO: 1553820 - RNA, 19 nt, Artificial Sequence
  Description of Artificial Sequence: Synthetic oligonucleotide
  Sense strand starting at position 3487 of SEQ ID NO: 1245320
aacauagggcuuugaaguu

SEQ ID NO: 1553821 - RNA, 19 nt, Artificial Sequence
  Description of Artificial Sequence: Synthetic oligonucleotide
  Antisense strand to SEQ ID NO: 1553820
aacuucaaagcccuauguu

SEQ ID NO: 1553822 - RNA, 19 nt, Artificial Sequence
  Description of Artificial Sequence: Synthetic oligonucleotide
  Sense strand starting at position 3506 of SEQ ID NO: 1245320
caaggaaagucagugauca

SEQ ID NO: 1553823 - RNA, 19 nt, Artificial Sequence
  Description of Artificial Sequence: Synthetic oligonucleotide
  Antisense strand to SEQ ID NO: 1553822
ugaucacugacuuuccuug

SEQ ID NO: 1553824 - RNA, 19 nt, Artificial Sequence
  Description of Artificial Sequence: Synthetic oligonucleotide
  Sense strand starting at position 3507 of SEQ ID NO: 1245320
aaggaaagucagugaucau

SEQ ID NO: 1553825 - RNA, 19 nt, Artificial Sequence
  Description of Artificial Sequence: Synthetic oligonucleotide
  Antisense strand to SEQ ID NO: 1553824
augaucacugacuuuccuu

SEQ ID NO: 1553826 - RNA, 19 nt, Artificial Sequence
  Description of Artificial Sequence: Synthetic oligonucleotide
  Sense strand starting at position 3510 of SEQ ID NO: 1245320
gaaagucagugaucauuaa

SEQ ID NO: 1553827 - RNA, 19 nt, Artificial Sequence
  Description of Artificial Sequence: Synthetic oligonucleotide
  Antisense strand to SEQ ID NO: 1553826
uuaaugaucacugacuuuc

SEQ ID NO: 1553828 - RNA, 19 nt, Artificial Sequence
  Description of Artificial Sequence: Synthetic oligonucleotide
  Sense strand starting at position 3514 of SEQ ID NO: 1245320
gucagugaucauuaacuuc

SEQ ID NO: 1553829 - RNA, 19 nt, Artificial Sequence
  Description of Artificial Sequence: Synthetic oligonucleotide
  Antisense strand to SEQ ID NO: 1553828
gaaguuaaugaucacugac

SEQ ID NO: 1553830 - RNA, 19 nt, Artificial Sequence
  Description of Artificial Sequence: Synthetic oligonucleotide
  Sense strand starting at position 3565 of SEQ ID NO: 1245320
cgaaccuacucagcagaaa

SEQ ID NO: 1553831 - RNA, 19 nt, Artificial Sequence
  Description of Artificial Sequence: Synthetic oligonucleotide
  Antisense strand to SEQ ID NO: 1553830
uuucugcugaguagguucg

SEQ ID NO: 1553832 - RNA, 19 nt, Artificial Sequence
  Description of Artificial Sequence: Synthetic oligonucleotide
  Sense strand starting at position 3922 of SEQ ID NO: 1245320
ggguguccaccugaguagu

SEQ ID NO: 1553833 - RNA, 19 nt, Artificial Sequence
  Description of Artificial Sequence: Synthetic oligonucleotide
  Antisense strand to SEQ ID NO: 1553832
acuacucagguggacaccc

SEQ ID NO: 1553834 - RNA, 19 nt, Artificial Sequence
  Description of Artificial Sequence: Synthetic oligonucleotide
  Sense strand starting at position 3925 of SEQ ID NO: 1245320
uguccaccugaguaguaga

SEQ ID NO: 1553835 - RNA, 19 nt, Artificial Sequence
  Description of Artificial Sequence: Synthetic oligonucleotide
  Antisense strand to SEQ ID NO: 1553834
ucuacuacucagguggaca

SEQ ID NO: 1553836 - RNA, 19 nt, Artificial Sequence
  Description of Artificial Sequence: Synthetic oligonucleotide
  Sense strand starting at position 75 of SEQ ID NO: 1245321
uaaguaaacguagguuaca

SEQ ID NO: 1553837 - RNA, 19 nt, Artificial Sequence
  Description of Artificial Sequence: Synthetic oligonucleotide
  Antisense strand to SEQ ID NO: 1553836
uguaaccuacguuuacuua

SEQ ID NO: 1553838 - RNA, 19 nt, Artificial Sequence
  Description of Artificial Sequence: Synthetic oligonucleotide
  Sense strand starting at position 76 of SEQ ID NO: 1245321
aaguaaacguagguuacaa

SEQ ID NO: 1553839 - RNA, 19 nt, Artificial Sequence
  Description of Artificial Sequence: Synthetic oligonucleotide
  Antisense strand to SEQ ID NO: 1553838
uuguaaccuacguuuacuu

SEQ ID NO: 1553840 - RNA, 19 nt, Artificial Sequence
  Description of Artificial Sequence: Synthetic oligonucleotide
  Sense strand starting at position 151 of SEQ ID NO: 1245321
agguguggcuaaguauaaa

SEQ ID NO: 1553841 - RNA, 19 nt, Artificial Sequence
  Description of Artificial Sequence: Synthetic oligonucleotide
  Antisense strand to SEQ ID NO: 1553840
uuuauacuuagccacaccu

SEQ ID NO: 1553842 - RNA, 19 nt, Artificial Sequence
  Description of Artificial Sequence: Synthetic oligonucleotide
  Sense strand starting at position 270 of SEQ ID NO: 1245321
uuaaauccagcagaguuua

SEQ ID NO: 1553843 - RNA, 19 nt, Artificial Sequence
  Description of Artificial Sequence: Synthetic oligonucleotide
  Antisense strand to SEQ ID NO: 1553842
uaaacucugcuggauuuaa

SEQ ID NO: 1553844 - RNA, 19 nt, Artificial Sequence
  Description of Artificial Sequence: Synthetic oligonucleotide
  Sense strand starting at position 275 of SEQ ID NO: 1245321
uccagcagaguuuaauauu

SEQ ID NO: 1553845 - RNA, 19 nt, Artificial Sequence
  Description of Artificial Sequence: Synthetic oligonucleotide
  Antisense strand to SEQ ID NO: 1553844
aauauuaaacucugcugga

SEQ ID NO: 1553846 - RNA, 19 nt, Artificial Sequence
  Description of Artificial Sequence: Synthetic oligonucleotide
  Sense strand starting at position 305 of SEQ ID NO: 1245321
ugggcacacucuuuagaaa

SEQ ID NO: 1553847 - RNA, 19 nt, Artificial Sequence
  Description of Artificial Sequence: Synthetic oligonucleotide
  Antisense strand to SEQ ID NO: 1553846
uuucuaaagagugugccca

SEQ ID NO: 1553848 - RNA, 19 nt, Artificial Sequence
  Description of Artificial Sequence: Synthetic oligonucleotide
  Sense strand starting at position 324 of SEQ ID NO: 1245321
ugccgaaagaugugaacua

SEQ ID NO: 1553849 - RNA, 19 nt, Artificial Sequence
  Description of Artificial Sequence: Synthetic oligonucleotide
  Antisense strand to SEQ ID NO: 1553848
uaguucacaucuuucggca

SEQ ID NO: 1553850 - RNA, 19 nt, Artificial Sequence
  Description of Artificial Sequence: Synthetic oligonucleotide
  Sense strand starting at position 421 of SEQ ID NO: 1245321
uauaaacguuugcuaaaug

SEQ ID NO: 1553851 - RNA, 19 nt, Artificial Sequence
  Description of Artificial Sequence: Synthetic oligonucleotide
  Antisense strand to SEQ ID NO: 1553850
cauuuagcaaacguuuaua

SEQ ID NO: 1553852 - RNA, 19 nt, Artificial Sequence
  Description of Artificial Sequence: Synthetic oligonucleotide
  Sense strand starting at position 441 of SEQ ID NO: 1245321
ccuucuggcagaggaaauu

SEQ ID NO: 1553853 - RNA, 19 nt, Artificial Sequence
  Description of Artificial Sequence: Synthetic oligonucleotide
  Antisense strand to SEQ ID NO: 1553852
aauuuccucugccagaagg

SEQ ID NO: 1553854 - RNA, 19 nt, Artificial Sequence
  Description of Artificial Sequence: Synthetic oligonucleotide
  Sense strand starting at position 464 of SEQ ID NO: 1245321
aaauaucuuguauggguuu

SEQ ID NO: 1553855 - RNA, 19 nt, Artificial Sequence
  Description of Artificial Sequence: Synthetic oligonucleotide
  Antisense strand to SEQ ID NO: 1553854
aaacccauacaagauauuu

SEQ ID NO: 1553856 - RNA, 19 nt, Artificial Sequence
  Description of Artificial Sequence: Synthetic oligonucleotide
  Sense strand starting at position 618 of SEQ ID NO: 1245321
ugacuaacuucucuguaag

SEQ ID NO: 1553857 - RNA, 19 nt, Artificial Sequence
  Description of Artificial Sequence: Synthetic oligonucleotide
  Antisense strand to SEQ ID NO: 1553856
cuuacagagaaguuaguca

SEQ ID NO: 1553858 - RNA, 19 nt, Artificial Sequence
  Description of Artificial Sequence: Synthetic oligonucleotide
  Sense strand starting at position 621 of SEQ ID NO: 1245321
cuaacuucucuguaagaug

SEQ ID NO: 1553859 - RNA, 19 nt, Artificial Sequence
  Description of Artificial Sequence: Synthetic oligonucleotide
  Antisense strand to SEQ ID NO: 1553858
caucuuacagagaaguuag

SEQ ID NO: 1553860 - RNA, 19 nt, Artificial Sequence
  Description of Artificial Sequence: Synthetic oligonucleotide
  Sense strand starting at position 833 of SEQ ID NO: 1245321
agauguaauuauuccaagu

SEQ ID NO: 1553861 - RNA, 19 nt, Artificial Sequence
  Description of Artificial Sequence: Synthetic oligonucleotide
  Antisense strand to SEQ ID NO: 1553860
acuuggaauaauuacaucu

SEQ ID NO: 1553862 - RNA, 19 nt, Artificial Sequence
  Description of Artificial Sequence: Synthetic oligonucleotide
  Sense strand starting at position 938 of SEQ ID NO: 1245321
agacaugacuuugauggaa

SEQ ID NO: 1553863 - RNA, 19 nt, Artificial Sequence
  Description of Artificial Sequence: Synthetic oligonucleotide
  Antisense strand to SEQ ID NO: 1553862
uuccaucaaagucaugucu

SEQ ID NO: 1553864 - RNA, 19 nt, Artificial Sequence
  Description of Artificial Sequence: Synthetic oligonucleotide
  Sense strand starting at position 1212 of SEQ ID NO: 1245321
aaaucacuucgagggcuuu

SEQ ID NO: 1553865 - RNA, 19 nt, Artificial Sequence
  Description of Artificial Sequence: Synthetic oligonucleotide
  Antisense strand to SEQ ID NO: 1553864
aaagcccucgaagugauuu

SEQ ID NO: 1553866 - RNA, 19 nt, Artificial Sequence
  Description of Artificial Sequence: Synthetic oligonucleotide
  Sense strand starting at position 1230 of SEQ ID NO: 1245321
uccaaaggcgugugauaaa

SEQ ID NO: 1553867 - RNA, 19 nt, Artificial Sequence
  Description of Artificial Sequence: Synthetic oligonucleotide
  Antisense strand to SEQ ID NO: 1553866
uuuaucacacgccuuugga

SEQ ID NO: 1553868 - RNA, 19 nt, Artificial Sequence
  Description of Artificial Sequence: Synthetic oligonucleotide
  Sense strand starting at position 1356 of SEQ ID NO: 1245321
cgagacuaccacuguuaac

SEQ ID NO: 1553869 - RNA, 19 nt, Artificial Sequence
  Description of Artificial Sequence: Synthetic oligonucleotide
  Antisense strand to SEQ ID NO: 1553868
guuaacagugguagucucg

SEQ ID NO: 1553870 - RNA, 19 nt, Artificial Sequence
  Description of Artificial Sequence: Synthetic oligonucleotide
  Sense strand starting at position 1492 of SEQ ID NO: 1245321
caaacuauggagugugaga

SEQ ID NO: 1553871 - RNA, 19 nt, Artificial Sequence
  Description of Artificial Sequence: Synthetic oligonucleotide
  Antisense strand to SEQ ID NO: 1553870
ucucacacuccauaguuug

SEQ ID NO: 1553872 - RNA, 19 nt, Artificial Sequence
  Description of Artificial Sequence: Synthetic oligonucleotide
  Sense strand starting at position 3046 of SEQ ID NO: 1245321
ggguucgcgauguaaauaa

SEQ ID NO: 1553873 - RNA, 19 nt, Artificial Sequence
  Description of Artificial Sequence: Synthetic oligonucleotide
  Antisense strand to SEQ ID NO: 1553872
uuauuuacaucgcgaaccc

SEQ ID NO: 1553874 - RNA, 19 nt, Artificial Sequence
  Description of Artificial Sequence: Synthetic oligonucleotide
  Sense strand starting at position 3116 of SEQ ID NO: 1245321
agguauaaguguuuaaccu

SEQ ID NO: 1553875 - RNA, 19 nt, Artificial Sequence
  Description of Artificial Sequence: Synthetic oligonucleotide
  Antisense strand to SEQ ID NO: 1553874
agguuaaacacuuauaccu

SEQ ID NO: 1553876 - RNA, 19 nt, Artificial Sequence
  Description of Artificial Sequence: Synthetic oligonucleotide
  Sense strand starting at position 3117 of SEQ ID NO: 1245321
gguauaaguguuuaaccua

SEQ ID NO: 1553877 - RNA, 19 nt, Artificial Sequence
  Description of Artificial Sequence: Synthetic oligonucleotide
  Antisense strand to SEQ ID NO: 1553876
uagguuaaacacuuauacc

SEQ ID NO: 1553878 - RNA, 19 nt, Artificial Sequence
  Description of Artificial Sequence: Synthetic oligonucleotide
  Sense strand starting at position 3181 of SEQ ID NO: 1245321
cccgaagggucuuugugaa

SEQ ID NO: 1553879 - RNA, 19 nt, Artificial Sequence
  Description of Artificial Sequence: Synthetic oligonucleotide
  Antisense strand to SEQ ID NO: 1553878
uucacaaagacccuucggg

SEQ ID NO: 1553880 - RNA, 19 nt, Artificial Sequence
  Description of Artificial Sequence: Synthetic oligonucleotide
  Sense strand starting at position 3205 of SEQ ID NO: 1245321
aaagaaacaucugucacga

SEQ ID NO: 1553881 - RNA, 19 nt, Artificial Sequence
  Description of Artificial Sequence: Synthetic oligonucleotide
  Antisense strand to SEQ ID NO: 1553880
ucgugacagauguuucuuu

SEQ ID NO: 1553882 - RNA, 19 nt, Artificial Sequence
  Description of Artificial Sequence: Synthetic oligonucleotide
  Sense strand starting at position 3226 of SEQ ID NO: 1245321
ucccuuaauggcugggaua

SEQ ID NO: 1553883 - RNA, 19 nt, Artificial Sequence
  Description of Artificial Sequence: Synthetic oligonucleotide
  Antisense strand to SEQ ID NO: 1553882
uaucccagccauuaaggga

SEQ ID NO: 1553884 - RNA, 19 nt, Artificial Sequence
  Description of Artificial Sequence: Synthetic oligonucleotide
  Sense strand starting at position 3227 of SEQ ID NO: 1245321
cccuuaauggcugggauau

SEQ ID NO: 1553885 - RNA, 19 nt, Artificial Sequence
  Description of Artificial Sequence: Synthetic oligonucleotide
  Antisense strand to SEQ ID NO: 1553884
auaucccagccauuaaggg

SEQ ID NO: 1553886 - RNA, 19 nt, Artificial Sequence
  Description of Artificial Sequence: Synthetic oligonucleotide
  Sense strand starting at position 3228 of SEQ ID NO: 1245321
ccuuaauggcugggauauc

SEQ ID NO: 1553887 - RNA, 19 nt, Artificial Sequence
  Description of Artificial Sequence: Synthetic oligonucleotide
  Antisense strand to SEQ ID NO: 1553886
gauaucccagccauuaagg

SEQ ID NO: 1553888 - RNA, 19 nt, Artificial Sequence
  Description of Artificial Sequence: Synthetic oligonucleotide
  Sense strand starting at position 3313 of SEQ ID NO: 1245321
gcagcaaggcccuaaacuu

SEQ ID NO: 1553889 - RNA, 19 nt, Artificial Sequence
  Description of Artificial Sequence: Synthetic oligonucleotide
  Antisense strand to SEQ ID NO: 1553888
aaguuuagggccuugcugc

SEQ ID NO: 1553890 - RNA, 19 nt, Artificial Sequence
  Description of Artificial Sequence: Synthetic oligonucleotide
  Sense strand starting at position 3469 of SEQ ID NO: 1245321
cagggaguaccguagaacu

SEQ ID NO: 1553891 - RNA, 19 nt, Artificial Sequence
  Description of Artificial Sequence: Synthetic oligonucleotide
  Antisense strand to SEQ ID NO: 1553890
aguucuacgguacucccug

SEQ ID NO: 1553892 - RNA, 19 nt, Artificial Sequence
  Description of Artificial Sequence: Synthetic oligonucleotide
  Sense strand starting at position 3471 of SEQ ID NO: 1245321
gggaguaccguagaacuaa

SEQ ID NO: 1553893 - RNA, 19 nt, Artificial Sequence
  Description of Artificial Sequence: Synthetic oligonucleotide
  Antisense strand to SEQ ID NO: 1553892
uuaguucuacgguacuccc

SEQ ID NO: 1553894 - RNA, 19 nt, Artificial Sequence
  Description of Artificial Sequence: Synthetic oligonucleotide
  Sense strand starting at position 3583 of SEQ ID NO: 1245321
uguggcuuaguuuauagau

SEQ ID NO: 1553895 - RNA, 19 nt, Artificial Sequence
  Description of Artificial Sequence: Synthetic oligonucleotide
  Antisense strand to SEQ ID NO: 1553894
aucuauaaacuaagccaca

SEQ ID NO: 1553896 - RNA, 19 nt, Artificial Sequence
  Description of Artificial Sequence: Synthetic oligonucleotide
  Sense strand starting at position 3712 of SEQ ID NO: 1245321
ucuucugagaaaugaacgu

SEQ ID NO: 1553897 - RNA, 19 nt, Artificial Sequence
  Description of Artificial Sequence: Synthetic oligonucleotide
  Antisense strand to SEQ ID NO: 1553896
acguucauuucucagaaga

SEQ ID NO: 1553898 - RNA, 19 nt, Artificial Sequence
  Description of Artificial Sequence: Synthetic oligonucleotide
  Sense strand starting at position 3753 of SEQ ID NO: 1245321
gauggaccuuaagagagau

SEQ ID NO: 1553899 - RNA, 19 nt, Artificial Sequence
  Description of Artificial Sequence: Synthetic oligonucleotide
  Antisense strand to SEQ ID NO: 1553898
aucucucuuaagguccauc

SEQ ID NO: 1553900 - RNA, 19 nt, Artificial Sequence
  Description of Artificial Sequence: Synthetic oligonucleotide
  Sense strand starting at position 3761 of SEQ ID NO: 1245321
uuaagagagauguggccau

SEQ ID NO: 1553901 - RNA, 19 nt, Artificial Sequence
  Description of Artificial Sequence: Synthetic oligonucleotide
  Antisense strand to SEQ ID NO: 1553900
auggccacaucucucuuaa

SEQ ID NO: 1553902 - RNA, 19 nt, Artificial Sequence
  Description of Artificial Sequence: Synthetic oligonucleotide
  Sense strand starting at position 3889 of SEQ ID NO: 1245321
agcauaaacccaggaguca

SEQ ID NO: 1553903 - RNA, 19 nt, Artificial Sequence
  Description of Artificial Sequence: Synthetic oligonucleotide
  Antisense strand to SEQ ID NO: 1553902
ugacuccuggguuuaugcu

SEQ ID NO: 1553904 - RNA, 19 nt, Artificial Sequence
  Description of Artificial Sequence: Synthetic oligonucleotide
  Sense strand starting at position 3909 of SEQ ID NO: 1245321
gcacguuguagcuuugagu

SEQ ID NO: 1553905 - RNA, 19 nt, Artificial Sequence
  Description of Artificial Sequence: Synthetic oligonucleotide
  Antisense strand to SEQ ID NO: 1553904
acucaaagcuacaacgugc

SEQ ID NO: 1553906 - RNA, 19 nt, Artificial Sequence
  Description of Artificial Sequence: Synthetic oligonucleotide
  Sense strand starting at position 3930 of SEQ ID NO: 1245321
gacucuguuccagaucugu

SEQ ID NO: 1553907 - RNA, 19 nt, Artificial Sequence
  Description of Artificial Sequence: Synthetic oligonucleotide
  Antisense strand to SEQ ID NO: 1553906
acagaucuggaacagaguc

SEQ ID NO: 1553908 - RNA, 19 nt, Artificial Sequence
  Description of Artificial Sequence: Synthetic oligonucleotide
  Sense strand starting at position 3935 of SEQ ID NO: 1245321
uguuccagaucuguaaucu

SEQ ID NO: 1553909 - RNA, 19 nt, Artificial Sequence
  Description of Artificial Sequence: Synthetic oligonucleotide
  Antisense strand to SEQ ID NO: 1553908
agauuacagaucuggaaca

SEQ ID NO: 1553910 - RNA, 19 nt, Artificial Sequence
  Description of Artificial Sequence: Synthetic oligonucleotide
  Sense strand starting at position 3936 of SEQ ID NO: 1245321
guuccagaucuguaaucuu

SEQ ID NO: 1553911 - RNA, 19 nt, Artificial Sequence
  Description of Artificial Sequence: Synthetic oligonucleotide
  Antisense strand to SEQ ID NO: 1553910
aagauuacagaucuggaac

SEQ ID NO: 1553912 - RNA, 19 nt, Artificial Sequence
  Description of Artificial Sequence: Synthetic oligonucleotide
  Sense strand starting at position 3943 of SEQ ID NO: 1245321
aucuguaaucuuuggcaaa

SEQ ID NO: 1553913 - RNA, 19 nt, Artificial Sequence
  Description of Artificial Sequence: Synthetic oligonucleotide
  Antisense strand to SEQ ID NO: 1553912
uuugccaaagauuacagau

SEQ ID NO: 1553914 - RNA, 19 nt, Artificial Sequence
  Description of Artificial Sequence: Synthetic oligonucleotide
  Sense strand starting at position 3945 of SEQ ID NO: 1245321
cuguaaucuuuggcaaaug

SEQ ID NO: 1553915 - RNA, 19 nt, Artificial Sequence
  Description of Artificial Sequence: Synthetic oligonucleotide
  Antisense strand to SEQ ID NO: 1553914
cauuugccaaagauuacag

SEQ ID NO: 1553916 - RNA, 19 nt, Artificial Sequence
  Description of Artificial Sequence: Synthetic oligonucleotide
  Sense strand starting at position 102 of SEQ ID NO: 1245322
accuaaagcuacuccgaau

SEQ ID NO: 1553917 - RNA, 19 nt, Artificial Sequence
  Description of Artificial Sequence: Synthetic oligonucleotide
  Antisense strand to SEQ ID NO: 1553916
auucggaguagcuuuaggu

SEQ ID NO: 1553918 - RNA, 19 nt, Artificial Sequence
  Description of Artificial Sequence: Synthetic oligonucleotide
  Sense strand starting at position 120 of SEQ ID NO: 1245322
uuacaaaugcuugguccau

SEQ ID NO: 1553919 - RNA, 19 nt, Artificial Sequence
  Description of Artificial Sequence: Synthetic oligonucleotide
  Antisense strand to SEQ ID NO: 1553918
auggaccaagcauuuguaa

SEQ ID NO: 1553920 - RNA, 19 nt, Artificial Sequence
  Description of Artificial Sequence: Synthetic oligonucleotide
  Sense strand starting at position 130 of SEQ ID NO: 1245322
uugguccaucucuauuaca

SEQ ID NO: 1553921 - RNA, 19 nt, Artificial Sequence
  Description of Artificial Sequence: Synthetic oligonucleotide
  Antisense strand to SEQ ID NO: 1553920
uguaauagagauggaccaa

SEQ ID NO: 1553922 - RNA, 19 nt, Artificial Sequence
  Description of Artificial Sequence: Synthetic oligonucleotide
  Sense strand starting at position 297 of SEQ ID NO: 1245322
gagaguaaguccuuagcau

SEQ ID NO: 1553923 - RNA, 19 nt, Artificial Sequence
  Description of Artificial Sequence: Synthetic oligonucleotide
  Antisense strand to SEQ ID NO: 1553922
augcuaaggacuuacucuc

SEQ ID NO: 1553924 - RNA, 19 nt, Artificial Sequence
  Description of Artificial Sequence: Synthetic oligonucleotide
  Sense strand starting at position 298 of SEQ ID NO: 1245322
agaguaaguccuuagcauu

SEQ ID NO: 1553925 - RNA, 19 nt, Artificial Sequence
  Description of Artificial Sequence: Synthetic oligonucleotide
  Antisense strand to SEQ ID NO: 1553924
aaugcuaaggacuuacucu

SEQ ID NO: 1553926 - RNA, 19 nt, Artificial Sequence
  Description of Artificial Sequence: Synthetic oligonucleotide
  Sense strand starting at position 580 of SEQ ID NO: 1245322
agucaaagguuacuaacaa

SEQ ID NO: 1553927 - RNA, 19 nt, Artificial Sequence
  Description of Artificial Sequence: Synthetic oligonucleotide
  Antisense strand to SEQ ID NO: 1553926
uuguuaguaaccuuugacu

SEQ ID NO: 1553928 - RNA, 19 nt, Artificial Sequence
  Description of Artificial Sequence: Synthetic oligonucleotide
  Sense strand starting at position 608 of SEQ ID NO: 1245322
aagauuauauguuugcaga

SEQ ID NO: 1553929 - RNA, 19 nt, Artificial Sequence
  Description of Artificial Sequence: Synthetic oligonucleotide
  Antisense strand to SEQ ID NO: 1553928
ucugcaaacauauaaucuu

SEQ ID NO: 1553930 - RNA, 19 nt, Artificial Sequence
  Description of Artificial Sequence: Synthetic oligonucleotide
  Sense strand starting at position 610 of SEQ ID NO: 1245322
gauuauauguuugcagaaa

SEQ ID NO: 1553931 - RNA, 19 nt, Artificial Sequence
  Description of Artificial Sequence: Synthetic oligonucleotide
  Antisense strand to SEQ ID NO: 1553930
uuucugcaaacauauaauc

SEQ ID NO: 1553932 - RNA, 19 nt, Artificial Sequence
  Description of Artificial Sequence: Synthetic oligonucleotide
  Sense strand starting at position 638 of SEQ ID NO: 1245322
ggguaauuccgcuauuauc

SEQ ID NO: 1553933 - RNA, 19 nt, Artificial Sequence
  Description of Artificial Sequence: Synthetic oligonucleotide
  Antisense strand to SEQ ID NO: 1553932
gauaauagcggaauuaccc

SEQ ID NO: 1553934 - RNA, 19 nt, Artificial Sequence
  Description of Artificial Sequence: Synthetic oligonucleotide
  Sense strand starting at position 647 of SEQ ID NO: 1245322
cgcuauuauccuguugugu

SEQ ID NO: 1553935 - RNA, 19 nt, Artificial Sequence
  Description of Artificial Sequence: Synthetic oligonucleotide
  Antisense strand to SEQ ID NO: 1553934
acacaacaggauaauagcg

SEQ ID NO: 1553936 - RNA, 19 nt, Artificial Sequence
  Description of Artificial Sequence: Synthetic oligonucleotide
  Sense strand starting at position 648 of SEQ ID NO: 1245322
gcuauuauccuguuguguu

SEQ ID NO: 1553937 - RNA, 19 nt, Artificial Sequence
  Description of Artificial Sequence: Synthetic oligonucleotide
  Antisense strand to SEQ ID NO: 1553936
aacacaacaggauaauagc

SEQ ID NO: 1553938 - RNA, 19 nt, Artificial Sequence
  Description of Artificial Sequence: Synthetic oligonucleotide
  Sense strand starting at position 737 of SEQ ID NO: 1245322
uugggaaauaaauguguuu

SEQ ID NO: 1553939 - RNA, 19 nt, Artificial Sequence
  Description of Artificial Sequence: Synthetic oligonucleotide
  Antisense strand to SEQ ID NO: 1553938
aaacacauuuauuucccaa

SEQ ID NO: 1553940 - RNA, 19 nt, Artificial Sequence
  Description of Artificial Sequence: Synthetic oligonucleotide
  Sense strand starting at position 866 of SEQ ID NO: 1245322
acacacuugugucuuugaa

SEQ ID NO: 1553941 - RNA, 19 nt, Artificial Sequence
  Description of Artificial Sequence: Synthetic oligonucleotide
  Antisense strand to SEQ ID NO: 1553940
uucaaagacacaagugugu

SEQ ID NO: 1553942 - RNA, 19 nt, Artificial Sequence
  Description of Artificial Sequence: Synthetic oligonucleotide
  Sense strand starting at position 908 of SEQ ID NO: 1245322
agcaguuugggacaaguga

SEQ ID NO: 1553943 - RNA, 19 nt, Artificial Sequence
  Description of Artificial Sequence: Synthetic oligonucleotide
  Antisense strand to SEQ ID NO: 1553942
ucacuugucccaaacugcu

SEQ ID NO: 1553944 - RNA, 19 nt, Artificial Sequence
  Description of Artificial Sequence: Synthetic oligonucleotide
  Sense strand starting at position 974 of SEQ ID NO: 1245322
cagugcuaacaguaagauc

SEQ ID NO: 1553945 - RNA, 19 nt, Artificial Sequence
  Description of Artificial Sequence: Synthetic oligonucleotide
  Antisense strand to SEQ ID NO: 1553944
gaucuuacuguuagcacug

SEQ ID NO: 1553946 - RNA, 19 nt, Artificial Sequence
  Description of Artificial Sequence: Synthetic oligonucleotide
  Sense strand starting at position 1077 of SEQ ID NO: 1245322
ugucacucucaguacucaa

SEQ ID NO: 1553947 - RNA, 19 nt, Artificial Sequence
  Description of Artificial Sequence: Synthetic oligonucleotide
  Antisense strand to SEQ ID NO: 1553946
uugaguacugagagugaca

SEQ ID NO: 1553948 - RNA, 19 nt, Artificial Sequence
  Description of Artificial Sequence: Synthetic oligonucleotide
  Sense strand starting at position 1319 of SEQ ID NO: 1245322
gcaggagucccguccgagu

SEQ ID NO: 1553949 - RNA, 19 nt, Artificial Sequence
  Description of Artificial Sequence: Synthetic oligonucleotide
  Antisense strand to SEQ ID NO: 1553948
acucggacgggacuccugc

SEQ ID NO: 1553950 - RNA, 19 nt, Artificial Sequence
  Description of Artificial Sequence: Synthetic oligonucleotide
  Sense strand starting at position 2012 of SEQ ID NO: 1245322
ggaccacauccggguaauu

SEQ ID NO: 1553951 - RNA, 19 nt, Artificial Sequence
  Description of Artificial Sequence: Synthetic oligonucleotide
  Antisense strand to SEQ ID NO: 1553950
aauuacccggauguggucc

SEQ ID NO: 1553952 - RNA, 19 nt, Artificial Sequence
  Description of Artificial Sequence: Synthetic oligonucleotide
  Sense strand starting at position 2293 of SEQ ID NO: 1245322
uccaguaaguguuuauaaa

SEQ ID NO: 1553953 - RNA, 19 nt, Artificial Sequence
  Description of Artificial Sequence: Synthetic oligonucleotide
  Antisense strand to SEQ ID NO: 1553952
uuuauaaacacuuacugga

SEQ ID NO: 1553954 - RNA, 19 nt, Artificial Sequence
  Description of Artificial Sequence: Synthetic oligonucleotide
  Sense strand starting at position 2294 of SEQ ID NO: 1245322
ccaguaaguguuuauaaau

SEQ ID NO: 1553955 - RNA, 19 nt, Artificial Sequence
  Description of Artificial Sequence: Synthetic oligonucleotide
  Antisense strand to SEQ ID NO: 1553954
auuuauaaacacuuacugg

SEQ ID NO: 1553956 - RNA, 19 nt, Artificial Sequence
  Description of Artificial Sequence: Synthetic oligonucleotide
  Sense strand starting at position 2432 of SEQ ID NO: 1245322
aggaguucacuucgggaag

SEQ ID NO: 1553957 - RNA, 19 nt, Artificial Sequence
  Description of Artificial Sequence: Synthetic oligonucleotide
  Antisense strand to SEQ ID NO: 1553956
cuucccgaagugaacuccu

SEQ ID NO: 1553958 - RNA, 19 nt, Artificial Sequence
  Description of Artificial Sequence: Synthetic oligonucleotide
  Sense strand starting at position 2511 of SEQ ID NO: 1245322
gguguuuacacucgagaga

SEQ ID NO: 1553959 - RNA, 19 nt, Artificial Sequence
  Description of Artificial Sequence: Synthetic oligonucleotide
  Antisense strand to SEQ ID NO: 1553958
ucucucgaguguaaacacc

SEQ ID NO: 1553960 - RNA, 19 nt, Artificial Sequence
  Description of Artificial Sequence: Synthetic oligonucleotide
  Sense strand starting at position 2512 of SEQ ID NO: 1245322
guguuuacacucgagagac

SEQ ID NO: 1553961 - RNA, 19 nt, Artificial Sequence
  Description of Artificial Sequence: Synthetic oligonucleotide
  Antisense strand to SEQ ID NO: 1553960
gucucucgaguguaaacac

SEQ ID NO: 1553962 - RNA, 19 nt, Artificial Sequence
  Description of Artificial Sequence: Synthetic oligonucleotide
  Sense strand starting at position 2576 of SEQ ID NO: 1245322
guugcaagugugaguggau

SEQ ID NO: 1553963 - RNA, 19 nt, Artificial Sequence
  Description of Artificial Sequence: Synthetic oligonucleotide
  Antisense strand to SEQ ID NO: 1553962
auccacucacacuugcaac

SEQ ID NO: 1553964 - RNA, 19 nt, Artificial Sequence
  Description of Artificial Sequence: Synthetic oligonucleotide
  Sense strand starting at position 2639 of SEQ ID NO: 1245322
cuucgaauccuacgacaca

SEQ ID NO: 1553965 - RNA, 19 nt, Artificial Sequence
  Description of Artificial Sequence: Synthetic oligonucleotide
  Antisense strand to SEQ ID NO: 1553964
ugugucguaggauucgaag

SEQ ID NO: 1553966 - RNA, 19 nt, Artificial Sequence
  Description of Artificial Sequence: Synthetic oligonucleotide
  Sense strand starting at position 2742 of SEQ ID NO: 1245322
uuacaagacgcaugcauuu

SEQ ID NO: 1553967 - RNA, 19 nt, Artificial Sequence
  Description of Artificial Sequence: Synthetic oligonucleotide
  Antisense strand to SEQ ID NO: 1553966
aaaugcaugcgucuuguaa

SEQ ID NO: 1553968 - RNA, 19 nt, Artificial Sequence
  Description of Artificial Sequence: Synthetic oligonucleotide
  Sense strand starting at position 2987 of SEQ ID NO: 1245322
ccaaacugguguucucuua

SEQ ID NO: 1553969 - RNA, 19 nt, Artificial Sequence
  Description of Artificial Sequence: Synthetic oligonucleotide
  Antisense strand to SEQ ID NO: 1553968
uaagagaacaccaguuugg

SEQ ID NO: 1553970 - RNA, 19 nt, Artificial Sequence
  Description of Artificial Sequence: Synthetic oligonucleotide
  Sense strand starting at position 3253 of SEQ ID NO: 1245322
gaaaguaaaugaccuuagu

SEQ ID NO: 1553971 - RNA, 19 nt, Artificial Sequence
  Description of Artificial Sequence: Synthetic oligonucleotide
  Antisense strand to SEQ ID NO: 1553970
acuaaggucauuuacuuuc

SEQ ID NO: 1553972 - RNA, 19 nt, Artificial Sequence
  Description of Artificial Sequence: Synthetic oligonucleotide
  Sense strand starting at position 3263 of SEQ ID NO: 1245322
gaccuuagugaauggauau

SEQ ID NO: 1553973 - RNA, 19 nt, Artificial Sequence
  Description of Artificial Sequence: Synthetic oligonucleotide
  Antisense strand to SEQ ID NO: 1553972
auauccauucacuaagguc

SEQ ID NO: 1553974 - RNA, 19 nt, Artificial Sequence
  Description of Artificial Sequence: Synthetic oligonucleotide
  Sense strand starting at position 3334 of SEQ ID NO: 1245322
gaaggaagaucugucagcu

SEQ ID NO: 1553975 - RNA, 19 nt, Artificial Sequence
  Description of Artificial Sequence: Synthetic oligonucleotide
  Antisense strand to SEQ ID NO: 1553974
agcugacagaucuuccuuc

SEQ ID NO: 1553976 - RNA, 19 nt, Artificial Sequence
  Description of Artificial Sequence: Synthetic oligonucleotide
  Sense strand starting at position 3338 of SEQ ID NO: 1245322
gaagaucugucagcugaua

SEQ ID NO: 1553977 - RNA, 19 nt, Artificial Sequence
  Description of Artificial Sequence: Synthetic oligonucleotide
  Antisense strand to SEQ ID NO: 1553976
uaucagcugacagaucuuc

SEQ ID NO: 1553978 - RNA, 19 nt, Artificial Sequence
  Description of Artificial Sequence: Synthetic oligonucleotide
  Sense strand starting at position 3340 of SEQ ID NO: 1245322
agaucugucagcugauaga

SEQ ID NO: 1553979 - RNA, 19 nt, Artificial Sequence
  Description of Artificial Sequence: Synthetic oligonucleotide
  Antisense strand to SEQ ID NO: 1553978
ucuaucagcugacagaucu

SEQ ID NO: 1553980 - RNA, 19 nt, Artificial Sequence
  Description of Artificial Sequence: Synthetic oligonucleotide
  Sense strand starting at position 3368 of SEQ ID NO: 1245322
augauuugguaacagauca

SEQ ID NO: 1553981 - RNA, 19 nt, Artificial Sequence
  Description of Artificial Sequence: Synthetic oligonucleotide
  Antisense strand to SEQ ID NO: 1553980
ugaucuguuaccaaaucau

SEQ ID NO: 1553982 - RNA, 19 nt, Artificial Sequence
  Description of Artificial Sequence: Synthetic oligonucleotide
  Sense strand starting at position 3390 of SEQ ID NO: 1245322
ugugaaucuuagguaauau

SEQ ID NO: 1553983 - RNA, 19 nt, Artificial Sequence
  Description of Artificial Sequence: Synthetic oligonucleotide
  Antisense strand to SEQ ID NO: 1553982
auauuaccuaagauucaca

SEQ ID NO: 1553984 - RNA, 19 nt, Artificial Sequence
  Description of Artificial Sequence: Synthetic oligonucleotide
  Sense strand starting at position 3543 of SEQ ID NO: 1245322
ucuuacagauucucugagu

SEQ ID NO: 1553985 - RNA, 19 nt, Artificial Sequence
  Description of Artificial Sequence: Synthetic oligonucleotide
  Antisense strand to SEQ ID NO: 1553984
acucagagaaucuguaaga

SEQ ID NO: 1553986 - RNA, 19 nt, Artificial Sequence
  Description of Artificial Sequence: Synthetic oligonucleotide
  Sense strand starting at position 3548 of SEQ ID NO: 1245322
cagauucucugagucagga

SEQ ID NO: 1553987 - RNA, 19 nt, Artificial Sequence
  Description of Artificial Sequence: Synthetic oligonucleotide
  Antisense strand to SEQ ID NO: 1553986
uccugacucagagaaucug

SEQ ID NO: 1553988 - RNA, 19 nt, Artificial Sequence
  Description of Artificial Sequence: Synthetic oligonucleotide
  Sense strand starting at position 3735 of SEQ ID NO: 1245322
uggugcucuccauagggaa

SEQ ID NO: 1553989 - RNA, 19 nt, Artificial Sequence
  Description of Artificial Sequence: Synthetic oligonucleotide
  Antisense strand to SEQ ID NO: 1553988
uucccuauggagagcacca

SEQ ID NO: 1553990 - RNA, 19 nt, Artificial Sequence
  Description of Artificial Sequence: Synthetic oligonucleotide
  Sense strand starting at position 3794 of SEQ ID NO: 1245322
ggaagagucucagcaagac

SEQ ID NO: 1553991 - RNA, 19 nt, Artificial Sequence
  Description of Artificial Sequence: Synthetic oligonucleotide
  Antisense strand to SEQ ID NO: 1553990
gucuugcugagacucuucc

SEQ ID NO: 1553992 - RNA, 19 nt, Artificial Sequence
  Description of Artificial Sequence: Synthetic oligonucleotide
  Sense strand starting at position 3878 of SEQ ID NO: 1245322
auacauugcuggccagaag

SEQ ID NO: 1553993 - RNA, 19 nt, Artificial Sequence
  Description of Artificial Sequence: Synthetic oligonucleotide
  Antisense strand to SEQ ID NO: 1553992
cuucuggccagcaauguau

SEQ ID NO: 1553994 - RNA, 19 nt, Artificial Sequence
  Description of Artificial Sequence: Synthetic oligonucleotide
  Sense strand starting at position 3978 of SEQ ID NO: 1245322
cucuuuagagucuaccaca

SEQ ID NO: 1553995 - RNA, 19 nt, Artificial Sequence
  Description of Artificial Sequence: Synthetic oligonucleotide
  Antisense strand to SEQ ID NO: 1553994
ugugguagacucuaaagag

SEQ ID NO: 1553996 - RNA, 19 nt, Artificial Sequence
  Description of Artificial Sequence: Synthetic oligonucleotide
  Sense strand starting at position 242 of SEQ ID NO: 1245323
ggugaacccucacaucaca

SEQ ID NO: 1553997 - RNA, 19 nt, Artificial Sequence
  Description of Artificial Sequence: Synthetic oligonucleotide
  Antisense strand to SEQ ID NO: 1553996
ugugaugugaggguucacc

SEQ ID NO: 1553998 - RNA, 19 nt, Artificial Sequence
  Description of Artificial Sequence: Synthetic oligonucleotide
  Sense strand starting at position 266 of SEQ ID NO: 1245323
uguacagagacguagagua

SEQ ID NO: 1553999 - RNA, 19 nt, Artificial Sequence
  Description of Artificial Sequence: Synthetic oligonucleotide
  Antisense strand to SEQ ID NO: 1553998
uacucuacgucucuguaca

SEQ ID NO: 1554000 - RNA, 19 nt, Artificial Sequence
  Description of Artificial Sequence: Synthetic oligonucleotide
  Sense strand starting at position 296 of SEQ ID NO: 1245323
ggagaaagcugagaggaua

SEQ ID NO: 1554001 - RNA, 19 nt, Artificial Sequence
  Description of Artificial Sequence: Synthetic oligonucleotide
  Antisense strand to SEQ ID NO: 1554000
uauccucucagcuuucucc

SEQ ID NO: 1554002 - RNA, 19 nt, Artificial Sequence
  Description of Artificial Sequence: Synthetic oligonucleotide
  Sense strand starting at position 411 of SEQ ID NO: 1245323
cagacuuaucugugcggaa

SEQ ID NO: 1554003 - RNA, 19 nt, Artificial Sequence
  Description of Artificial Sequence: Synthetic oligonucleotide
  Antisense strand to SEQ ID NO: 1554002
uuccgcacagauaagucug

SEQ ID NO: 1554004 - RNA, 19 nt, Artificial Sequence
  Description of Artificial Sequence: Synthetic oligonucleotide
  Sense strand starting at position 412 of SEQ ID NO: 1245323
agacuuaucugugcggaag

SEQ ID NO: 1554005 - RNA, 19 nt, Artificial Sequence
  Description of Artificial Sequence: Synthetic oligonucleotide
  Antisense strand to SEQ ID NO: 1554004
cuuccgcacagauaagucu

SEQ ID NO: 1554006 - RNA, 19 nt, Artificial Sequence
  Description of Artificial Sequence: Synthetic oligonucleotide
  Sense strand starting at position 415 of SEQ ID NO: 1245323
cuuaucugugcggaaggaa

SEQ ID NO: 1554007 - RNA, 19 nt, Artificial Sequence
  Description of Artificial Sequence: Synthetic oligonucleotide
  Antisense strand to SEQ ID NO: 1554006
uuccuuccgcacagauaag

SEQ ID NO: 1554008 - RNA, 19 nt, Artificial Sequence
  Description of Artificial Sequence: Synthetic oligonucleotide
  Sense strand starting at position 464 of SEQ ID NO: 1245323
gccuguuuguuccucugca

SEQ ID NO: 1554009 - RNA, 19 nt, Artificial Sequence
  Description of Artificial Sequence: Synthetic oligonucleotide
  Antisense strand to SEQ ID NO: 1554008
ugcagaggaacaaacaggc

SEQ ID NO: 1554010 - RNA, 19 nt, Artificial Sequence
  Description of Artificial Sequence: Synthetic oligonucleotide
  Sense strand starting at position 591 of SEQ ID NO: 1245323
acugguguucgacgugauu

SEQ ID NO: 1554011 - RNA, 19 nt, Artificial Sequence
  Description of Artificial Sequence: Synthetic oligonucleotide
  Antisense strand to SEQ ID NO: 1554010
aaucacgucgaacaccagu

SEQ ID NO: 1554012 - RNA, 19 nt, Artificial Sequence
  Description of Artificial Sequence: Synthetic oligonucleotide
  Sense strand starting at position 593 of SEQ ID NO: 1245323
ugguguucgacgugauucu

SEQ ID NO: 1554013 - RNA, 19 nt, Artificial Sequence
  Description of Artificial Sequence: Synthetic oligonucleotide
  Antisense strand to SEQ ID NO: 1554012
agaaucacgucgaacacca

SEQ ID NO: 1554014 - RNA, 19 nt, Artificial Sequence
  Description of Artificial Sequence: Synthetic oligonucleotide
  Sense strand starting at position 600 of SEQ ID NO: 1245323
cgacgugauucuccguauu

SEQ ID NO: 1554015 - RNA, 19 nt, Artificial Sequence
  Description of Artificial Sequence: Synthetic oligonucleotide
  Antisense strand to SEQ ID NO: 1554014
aauacggagaaucacgucg

SEQ ID NO: 1554016 - RNA, 19 nt, Artificial Sequence
  Description of Artificial Sequence: Synthetic oligonucleotide
  Sense strand starting at position 602 of SEQ ID NO: 1245323
acgugauucuccguauuua

SEQ ID NO: 1554017 - RNA, 19 nt, Artificial Sequence
  Description of Artificial Sequence: Synthetic oligonucleotide
  Antisense strand to SEQ ID NO: 1554016
uaaauacggagaaucacgu

SEQ ID NO: 1554018 - RNA, 19 nt, Artificial Sequence
  Description of Artificial Sequence: Synthetic oligonucleotide
  Sense strand starting at position 603 of SEQ ID NO: 1245323
cgugauucuccguauuuac

SEQ ID NO: 1554019 - RNA, 19 nt, Artificial Sequence
  Description of Artificial Sequence: Synthetic oligonucleotide
  Antisense strand to SEQ ID NO: 1554018
guaaauacggagaaucacg

SEQ ID NO: 1554020 - RNA, 19 nt, Artificial Sequence
  Description of Artificial Sequence: Synthetic oligonucleotide
  Sense strand starting at position 610 of SEQ ID NO: 1245323
cuccguauuuacuaaagga

SEQ ID NO: 1554021 - RNA, 19 nt, Artificial Sequence
  Description of Artificial Sequence: Synthetic oligonucleotide
  Antisense strand to SEQ ID NO: 1554020
uccuuuaguaaauacggag

SEQ ID NO: 1554022 - RNA, 19 nt, Artificial Sequence
  Description of Artificial Sequence: Synthetic oligonucleotide
  Sense strand starting at position 771 of SEQ ID NO: 1245323
ccuuguugauccggaaaug

SEQ ID NO: 1554023 - RNA, 19 nt, Artificial Sequence
  Description of Artificial Sequence: Synthetic oligonucleotide
  Antisense strand to SEQ ID NO: 1554022
cauuuccggaucaacaagg

SEQ ID NO: 1554024 - RNA, 19 nt, Artificial Sequence
  Description of Artificial Sequence: Synthetic oligonucleotide
  Sense strand starting at position 772 of SEQ ID NO: 1245323
cuuguugauccggaaauga

SEQ ID NO: 1554025 - RNA, 19 nt, Artificial Sequence
  Description of Artificial Sequence: Synthetic oligonucleotide
  Antisense strand to SEQ ID NO: 1554024
ucauuuccggaucaacaag

SEQ ID NO: 1554026 - RNA, 19 nt, Artificial Sequence
  Description of Artificial Sequence: Synthetic oligonucleotide
  Sense strand starting at position 782 of SEQ ID NO: 1245323
cggaaaugaaggcgucuaa

SEQ ID NO: 1554027 - RNA, 19 nt, Artificial Sequence
  Description of Artificial Sequence: Synthetic oligonucleotide
  Antisense strand to SEQ ID NO: 1554026
uuagacgccuucauuuccg

SEQ ID NO: 1554028 - RNA, 19 nt, Artificial Sequence
  Description of Artificial Sequence: Synthetic oligonucleotide
  Sense strand starting at position 881 of SEQ ID NO: 1245323
gggaaugcccuuugaguuu

SEQ ID NO: 1554029 - RNA, 19 nt, Artificial Sequence
  Description of Artificial Sequence: Synthetic oligonucleotide
  Antisense strand to SEQ ID NO: 1554028
aaacucaaagggcauuccc

SEQ ID NO: 1554030 - RNA, 19 nt, Artificial Sequence
  Description of Artificial Sequence: Synthetic oligonucleotide
  Sense strand starting at position 1154 of SEQ ID NO: 1245323
uugaucuucccguaagauu

SEQ ID NO: 1554031 - RNA, 19 nt, Artificial Sequence
  Description of Artificial Sequence: Synthetic oligonucleotide
  Antisense strand to SEQ ID NO: 1554030
aaucuuacgggaagaucaa

SEQ ID NO: 1554032 - RNA, 19 nt, Artificial Sequence
  Description of Artificial Sequence: Synthetic oligonucleotide
  Sense strand starting at position 1186 of SEQ ID NO: 1245323
ccucuugacuuccgaggaa

SEQ ID NO: 1554033 - RNA, 19 nt, Artificial Sequence
  Description of Artificial Sequence: Synthetic oligonucleotide
  Antisense strand to SEQ ID NO: 1554032
uuccucggaagucaagagg

SEQ ID NO: 1554034 - RNA, 19 nt, Artificial Sequence
  Description of Artificial Sequence: Synthetic oligonucleotide
  Sense strand starting at position 1423 of SEQ ID NO: 1245323
gugcgugagcgccuucaga

SEQ ID NO: 1554035 - RNA, 19 nt, Artificial Sequence
  Description of Artificial Sequence: Synthetic oligonucleotide
  Antisense strand to SEQ ID NO: 1554034
ucugaaggcgcucacgcac

SEQ ID NO: 1554036 - RNA, 19 nt, Artificial Sequence
  Description of Artificial Sequence: Synthetic oligonucleotide
  Sense strand starting at position 1425 of SEQ ID NO: 1245323
gcgugagcgccuucagauc

SEQ ID NO: 1554037 - RNA, 19 nt, Artificial Sequence
  Description of Artificial Sequence: Synthetic oligonucleotide
  Antisense strand to SEQ ID NO: 1554036
gaucugaaggcgcucacgc

SEQ ID NO: 1554038 - RNA, 19 nt, Artificial Sequence
  Description of Artificial Sequence: Synthetic oligonucleotide
  Sense strand starting at position 1692 of SEQ ID NO: 1245323
cagaucguuugguccugaa

SEQ ID NO: 1554039 - RNA, 19 nt, Artificial Sequence
  Description of Artificial Sequence: Synthetic oligonucleotide
  Antisense strand to SEQ ID NO: 1554038
uucaggaccaaacgaucug

SEQ ID NO: 1554040 - RNA, 19 nt, Artificial Sequence
  Description of Artificial Sequence: Synthetic oligonucleotide
  Sense strand starting at position 1696 of SEQ ID NO: 1245323
ucguuugguccugaacaug

SEQ ID NO: 1554041 - RNA, 19 nt, Artificial Sequence
  Description of Artificial Sequence: Synthetic oligonucleotide
  Antisense strand to SEQ ID NO: 1554040
cauguucaggaccaaacga

SEQ ID NO: 1554042 - RNA, 19 nt, Artificial Sequence
  Description of Artificial Sequence: Synthetic oligonucleotide
  Sense strand starting at position 1736 of SEQ ID NO: 1245323
aaagucguuugccugcuaa

SEQ ID NO: 1554043 - RNA, 19 nt, Artificial Sequence
  Description of Artificial Sequence: Synthetic oligonucleotide
  Antisense strand to SEQ ID NO: 1554042
uuagcaggcaaacgacuuu

SEQ ID NO: 1554044 - RNA, 19 nt, Artificial Sequence
  Description of Artificial Sequence: Synthetic oligonucleotide
  Sense strand starting at position 1739 of SEQ ID NO: 1245323
gucguuugccugcuaagga

SEQ ID NO: 1554045 - RNA, 19 nt, Artificial Sequence
  Description of Artificial Sequence: Synthetic oligonucleotide
  Antisense strand to SEQ ID NO: 1554044
uccuuagcaggcaaacgac

SEQ ID NO: 1554046 - RNA, 19 nt, Artificial Sequence
  Description of Artificial Sequence: Synthetic oligonucleotide
  Sense strand starting at position 2304 of SEQ ID NO: 1245323
accggaucuccucgaauuc

SEQ ID NO: 1554047 - RNA, 19 nt, Artificial Sequence
  Description of Artificial Sequence: Synthetic oligonucleotide
  Antisense strand to SEQ ID NO: 1554046
gaauucgaggagauccggu

SEQ ID NO: 1554048 - RNA, 19 nt, Artificial Sequence
  Description of Artificial Sequence: Synthetic oligonucleotide
  Sense strand starting at position 2369 of SEQ ID NO: 1245323
gcaugagacgucuggcaaa

SEQ ID NO: 1554049 - RNA, 19 nt, Artificial Sequence
  Description of Artificial Sequence: Synthetic oligonucleotide
  Antisense strand to SEQ ID NO: 1554048
uuugccagacgucucaugc

SEQ ID NO: 1554050 - RNA, 19 nt, Artificial Sequence
  Description of Artificial Sequence: Synthetic oligonucleotide
  Sense strand starting at position 2528 of SEQ ID NO: 1245323
agauguuugauggguggaa

SEQ ID NO: 1554051 - RNA, 19 nt, Artificial Sequence
  Description of Artificial Sequence: Synthetic oligonucleotide
  Antisense strand to SEQ ID NO: 1554050
uuccacccaucaaacaucu

SEQ ID NO: 1554052 - RNA, 19 nt, Artificial Sequence
  Description of Artificial Sequence: Synthetic oligonucleotide
  Sense strand starting at position 2529 of SEQ ID NO: 1245323
gauguuugauggguggaaa

SEQ ID NO: 1554053 - RNA, 19 nt, Artificial Sequence
  Description of Artificial Sequence: Synthetic oligonucleotide
  Antisense strand to SEQ ID NO: 1554052
uuuccacccaucaaacauc

SEQ ID NO: 1554054 - RNA, 19 nt, Artificial Sequence
  Description of Artificial Sequence: Synthetic oligonucleotide
  Sense strand starting at position 2547 of SEQ ID NO: 1245323
aaauguauccacgaguuac

SEQ ID NO: 1554055 - RNA, 19 nt, Artificial Sequence
  Description of Artificial Sequence: Synthetic oligonucleotide
  Antisense strand to SEQ ID NO: 1554054
guaacucguggauacauuu

SEQ ID NO: 1554056 - RNA, 19 nt, Artificial Sequence
  Description of Artificial Sequence: Synthetic oligonucleotide
  Sense strand starting at position 2656 of SEQ ID NO: 1245323
acagaaagcuuuggcuaga

SEQ ID NO: 1554057 - RNA, 19 nt, Artificial Sequence
  Description of Artificial Sequence: Synthetic oligonucleotide
  Antisense strand to SEQ ID NO: 1554056
ucuagccaaagcuuucugu

SEQ ID NO: 1554058 - RNA, 19 nt, Artificial Sequence
  Description of Artificial Sequence: Synthetic oligonucleotide
  Sense strand starting at position 2687 of SEQ ID NO: 1245323
ugcgcaucugggugguuua

SEQ ID NO: 1554059 - RNA, 19 nt, Artificial Sequence
  Description of Artificial Sequence: Synthetic oligonucleotide
  Antisense strand to SEQ ID NO: 1554058
uaaaccacccagaugcgca

SEQ ID NO: 1554060 - RNA, 19 nt, Artificial Sequence
  Description of Artificial Sequence: Synthetic oligonucleotide
  Sense strand starting at position 3512 of SEQ ID NO: 1245323
gacacccugucgcuuuaaa

SEQ ID NO: 1554061 - RNA, 19 nt, Artificial Sequence
  Description of Artificial Sequence: Synthetic oligonucleotide
  Antisense strand to SEQ ID NO: 1554060
uuuaaagcgacaggguguc

SEQ ID NO: 1554062 - RNA, 19 nt, Artificial Sequence
  Description of Artificial Sequence: Synthetic oligonucleotide
  Sense strand starting at position 3541 of SEQ ID NO: 1245323
aagcgauuguguuucgcaa

SEQ ID NO: 1554063 - RNA, 19 nt, Artificial Sequence
  Description of Artificial Sequence: Synthetic oligonucleotide
  Antisense strand to SEQ ID NO: 1554062
uugcgaaacacaaucgcuu

SEQ ID NO: 1554064 - RNA, 19 nt, Artificial Sequence
  Description of Artificial Sequence: Synthetic oligonucleotide
  Sense strand starting at position 3542 of SEQ ID NO: 1245323
agcgauuguguuucgcaaa

SEQ ID NO: 1554065 - RNA, 19 nt, Artificial Sequence
  Description of Artificial Sequence: Synthetic oligonucleotide
  Antisense strand to SEQ ID NO: 1554064
uuugcgaaacacaaucgcu

SEQ ID NO: 1554066 - RNA, 19 nt, Artificial Sequence
  Description of Artificial Sequence: Synthetic oligonucleotide
  Sense strand starting at position 3545 of SEQ ID NO: 1245323
gauuguguuucgcaaacaa

SEQ ID NO: 1554067 - RNA, 19 nt, Artificial Sequence
  Description of Artificial Sequence: Synthetic oligonucleotide
  Antisense strand to SEQ ID NO: 1554066
uuguuugcgaaacacaauc

SEQ ID NO: 1554068 - RNA, 19 nt, Artificial Sequence
  Description of Artificial Sequence: Synthetic oligonucleotide
  Sense strand starting at position 3549 of SEQ ID NO: 1245323
guguuucgcaaacaacaga

SEQ ID NO: 1554069 - RNA, 19 nt, Artificial Sequence
  Description of Artificial Sequence: Synthetic oligonucleotide
  Antisense strand to SEQ ID NO: 1554068
ucuguuguuugcgaaacac

SEQ ID NO: 1554070 - RNA, 19 nt, Artificial Sequence
  Description of Artificial Sequence: Synthetic oligonucleotide
  Sense strand starting at position 3703 of SEQ ID NO: 1245323
gccggagccauggagaaau

SEQ ID NO: 1554071 - RNA, 19 nt, Artificial Sequence
  Description of Artificial Sequence: Synthetic oligonucleotide
  Antisense strand to SEQ ID NO: 1554070
auuucuccauggcuccggc

SEQ ID NO: 1554072 - RNA, 19 nt, Artificial Sequence
  Description of Artificial Sequence: Synthetic oligonucleotide
  Sense strand starting at position 3918 of SEQ ID NO: 1245323
gagcgcugucucgguuuaa

SEQ ID NO: 1554073 - RNA, 19 nt, Artificial Sequence
  Description of Artificial Sequence: Synthetic oligonucleotide
  Antisense strand to SEQ ID NO: 1554072
uuaaaccgagacagcgcuc

SEQ ID NO: 1554074 - RNA, 19 nt, Artificial Sequence
  Description of Artificial Sequence: Synthetic oligonucleotide
  Sense strand starting at position 3919 of SEQ ID NO: 1245323
agcgcugucucgguuuaaa

SEQ ID NO: 1554075 - RNA, 19 nt, Artificial Sequence
  Description of Artificial Sequence: Synthetic oligonucleotide
  Antisense strand to SEQ ID NO: 1554074
uuuaaaccgagacagcgcu

SEQ ID NO: 1554076 - RNA, 19 nt, Artificial Sequence
  Description of Artificial Sequence: Synthetic oligonucleotide
  Sense strand starting at position 63 of SEQ ID NO: 1245324
ggcggaaggacuugcagaa

SEQ ID NO: 1554077 - RNA, 19 nt, Artificial Sequence
  Description of Artificial Sequence: Synthetic oligonucleotide
  Antisense strand to SEQ ID NO: 1554076
uucugcaaguccuuccgcc

SEQ ID NO: 1554078 - RNA, 19 nt, Artificial Sequence
  Description of Artificial Sequence: Synthetic oligonucleotide
  Sense strand starting at position 75 of SEQ ID NO: 1245324
ugcagaauuccaggagcua

SEQ ID NO: 1554079 - RNA, 19 nt, Artificial Sequence
  Description of Artificial Sequence: Synthetic oligonucleotide
  Antisense strand to SEQ ID NO: 1554078
uagcuccuggaauucugca

SEQ ID NO: 1554080 - RNA, 19 nt, Artificial Sequence
  Description of Artificial Sequence: Synthetic oligonucleotide
  Sense strand starting at position 76 of SEQ ID NO: 1245324
gcagaauuccaggagcuaa

SEQ ID NO: 1554081 - RNA, 19 nt, Artificial Sequence
  Description of Artificial Sequence: Synthetic oligonucleotide
  Antisense strand to SEQ ID NO: 1554080
uuagcuccuggaauucugc

SEQ ID NO: 1554082 - RNA, 19 nt, Artificial Sequence
  Description of Artificial Sequence: Synthetic oligonucleotide
  Sense strand starting at position 323 of SEQ ID NO: 1245324
cacugugauguccagagga

SEQ ID NO: 1554083 - RNA, 19 nt, Artificial Sequence
  Description of Artificial Sequence: Synthetic oligonucleotide
  Antisense strand to SEQ ID NO: 1554082
uccucuggacaucacagug

SEQ ID NO: 1554084 - RNA, 19 nt, Artificial Sequence
  Description of Artificial Sequence: Synthetic oligonucleotide
  Sense strand starting at position 325 of SEQ ID NO: 1245324
cugugauguccagaggaug

SEQ ID NO: 1554085 - RNA, 19 nt, Artificial Sequence
  Description of Artificial Sequence: Synthetic oligonucleotide
  Antisense strand to SEQ ID NO: 1554084
cauccucuggacaucacag

SEQ ID NO: 1554086 - RNA, 19 nt, Artificial Sequence
  Description of Artificial Sequence: Synthetic oligonucleotide
  Sense strand starting at position 706 of SEQ ID NO: 1245324
cucacuaagucuccgaguu

SEQ ID NO: 1554087 - RNA, 19 nt, Artificial Sequence
  Description of Artificial Sequence: Synthetic oligonucleotide
  Antisense strand to SEQ ID NO: 1554086
aacucggagacuuagugag

SEQ ID NO: 1554088 - RNA, 19 nt, Artificial Sequence
  Description of Artificial Sequence: Synthetic oligonucleotide
  Sense strand starting at position 707 of SEQ ID NO: 1245324
ucacuaagucuccgaguua

SEQ ID NO: 1554089 - RNA, 19 nt, Artificial Sequence
  Description of Artificial Sequence: Synthetic oligonucleotide
  Antisense strand to SEQ ID NO: 1554088
uaacucggagacuuaguga

SEQ ID NO: 1554090 - RNA, 19 nt, Artificial Sequence
  Description of Artificial Sequence: Synthetic oligonucleotide
  Sense strand starting at position 742 of SEQ ID NO: 1245324
cuauuugguucccaagaca

SEQ ID NO: 1554091 - RNA, 19 nt, Artificial Sequence
  Description of Artificial Sequence: Synthetic oligonucleotide
  Antisense strand to SEQ ID NO: 1554090
ugucuugggaaccaaauag

SEQ ID NO: 1554092 - RNA, 19 nt, Artificial Sequence
  Description of Artificial Sequence: Synthetic oligonucleotide
  Sense strand starting at position 745 of SEQ ID NO: 1245324
uuugguucccaagacacuu

SEQ ID NO: 1554093 - RNA, 19 nt, Artificial Sequence
  Description of Artificial Sequence: Synthetic oligonucleotide
  Antisense strand to SEQ ID NO: 1554092
aagugucuugggaaccaaa

SEQ ID NO: 1554094 - RNA, 19 nt, Artificial Sequence
  Description of Artificial Sequence: Synthetic oligonucleotide
  Sense strand starting at position 855 of SEQ ID NO: 1245324
aagggaacgucuuugcaaa

SEQ ID NO: 1554095 - RNA, 19 nt, Artificial Sequence
  Description of Artificial Sequence: Synthetic oligonucleotide
  Antisense strand to SEQ ID NO: 1554094
uuugcaaagacguucccuu

SEQ ID NO: 1554096 - RNA, 19 nt, Artificial Sequence
  Description of Artificial Sequence: Synthetic oligonucleotide
  Sense strand starting at position 1013 of SEQ ID NO: 1245324
uuaagauaagcaggauauu

SEQ ID NO: 1554097 - RNA, 19 nt, Artificial Sequence
  Description of Artificial Sequence: Synthetic oligonucleotide
  Antisense strand to SEQ ID NO: 1554096
aauauccugcuuaucuuaa

SEQ ID NO: 1554098 - RNA, 19 nt, Artificial Sequence
  Description of Artificial Sequence: Synthetic oligonucleotide
  Sense strand starting at position 1046 of SEQ ID NO: 1245324
cucaccaguugguuugaga

SEQ ID NO: 1554099 - RNA, 19 nt, Artificial Sequence
  Description of Artificial Sequence: Synthetic oligonucleotide
  Antisense strand to SEQ ID NO: 1554098
ucucaaaccaacuggugag

SEQ ID NO: 1554100 - RNA, 19 nt, Artificial Sequence
  Description of Artificial Sequence: Synthetic oligonucleotide
  Sense strand starting at position 1157 of SEQ ID NO: 1245324
agaaacuuaugauaacaga

SEQ ID NO: 1554101 - RNA, 19 nt, Artificial Sequence
  Description of Artificial Sequence: Synthetic oligonucleotide
  Antisense strand to SEQ ID NO: 1554100
ucuguuaucauaaguuucu

SEQ ID NO: 1554102 - RNA, 19 nt, Artificial Sequence
  Description of Artificial Sequence: Synthetic oligonucleotide
  Sense strand starting at position 1187 of SEQ ID NO: 1245324
agcccaacuguuugucuua

SEQ ID NO: 1554103 - RNA, 19 nt, Artificial Sequence
  Description of Artificial Sequence: Synthetic oligonucleotide
  Antisense strand to SEQ ID NO: 1554102
uaagacaaacaguugggcu

SEQ ID NO: 1554104 - RNA, 19 nt, Artificial Sequence
  Description of Artificial Sequence: Synthetic oligonucleotide
  Sense strand starting at position 1234 of SEQ ID NO: 1245324
ggcggugauugccuugaua

SEQ ID NO: 1554105 - RNA, 19 nt, Artificial Sequence
  Description of Artificial Sequence: Synthetic oligonucleotide
  Antisense strand to SEQ ID NO: 1554104
uaucaaggcaaucaccgcc

SEQ ID NO: 1554106 - RNA, 19 nt, Artificial Sequence
  Description of Artificial Sequence: Synthetic oligonucleotide
  Sense strand starting at position 1236 of SEQ ID NO: 1245324
cggugauugccuugauauu

SEQ ID NO: 1554107 - RNA, 19 nt, Artificial Sequence
  Description of Artificial Sequence: Synthetic oligonucleotide
  Antisense strand to SEQ ID NO: 1554106
aauaucaaggcaaucaccg

SEQ ID NO: 1554108 - RNA, 19 nt, Artificial Sequence
  Description of Artificial Sequence: Synthetic oligonucleotide
  Sense strand starting at position 1245 of SEQ ID NO: 1245324
ccuugauauuuagcuguca

SEQ ID NO: 1554109 - RNA, 19 nt, Artificial Sequence
  Description of Artificial Sequence: Synthetic oligonucleotide
  Antisense strand to SEQ ID NO: 1554108
ugacagcuaaauaucaagg

SEQ ID NO: 1554110 - RNA, 19 nt, Artificial Sequence
  Description of Artificial Sequence: Synthetic oligonucleotide
  Sense strand starting at position 1250 of SEQ ID NO: 1245324
auauuuagcugucagauaa

SEQ ID NO: 1554111 - RNA, 19 nt, Artificial Sequence
  Description of Artificial Sequence: Synthetic oligonucleotide
  Antisense strand to SEQ ID NO: 1554110
uuaucugacagcuaaauau

SEQ ID NO: 1554112 - RNA, 19 nt, Artificial Sequence
  Description of Artificial Sequence: Synthetic oligonucleotide
  Sense strand starting at position 1644 of SEQ ID NO: 1245324
uguacagagacguagagua

SEQ ID NO: 1554113 - RNA, 19 nt, Artificial Sequence
  Description of Artificial Sequence: Synthetic oligonucleotide
  Antisense strand to SEQ ID NO: 1554112
uacucuacgucucuguaca

SEQ ID NO: 1554114 - RNA, 19 nt, Artificial Sequence
  Description of Artificial Sequence: Synthetic oligonucleotide
  Sense strand starting at position 1674 of SEQ ID NO: 1245324
ggagaaagcugagaggaua

SEQ ID NO: 1554115 - RNA, 19 nt, Artificial Sequence
  Description of Artificial Sequence: Synthetic oligonucleotide
  Antisense strand to SEQ ID NO: 1554114
uauccucucagcuuucucc

SEQ ID NO: 1554116 - RNA, 19 nt, Artificial Sequence
  Description of Artificial Sequence: Synthetic oligonucleotide
  Sense strand starting at position 1789 of SEQ ID NO: 1245324
cagacuuaucugugcggaa

SEQ ID NO: 1554117 - RNA, 19 nt, Artificial Sequence
  Description of Artificial Sequence: Synthetic oligonucleotide
  Antisense strand to SEQ ID NO: 1554116
uuccgcacagauaagucug

SEQ ID NO: 1554118 - RNA, 19 nt, Artificial Sequence
  Description of Artificial Sequence: Synthetic oligonucleotide
  Sense strand starting at position 1790 of SEQ ID NO: 1245324
agacuuaucugugcggaag

SEQ ID NO: 1554119 - RNA, 19 nt, Artificial Sequence
  Description of Artificial Sequence: Synthetic oligonucleotide
  Antisense strand to SEQ ID NO: 1554118
cuuccgcacagauaagucu

SEQ ID NO: 1554120 - RNA, 19 nt, Artificial Sequence
  Description of Artificial Sequence: Synthetic oligonucleotide
  Sense strand starting at position 1793 of SEQ ID NO: 1245324
cuuaucugugcggaaggaa

SEQ ID NO: 1554121 - RNA, 19 nt, Artificial Sequence
  Description of Artificial Sequence: Synthetic oligonucleotide
  Antisense strand to SEQ ID NO: 1554120
uuccuuccgcacagauaag

SEQ ID NO: 1554122 - RNA, 19 nt, Artificial Sequence
  Description of Artificial Sequence: Synthetic oligonucleotide
  Sense strand starting at position 1980 of SEQ ID NO: 1245324
acgugauucuccguauuua

SEQ ID NO: 1554123 - RNA, 19 nt, Artificial Sequence
  Description of Artificial Sequence: Synthetic oligonucleotide
  Antisense strand to SEQ ID NO: 1554122
uaaauacggagaaucacgu

SEQ ID NO: 1554124 - RNA, 19 nt, Artificial Sequence
  Description of Artificial Sequence: Synthetic oligonucleotide
  Sense strand starting at position 1981 of SEQ ID NO: 1245324
cgugauucuccguauuuac

SEQ ID NO: 1554125 - RNA, 19 nt, Artificial Sequence
  Description of Artificial Sequence: Synthetic oligonucleotide
  Antisense strand to SEQ ID NO: 1554124
guaaauacggagaaucacg

SEQ ID NO: 1554126 - RNA, 19 nt, Artificial Sequence
  Description of Artificial Sequence: Synthetic oligonucleotide
  Sense strand starting at position 1988 of SEQ ID NO: 1245324
cuccguauuuacuaaagga

SEQ ID NO: 1554127 - RNA, 19 nt, Artificial Sequence
  Description of Artificial Sequence: Synthetic oligonucleotide
  Antisense strand to SEQ ID NO: 1554126
uccuuuaguaaauacggag

SEQ ID NO: 1554128 - RNA, 19 nt, Artificial Sequence
  Description of Artificial Sequence: Synthetic oligonucleotide
  Sense strand starting at position 2150 of SEQ ID NO: 1245324
cuuguugauccggaaauga

SEQ ID NO: 1554129 - RNA, 19 nt, Artificial Sequence
  Description of Artificial Sequence: Synthetic oligonucleotide
  Antisense strand to SEQ ID NO: 1554128
ucauuuccggaucaacaag

SEQ ID NO: 1554130 - RNA, 19 nt, Artificial Sequence
  Description of Artificial Sequence: Synthetic oligonucleotide
  Sense strand starting at position 2160 of SEQ ID NO: 1245324
cggaaaugaaggcgucuaa

SEQ ID NO: 1554131 - RNA, 19 nt, Artificial Sequence
  Description of Artificial Sequence: Synthetic oligonucleotide
  Antisense strand to SEQ ID NO: 1554130
uuagacgccuucauuuccg

SEQ ID NO: 1554132 - RNA, 19 nt, Artificial Sequence
  Description of Artificial Sequence: Synthetic oligonucleotide
  Sense strand starting at position 2259 of SEQ ID NO: 1245324
gggaaugcccuuugaguuu

SEQ ID NO: 1554133 - RNA, 19 nt, Artificial Sequence
  Description of Artificial Sequence: Synthetic oligonucleotide
  Antisense strand to SEQ ID NO: 1554132
aaacucaaagggcauuccc

SEQ ID NO: 1554134 - RNA, 19 nt, Artificial Sequence
  Description of Artificial Sequence: Synthetic oligonucleotide
  Sense strand starting at position 2532 of SEQ ID NO: 1245324
uugaucuucccguaagauu

SEQ ID NO: 1554135 - RNA, 19 nt, Artificial Sequence
  Description of Artificial Sequence: Synthetic oligonucleotide
  Antisense strand to SEQ ID NO: 1554134
aaucuuacgggaagaucaa

SEQ ID NO: 1554136 - RNA, 19 nt, Artificial Sequence
  Description of Artificial Sequence: Synthetic oligonucleotide
  Sense strand starting at position 2801 of SEQ ID NO: 1245324
gugcgugagcgccuucaga

SEQ ID NO: 1554137 - RNA, 19 nt, Artificial Sequence
  Description of Artificial Sequence: Synthetic oligonucleotide
  Antisense strand to SEQ ID NO: 1554136
ucugaaggcgcucacgcac

SEQ ID NO: 1554138 - RNA, 19 nt, Artificial Sequence
  Description of Artificial Sequence: Synthetic oligonucleotide
  Sense strand starting at position 2803 of SEQ ID NO: 1245324
gcgugagcgccuucagauc

SEQ ID NO: 1554139 - RNA, 19 nt, Artificial Sequence
  Description of Artificial Sequence: Synthetic oligonucleotide
  Antisense strand to SEQ ID NO: 1554138
gaucugaaggcgcucacgc

SEQ ID NO: 1554140 - RNA, 19 nt, Artificial Sequence
  Description of Artificial Sequence: Synthetic oligonucleotide
  Sense strand starting at position 3070 of SEQ ID NO: 1245324
cagaucguuugguccugaa

SEQ ID NO: 1554141 - RNA, 19 nt, Artificial Sequence
  Description of Artificial Sequence: Synthetic oligonucleotide
  Antisense strand to SEQ ID NO: 1554140
uucaggaccaaacgaucug

SEQ ID NO: 1554142 - RNA, 19 nt, Artificial Sequence
  Description of Artificial Sequence: Synthetic oligonucleotide
  Sense strand starting at position 3074 of SEQ ID NO: 1245324
ucguuugguccugaacaug

SEQ ID NO: 1554143 - RNA, 19 nt, Artificial Sequence
  Description of Artificial Sequence: Synthetic oligonucleotide
  Antisense strand to SEQ ID NO: 1554142
cauguucaggaccaaacga

SEQ ID NO: 1554144 - RNA, 19 nt, Artificial Sequence
  Description of Artificial Sequence: Synthetic oligonucleotide
  Sense strand starting at position 3117 of SEQ ID NO: 1245324
gucguuugccugcuaagga

SEQ ID NO: 1554145 - RNA, 19 nt, Artificial Sequence
  Description of Artificial Sequence: Synthetic oligonucleotide
  Antisense strand to SEQ ID NO: 1554144
uccuuagcaggcaaacgac

SEQ ID NO: 1554146 - RNA, 19 nt, Artificial Sequence
  Description of Artificial Sequence: Synthetic oligonucleotide
  Sense strand starting at position 3682 of SEQ ID NO: 1245324
accggaucuccucgaauuc

SEQ ID NO: 1554147 - RNA, 19 nt, Artificial Sequence
  Description of Artificial Sequence: Synthetic oligonucleotide
  Antisense strand to SEQ ID NO: 1554146
gaauucgaggagauccggu

SEQ ID NO: 1554148 - RNA, 19 nt, Artificial Sequence
  Description of Artificial Sequence: Synthetic oligonucleotide
  Sense strand starting at position 3747 of SEQ ID NO: 1245324
gcaugagacgucuggcaaa

SEQ ID NO: 1554149 - RNA, 19 nt, Artificial Sequence
  Description of Artificial Sequence: Synthetic oligonucleotide
  Antisense strand to SEQ ID NO: 1554148
uuugccagacgucucaugc

SEQ ID NO: 1554150 - RNA, 19 nt, Artificial Sequence
  Description of Artificial Sequence: Synthetic oligonucleotide
  Sense strand starting at position 3906 of SEQ ID NO: 1245324
agauguuugauggguggaa

SEQ ID NO: 1554151 - RNA, 19 nt, Artificial Sequence
  Description of Artificial Sequence: Synthetic oligonucleotide
  Antisense strand to SEQ ID NO: 1554150
uuccacccaucaaacaucu

SEQ ID NO: 1554152 - RNA, 19 nt, Artificial Sequence
  Description of Artificial Sequence: Synthetic oligonucleotide
  Sense strand starting at position 3907 of SEQ ID NO: 1245324
gauguuugauggguggaaa

SEQ ID NO: 1554153 - RNA, 19 nt, Artificial Sequence
  Description of Artificial Sequence: Synthetic oligonucleotide
  Antisense strand to SEQ ID NO: 1554152
uuuccacccaucaaacauc

SEQ ID NO: 1554154 - RNA, 19 nt, Artificial Sequence
  Description of Artificial Sequence: Synthetic oligonucleotide
  Sense strand starting at position 3925 of SEQ ID NO: 1245324
aaauguauccacgaguuac

SEQ ID NO: 1554155 - RNA, 19 nt, Artificial Sequence
  Description of Artificial Sequence: Synthetic oligonucleotide
  Antisense strand to SEQ ID NO: 1554154
guaacucguggauacauuu

SEQ ID NO: 1554156 - RNA, 19 nt, Artificial Sequence
  Description of Artificial Sequence: Synthetic oligonucleotide
  Sense strand starting at position 278 of SEQ ID NO: 1245325
gagcguguuauucugcuga

SEQ ID NO: 1554157 - RNA, 19 nt, Artificial Sequence
  Description of Artificial Sequence: Synthetic oligonucleotide
  Antisense strand to SEQ ID NO: 1554156
ucagcagaauaacacgcuc

SEQ ID NO: 1554158 - RNA, 19 nt, Artificial Sequence
  Description of Artificial Sequence: Synthetic oligonucleotide
  Sense strand starting at position 334 of SEQ ID NO: 1245325
cucucucagccuuagaaag

SEQ ID NO: 1554159 - RNA, 19 nt, Artificial Sequence
  Description of Artificial Sequence: Synthetic oligonucleotide
  Antisense strand to SEQ ID NO: 1554158
cuuucuaaggcugagagag

SEQ ID NO: 1554160 - RNA, 19 nt, Artificial Sequence
  Description of Artificial Sequence: Synthetic oligonucleotide
  Sense strand starting at position 464 of SEQ ID NO: 1245325
gcucaauucucauuagaag

SEQ ID NO: 1554161 - RNA, 19 nt, Artificial Sequence
  Description of Artificial Sequence: Synthetic oligonucleotide
  Antisense strand to SEQ ID NO: 1554160
cuucuaaugagaauugagc

SEQ ID NO: 1554162 - RNA, 19 nt, Artificial Sequence
  Description of Artificial Sequence: Synthetic oligonucleotide
  Sense strand starting at position 575 of SEQ ID NO: 1245325
caagcucaguuccugaaga

SEQ ID NO: 1554163 - RNA, 19 nt, Artificial Sequence
  Description of Artificial Sequence: Synthetic oligonucleotide
  Antisense strand to SEQ ID NO: 1554162
ucuucaggaacugagcuug

SEQ ID NO: 1554164 - RNA, 19 nt, Artificial Sequence
  Description of Artificial Sequence: Synthetic oligonucleotide
  Sense strand starting at position 605 of SEQ ID NO: 1245325
gagggagccguccgggaau

SEQ ID NO: 1554165 - RNA, 19 nt, Artificial Sequence
  Description of Artificial Sequence: Synthetic oligonucleotide
  Antisense strand to SEQ ID NO: 1554164
auucccggacggcucccuc

SEQ ID NO: 1554166 - RNA, 19 nt, Artificial Sequence
  Description of Artificial Sequence: Synthetic oligonucleotide
  Sense strand starting at position 608 of SEQ ID NO: 1245325
ggagccguccgggaaugaa

SEQ ID NO: 1554167 - RNA, 19 nt, Artificial Sequence
  Description of Artificial Sequence: Synthetic oligonucleotide
  Antisense strand to SEQ ID NO: 1554166
uucauucccggacggcucc

SEQ ID NO: 1554168 - RNA, 19 nt, Artificial Sequence
  Description of Artificial Sequence: Synthetic oligonucleotide
  Sense strand starting at position 618 of SEQ ID NO: 1245325
gggaaugaacuuugccuga

SEQ ID NO: 1554169 - RNA, 19 nt, Artificial Sequence
  Description of Artificial Sequence: Synthetic oligonucleotide
  Antisense strand to SEQ ID NO: 1554168
ucaggcaaaguucauuccc

SEQ ID NO: 1554170 - RNA, 19 nt, Artificial Sequence
  Description of Artificial Sequence: Synthetic oligonucleotide
  Sense strand starting at position 622 of SEQ ID NO: 1245325
augaacuuugccugagcca

SEQ ID NO: 1554171 - RNA, 19 nt, Artificial Sequence
  Description of Artificial Sequence: Synthetic oligonucleotide
  Antisense strand to SEQ ID NO: 1554170
uggcucaggcaaaguucau

SEQ ID NO: 1554172 - RNA, 19 nt, Artificial Sequence
  Description of Artificial Sequence: Synthetic oligonucleotide
  Sense strand starting at position 732 of SEQ ID NO: 1245325
gcuucuauucgagcugcua

SEQ ID NO: 1554173 - RNA, 19 nt, Artificial Sequence
  Description of Artificial Sequence: Synthetic oligonucleotide
  Antisense strand to SEQ ID NO: 1554172
uagcagcucgaauagaagc

SEQ ID NO: 1554174 - RNA, 19 nt, Artificial Sequence
  Description of Artificial Sequence: Synthetic oligonucleotide
  Sense strand starting at position 930 of SEQ ID NO: 1245325
guacauaaccagugaguuu

SEQ ID NO: 1554175 - RNA, 19 nt, Artificial Sequence
  Description of Artificial Sequence: Synthetic oligonucleotide
  Antisense strand to SEQ ID NO: 1554174
aaacucacugguuauguac

SEQ ID NO: 1554176 - RNA, 19 nt, Artificial Sequence
  Description of Artificial Sequence: Synthetic oligonucleotide
  Sense strand starting at position 937 of SEQ ID NO: 1245325
accagugaguuucucuaag

SEQ ID NO: 1554177 - RNA, 19 nt, Artificial Sequence
  Description of Artificial Sequence: Synthetic oligonucleotide
  Antisense strand to SEQ ID NO: 1554176
cuuagagaaacucacuggu

SEQ ID NO: 1554178 - RNA, 19 nt, Artificial Sequence
  Description of Artificial Sequence: Synthetic oligonucleotide
  Sense strand starting at position 939 of SEQ ID NO: 1245325
cagugaguuucucuaagua

SEQ ID NO: 1554179 - RNA, 19 nt, Artificial Sequence
  Description of Artificial Sequence: Synthetic oligonucleotide
  Antisense strand to SEQ ID NO: 1554178
uacuuagagaaacucacug

SEQ ID NO: 1554180 - RNA, 19 nt, Artificial Sequence
  Description of Artificial Sequence: Synthetic oligonucleotide
  Sense strand starting at position 1062 of SEQ ID NO: 1245325
accugugagcccugaggaa

SEQ ID NO: 1554181 - RNA, 19 nt, Artificial Sequence
  Description of Artificial Sequence: Synthetic oligonucleotide
  Antisense strand to SEQ ID NO: 1554180
uuccucagggcucacaggu

SEQ ID NO: 1554182 - RNA, 19 nt, Artificial Sequence
  Description of Artificial Sequence: Synthetic oligonucleotide
  Sense strand starting at position 1328 of SEQ ID NO: 1245325
agcucaaaugcaugaguua

SEQ ID NO: 1554183 - RNA, 19 nt, Artificial Sequence
  Description of Artificial Sequence: Synthetic oligonucleotide
  Antisense strand to SEQ ID NO: 1554182
uaacucaugcauuugagcu

SEQ ID NO: 1554184 - RNA, 19 nt, Artificial Sequence
  Description of Artificial Sequence: Synthetic oligonucleotide
  Sense strand starting at position 1329 of SEQ ID NO: 1245325
gcucaaaugcaugaguuaa

SEQ ID NO: 1554185 - RNA, 19 nt, Artificial Sequence
  Description of Artificial Sequence: Synthetic oligonucleotide
  Antisense strand to SEQ ID NO: 1554184
uuaacucaugcauuugagc

SEQ ID NO: 1554186 - RNA, 19 nt, Artificial Sequence
  Description of Artificial Sequence: Synthetic oligonucleotide
  Sense strand starting at position 1331 of SEQ ID NO: 1245325
ucaaaugcaugaguuaaug

SEQ ID NO: 1554187 - RNA, 19 nt, Artificial Sequence
  Description of Artificial Sequence: Synthetic oligonucleotide
  Antisense strand to SEQ ID NO: 1554186
cauuaacucaugcauuuga

SEQ ID NO: 1554188 - RNA, 19 nt, Artificial Sequence
  Description of Artificial Sequence: Synthetic oligonucleotide
  Sense strand starting at position 1740 of SEQ ID NO: 1245325
gacagucugcuguggauuu

SEQ ID NO: 1554189 - RNA, 19 nt, Artificial Sequence
  Description of Artificial Sequence: Synthetic oligonucleotide
  Antisense strand to SEQ ID NO: 1554188
aaauccacagcagacuguc

SEQ ID NO: 1554190 - RNA, 19 nt, Artificial Sequence
  Description of Artificial Sequence: Synthetic oligonucleotide
  Sense strand starting at position 1819 of SEQ ID NO: 1245325
cgcucuaaacagcaugaaa

SEQ ID NO: 1554191 - RNA, 19 nt, Artificial Sequence
  Description of Artificial Sequence: Synthetic oligonucleotide
  Antisense strand to SEQ ID NO: 1554190
uuucaugcuguuuagagcg

SEQ ID NO: 1554192 - RNA, 19 nt, Artificial Sequence
  Description of Artificial Sequence: Synthetic oligonucleotide
  Sense strand starting at position 1870 of SEQ ID NO: 1245325
ggccuugaugcugauuauu

SEQ ID NO: 1554193 - RNA, 19 nt, Artificial Sequence
  Description of Artificial Sequence: Synthetic oligonucleotide
  Antisense strand to SEQ ID NO: 1554192
aauaaucagcaucaaggcc

SEQ ID NO: 1554194 - RNA, 19 nt, Artificial Sequence
  Description of Artificial Sequence: Synthetic oligonucleotide
  Sense strand starting at position 1872 of SEQ ID NO: 1245325
ccuugaugcugauuauuaa

SEQ ID NO: 1554195 - RNA, 19 nt, Artificial Sequence
  Description of Artificial Sequence: Synthetic oligonucleotide
  Antisense strand to SEQ ID NO: 1554194
uuaauaaucagcaucaagg

SEQ ID NO: 1554196 - RNA, 19 nt, Artificial Sequence
  Description of Artificial Sequence: Synthetic oligonucleotide
  Sense strand starting at position 1873 of SEQ ID NO: 1245325
cuugaugcugauuauuaau

SEQ ID NO: 1554197 - RNA, 19 nt, Artificial Sequence
  Description of Artificial Sequence: Synthetic oligonucleotide
  Antisense strand to SEQ ID NO: 1554196
auuaauaaucagcaucaag

SEQ ID NO: 1554198 - RNA, 19 nt, Artificial Sequence
  Description of Artificial Sequence: Synthetic oligonucleotide
  Sense strand starting at position 1957 of SEQ ID NO: 1245325
cgggcagccaguuaaucau

SEQ ID NO: 1554199 - RNA, 19 nt, Artificial Sequence
  Description of Artificial Sequence: Synthetic oligonucleotide
  Antisense strand to SEQ ID NO: 1554198
augauuaacuggcugcccg

SEQ ID NO: 1554200 - RNA, 19 nt, Artificial Sequence
  Description of Artificial Sequence: Synthetic oligonucleotide
  Sense strand starting at position 1964 of SEQ ID NO: 1245325
ccaguuaaucauuacucga

SEQ ID NO: 1554201 - RNA, 19 nt, Artificial Sequence
  Description of Artificial Sequence: Synthetic oligonucleotide
  Antisense strand to SEQ ID NO: 1554200
ucgaguaaugauuaacugg

SEQ ID NO: 1554202 - RNA, 19 nt, Artificial Sequence
  Description of Artificial Sequence: Synthetic oligonucleotide
  Sense strand starting at position 1966 of SEQ ID NO: 1245325
aguuaaucauuacucgagu

SEQ ID NO: 1554203 - RNA, 19 nt, Artificial Sequence
  Description of Artificial Sequence: Synthetic oligonucleotide
  Antisense strand to SEQ ID NO: 1554202
acucgaguaaugauuaacu

SEQ ID NO: 1554204 - RNA, 19 nt, Artificial Sequence
  Description of Artificial Sequence: Synthetic oligonucleotide
  Sense strand starting at position 1969 of SEQ ID NO: 1245325
uaaucauuacucgagucag

SEQ ID NO: 1554205 - RNA, 19 nt, Artificial Sequence
  Description of Artificial Sequence: Synthetic oligonucleotide
  Antisense strand to SEQ ID NO: 1554204
cugacucgaguaaugauua

SEQ ID NO: 1554206 - RNA, 19 nt, Artificial Sequence
  Description of Artificial Sequence: Synthetic oligonucleotide
  Sense strand starting at position 1991 of SEQ ID NO: 1245325
caaugagacuggcuggaau

SEQ ID NO: 1554207 - RNA, 19 nt, Artificial Sequence
  Description of Artificial Sequence: Synthetic oligonucleotide
  Antisense strand to SEQ ID NO: 1554206
auuccagccagucucauug

SEQ ID NO: 1554208 - RNA, 19 nt, Artificial Sequence
  Description of Artificial Sequence: Synthetic oligonucleotide
  Sense strand starting at position 2002 of SEQ ID NO: 1245325
gcuggaauuucucuugcau

SEQ ID NO: 1554209 - RNA, 19 nt, Artificial Sequence
  Description of Artificial Sequence: Synthetic oligonucleotide
  Antisense strand to SEQ ID NO: 1554208
augcaagagaaauuccagc

SEQ ID NO: 1554210 - RNA, 19 nt, Artificial Sequence
  Description of Artificial Sequence: Synthetic oligonucleotide
  Sense strand starting at position 2046 of SEQ ID NO: 1245325
ggugguucccaaggucaaa

SEQ ID NO: 1554211 - RNA, 19 nt, Artificial Sequence
  Description of Artificial Sequence: Synthetic oligonucleotide
  Antisense strand to SEQ ID NO: 1554210
uuugaccuugggaaccacc

SEQ ID NO: 1554212 - RNA, 19 nt, Artificial Sequence
  Description of Artificial Sequence: Synthetic oligonucleotide
  Sense strand starting at position 2065 of SEQ ID NO: 1245325
ggagguuuggguuggacuu

SEQ ID NO: 1554213 - RNA, 19 nt, Artificial Sequence
  Description of Artificial Sequence: Synthetic oligonucleotide
  Antisense strand to SEQ ID NO: 1554212
aaguccaacccaaaccucc

SEQ ID NO: 1554214 - RNA, 19 nt, Artificial Sequence
  Description of Artificial Sequence: Synthetic oligonucleotide
  Sense strand starting at position 2502 of SEQ ID NO: 1245325
cucggaguuuccucacuga

SEQ ID NO: 1554215 - RNA, 19 nt, Artificial Sequence
  Description of Artificial Sequence: Synthetic oligonucleotide
  Antisense strand to SEQ ID NO: 1554214
ucagugaggaaacuccgag

SEQ ID NO: 1554216 - RNA, 19 nt, Artificial Sequence
  Description of Artificial Sequence: Synthetic oligonucleotide
  Sense strand starting at position 2880 of SEQ ID NO: 1245325
ggacaaugucccugugggu

SEQ ID NO: 1554217 - RNA, 19 nt, Artificial Sequence
  Description of Artificial Sequence: Synthetic oligonucleotide
  Antisense strand to SEQ ID NO: 1554216
acccacagggacauugucc

SEQ ID NO: 1554218 - RNA, 19 nt, Artificial Sequence
  Description of Artificial Sequence: Synthetic oligonucleotide
  Sense strand starting at position 2961 of SEQ ID NO: 1245325
gcaaguagcccaugggaau

SEQ ID NO: 1554219 - RNA, 19 nt, Artificial Sequence
  Description of Artificial Sequence: Synthetic oligonucleotide
  Antisense strand to SEQ ID NO: 1554218
auucccaugggcuacuugc

SEQ ID NO: 1554220 - RNA, 19 nt, Artificial Sequence
  Description of Artificial Sequence: Synthetic oligonucleotide
  Sense strand starting at position 2980 of SEQ ID NO: 1245325
ccuuuaguggccuacacau

SEQ ID NO: 1554221 - RNA, 19 nt, Artificial Sequence
  Description of Artificial Sequence: Synthetic oligonucleotide
  Antisense strand to SEQ ID NO: 1554220
auguguaggccacuaaagg

SEQ ID NO: 1554222 - RNA, 19 nt, Artificial Sequence
  Description of Artificial Sequence: Synthetic oligonucleotide
  Sense strand starting at position 3221 of SEQ ID NO: 1245325
gguaaagucuaauuccuaa

SEQ ID NO: 1554223 - RNA, 19 nt, Artificial Sequence
  Description of Artificial Sequence: Synthetic oligonucleotide
  Antisense strand to SEQ ID NO: 1554222
uuaggaauuagacuuuacc

SEQ ID NO: 1554224 - RNA, 19 nt, Artificial Sequence
  Description of Artificial Sequence: Synthetic oligonucleotide
  Sense strand starting at position 3304 of SEQ ID NO: 1245325
uggaguuacuuguuaaaug

SEQ ID NO: 1554225 - RNA, 19 nt, Artificial Sequence
  Description of Artificial Sequence: Synthetic oligonucleotide
  Antisense strand to SEQ ID NO: 1554224
cauuuaacaaguaacucca

SEQ ID NO: 1554226 - RNA, 19 nt, Artificial Sequence
  Description of Artificial Sequence: Synthetic oligonucleotide
  Sense strand starting at position 3309 of SEQ ID NO: 1245325
uuacuuguuaaauggugua

SEQ ID NO: 1554227 - RNA, 19 nt, Artificial Sequence
  Description of Artificial Sequence: Synthetic oligonucleotide
  Antisense strand to SEQ ID NO: 1554226
uacaccauuuaacaaguaa

SEQ ID NO: 1554228 - RNA, 19 nt, Artificial Sequence
  Description of Artificial Sequence: Synthetic oligonucleotide
  Sense strand starting at position 3468 of SEQ ID NO: 1245325
ccaccuuuggcuggcagaa

SEQ ID NO: 1554229 - RNA, 19 nt, Artificial Sequence
  Description of Artificial Sequence: Synthetic oligonucleotide
  Antisense strand to SEQ ID NO: 1554228
uucugccagccaaaggugg

SEQ ID NO: 1554230 - RNA, 19 nt, Artificial Sequence
  Description of Artificial Sequence: Synthetic oligonucleotide
  Sense strand starting at position 3786 of SEQ ID NO: 1245325
ggcuauucccaagagucca

SEQ ID NO: 1554231 - RNA, 19 nt, Artificial Sequence
  Description of Artificial Sequence: Synthetic oligonucleotide
  Antisense strand to SEQ ID NO: 1554230
uggacucuugggaauagcc

SEQ ID NO: 1554232 - RNA, 19 nt, Artificial Sequence
  Description of Artificial Sequence: Synthetic oligonucleotide
  Sense strand starting at position 3942 of SEQ ID NO: 1245325
auagacagaucucugaagu

SEQ ID NO: 1554233 - RNA, 19 nt, Artificial Sequence
  Description of Artificial Sequence: Synthetic oligonucleotide
  Antisense strand to SEQ ID NO: 1554232
acuucagagaucugucuau

SEQ ID NO: 1554234 - RNA, 19 nt, Artificial Sequence
  Description of Artificial Sequence: Synthetic oligonucleotide
  Sense strand starting at position 3943 of SEQ ID NO: 1245325
uagacagaucucugaaguc

SEQ ID NO: 1554235 - RNA, 19 nt, Artificial Sequence
  Description of Artificial Sequence: Synthetic oligonucleotide
  Antisense strand to SEQ ID NO: 1554234
gacuucagagaucugucua

SEQ ID NO: 1554236 - RNA, 19 nt, Artificial Sequence
  Description of Artificial Sequence: Synthetic oligonucleotide
  Sense strand starting at position 3 of SEQ ID NO: 1245326
accugagcccgggaauauu

SEQ ID NO: 1554237 - RNA, 19 nt, Artificial Sequence
  Description of Artificial Sequence: Synthetic oligonucleotide
  Antisense strand to SEQ ID NO: 1554236
aauauucccgggcucaggu

SEQ ID NO: 1554238 - RNA, 19 nt, Artificial Sequence
  Description of Artificial Sequence: Synthetic oligonucleotide
  Sense strand starting at position 94 of SEQ ID NO: 1245326
aaaggagagauucgguuau

SEQ ID NO: 1554239 - RNA, 19 nt, Artificial Sequence
  Description of Artificial Sequence: Synthetic oligonucleotide
  Antisense strand to SEQ ID NO: 1554238
auaaccgaaucucuccuuu

SEQ ID NO: 1554240 - RNA, 19 nt, Artificial Sequence
  Description of Artificial Sequence: Synthetic oligonucleotide
  Sense strand starting at position 96 of SEQ ID NO: 1245326
aggagagauucgguuaugu

SEQ ID NO: 1554241 - RNA, 19 nt, Artificial Sequence
  Description of Artificial Sequence: Synthetic oligonucleotide
  Antisense strand to SEQ ID NO: 1554240
acauaaccgaaucucuccu

SEQ ID NO: 1554242 - RNA, 19 nt, Artificial Sequence
  Description of Artificial Sequence: Synthetic oligonucleotide
  Sense strand starting at position 98 of SEQ ID NO: 1245326
gagagauucgguuauguaa

SEQ ID NO: 1554243 - RNA, 19 nt, Artificial Sequence
  Description of Artificial Sequence: Synthetic oligonucleotide
  Antisense strand to SEQ ID NO: 1554242
uuacauaaccgaaucucuc

SEQ ID NO: 1554244 - RNA, 19 nt, Artificial Sequence
  Description of Artificial Sequence: Synthetic oligonucleotide
  Sense strand starting at position 101 of SEQ ID NO: 1245326
agauucgguuauguaaaua

SEQ ID NO: 1554245 - RNA, 19 nt, Artificial Sequence
  Description of Artificial Sequence: Synthetic oligonucleotide
  Antisense strand to SEQ ID NO: 1554244
uauuuacauaaccgaaucu

SEQ ID NO: 1554246 - RNA, 19 nt, Artificial Sequence
  Description of Artificial Sequence: Synthetic oligonucleotide
  Sense strand starting at position 151 of SEQ ID NO: 1245326
uuugaagaccuacguuuaa

SEQ ID NO: 1554247 - RNA, 19 nt, Artificial Sequence
  Description of Artificial Sequence: Synthetic oligonucleotide
  Antisense strand to SEQ ID NO: 1554246
uuaaacguaggucuucaaa

SEQ ID NO: 1554248 - RNA, 19 nt, Artificial Sequence
  Description of Artificial Sequence: Synthetic oligonucleotide
  Sense strand starting at position 281 of SEQ ID NO: 1245326
aggugcuaagaguagucau

SEQ ID NO: 1554249 - RNA, 19 nt, Artificial Sequence
  Description of Artificial Sequence: Synthetic oligonucleotide
  Antisense strand to SEQ ID NO: 1554248
augacuacucuuagcaccu

SEQ ID NO: 1554250 - RNA, 19 nt, Artificial Sequence
  Description of Artificial Sequence: Synthetic oligonucleotide
  Sense strand starting at position 289 of SEQ ID NO: 1245326
agaguagucauauaguagu

SEQ ID NO: 1554251 - RNA, 19 nt, Artificial Sequence
  Description of Artificial Sequence: Synthetic oligonucleotide
  Antisense strand to SEQ ID NO: 1554250
acuacuauaugacuacucu

SEQ ID NO: 1554252 - RNA, 19 nt, Artificial Sequence
  Description of Artificial Sequence: Synthetic oligonucleotide
  Sense strand starting at position 562 of SEQ ID NO: 1245326
gggcauuuacaaugucgca

SEQ ID NO: 1554253 - RNA, 19 nt, Artificial Sequence
  Description of Artificial Sequence: Synthetic oligonucleotide
  Antisense strand to SEQ ID NO: 1554252
ugcgacauuguaaaugccc

SEQ ID NO: 1554254 - RNA, 19 nt, Artificial Sequence
  Description of Artificial Sequence: Synthetic oligonucleotide
  Sense strand starting at position 600 of SEQ ID NO: 1245326
ggacuacagcugugaacaa

SEQ ID NO: 1554255 - RNA, 19 nt, Artificial Sequence
  Description of Artificial Sequence: Synthetic oligonucleotide
  Antisense strand to SEQ ID NO: 1554254
uuguucacagcuguagucc

SEQ ID NO: 1554256 - RNA, 19 nt, Artificial Sequence
  Description of Artificial Sequence: Synthetic oligonucleotide
  Sense strand starting at position 687 of SEQ ID NO: 1245326
acaguuauauggucuagaa

SEQ ID NO: 1554257 - RNA, 19 nt, Artificial Sequence
  Description of Artificial Sequence: Synthetic oligonucleotide
  Antisense strand to SEQ ID NO: 1554256
uucuagaccauauaacugu

SEQ ID NO: 1554258 - RNA, 19 nt, Artificial Sequence
  Description of Artificial Sequence: Synthetic oligonucleotide
  Sense strand starting at position 794 of SEQ ID NO: 1245326
agggaccucauaugguuaa

SEQ ID NO: 1554259 - RNA, 19 nt, Artificial Sequence
  Description of Artificial Sequence: Synthetic oligonucleotide
  Antisense strand to SEQ ID NO: 1554258
uuaaccauaugaggucccu

SEQ ID NO: 1554260 - RNA, 19 nt, Artificial Sequence
  Description of Artificial Sequence: Synthetic oligonucleotide
  Sense strand starting at position 981 of SEQ ID NO: 1245326
uuugacuugguuuggaaau

SEQ ID NO: 1554261 - RNA, 19 nt, Artificial Sequence
  Description of Artificial Sequence: Synthetic oligonucleotide
  Antisense strand to SEQ ID NO: 1554260
auuuccaaaccaagucaaa

SEQ ID NO: 1554262 - RNA, 19 nt, Artificial Sequence
  Description of Artificial Sequence: Synthetic oligonucleotide
  Sense strand starting at position 1165 of SEQ ID NO: 1245326
gggagaugacuccgggcau

SEQ ID NO: 1554263 - RNA, 19 nt, Artificial Sequence
  Description of Artificial Sequence: Synthetic oligonucleotide
  Antisense strand to SEQ ID NO: 1554262
augcccggagucaucuccc

SEQ ID NO: 1554264 - RNA, 19 nt, Artificial Sequence
  Description of Artificial Sequence: Synthetic oligonucleotide
  Sense strand starting at position 2842 of SEQ ID NO: 1245326
ucccacgugcguguaaauu

SEQ ID NO: 1554265 - RNA, 19 nt, Artificial Sequence
  Description of Artificial Sequence: Synthetic oligonucleotide
  Antisense strand to SEQ ID NO: 1554264
aauuuacacgcacguggga

SEQ ID NO: 1554266 - RNA, 19 nt, Artificial Sequence
  Description of Artificial Sequence: Synthetic oligonucleotide
  Sense strand starting at position 2959 of SEQ ID NO: 1245326
ccgggcagcguuucauuaa

SEQ ID NO: 1554267 - RNA, 19 nt, Artificial Sequence
  Description of Artificial Sequence: Synthetic oligonucleotide
  Antisense strand to SEQ ID NO: 1554266
uuaaugaaacgcugcccgg

SEQ ID NO: 1554268 - RNA, 19 nt, Artificial Sequence
  Description of Artificial Sequence: Synthetic oligonucleotide
  Sense strand starting at position 3028 of SEQ ID NO: 1245326
uuguuagaggacuagguuu

SEQ ID NO: 1554269 - RNA, 19 nt, Artificial Sequence
  Description of Artificial Sequence: Synthetic oligonucleotide
  Antisense strand to SEQ ID NO: 1554268
aaaccuaguccucuaacaa

SEQ ID NO: 1554270 - RNA, 19 nt, Artificial Sequence
  Description of Artificial Sequence: Synthetic oligonucleotide
  Sense strand starting at position 3058 of SEQ ID NO: 1245326
cuuagaaaucgugaauacu

SEQ ID NO: 1554271 - RNA, 19 nt, Artificial Sequence
  Description of Artificial Sequence: Synthetic oligonucleotide
  Antisense strand to SEQ ID NO: 1554270
aguauucacgauuucuaag

SEQ ID NO: 1554272 - RNA, 19 nt, Artificial Sequence
  Description of Artificial Sequence: Synthetic oligonucleotide
  Sense strand starting at position 3061 of SEQ ID NO: 1245326
agaaaucgugaauacugua

SEQ ID NO: 1554273 - RNA, 19 nt, Artificial Sequence
  Description of Artificial Sequence: Synthetic oligonucleotide
  Antisense strand to SEQ ID NO: 1554272
uacaguauucacgauuucu

SEQ ID NO: 1554274 - RNA, 19 nt, Artificial Sequence
  Description of Artificial Sequence: Synthetic oligonucleotide
  Sense strand starting at position 3066 of SEQ ID NO: 1245326
ucgugaauacuguauacuu

SEQ ID NO: 1554275 - RNA, 19 nt, Artificial Sequence
  Description of Artificial Sequence: Synthetic oligonucleotide
  Antisense strand to SEQ ID NO: 1554274
aaguauacaguauucacga

SEQ ID NO: 1554276 - RNA, 19 nt, Artificial Sequence
  Description of Artificial Sequence: Synthetic oligonucleotide
  Sense strand starting at position 3068 of SEQ ID NO: 1245326
gugaauacuguauacuuga

SEQ ID NO: 1554277 - RNA, 19 nt, Artificial Sequence
  Description of Artificial Sequence: Synthetic oligonucleotide
  Antisense strand to SEQ ID NO: 1554276
ucaaguauacaguauucac

SEQ ID NO: 1554278 - RNA, 19 nt, Artificial Sequence
  Description of Artificial Sequence: Synthetic oligonucleotide
  Sense strand starting at position 3083 of SEQ ID NO: 1245326
uugagagugguauguaaau

SEQ ID NO: 1554279 - RNA, 19 nt, Artificial Sequence
  Description of Artificial Sequence: Synthetic oligonucleotide
  Antisense strand to SEQ ID NO: 1554278
auuuacauaccacucucaa

SEQ ID NO: 1554280 - RNA, 19 nt, Artificial Sequence
  Description of Artificial Sequence: Synthetic oligonucleotide
  Sense strand starting at position 3085 of SEQ ID NO: 1245326
gagagugguauguaaauuc

SEQ ID NO: 1554281 - RNA, 19 nt, Artificial Sequence
  Description of Artificial Sequence: Synthetic oligonucleotide
  Antisense strand to SEQ ID NO: 1554280
gaauuuacauaccacucuc

SEQ ID NO: 1554282 - RNA, 19 nt, Artificial Sequence
  Description of Artificial Sequence: Synthetic oligonucleotide
  Sense strand starting at position 3364 of SEQ ID NO: 1245326
auacauuguuuggcuggaa

SEQ ID NO: 1554283 - RNA, 19 nt, Artificial Sequence
  Description of Artificial Sequence: Synthetic oligonucleotide
  Antisense strand to SEQ ID NO: 1554282
uuccagccaaacaauguau

SEQ ID NO: 1554284 - RNA, 19 nt, Artificial Sequence
  Description of Artificial Sequence: Synthetic oligonucleotide
  Sense strand starting at position 3368 of SEQ ID NO: 1245326
auuguuuggcuggaaguga

SEQ ID NO: 1554285 - RNA, 19 nt, Artificial Sequence
  Description of Artificial Sequence: Synthetic oligonucleotide
  Antisense strand to SEQ ID NO: 1554284
ucacuuccagccaaacaau

SEQ ID NO: 1554286 - RNA, 19 nt, Artificial Sequence
  Description of Artificial Sequence: Synthetic oligonucleotide
  Sense strand starting at position 3387 of SEQ ID NO: 1245326
ggagaacugagcgguagau

SEQ ID NO: 1554287 - RNA, 19 nt, Artificial Sequence
  Description of Artificial Sequence: Synthetic oligonucleotide
  Antisense strand to SEQ ID NO: 1554286
aucuaccgcucaguucucc

SEQ ID NO: 1554288 - RNA, 19 nt, Artificial Sequence
  Description of Artificial Sequence: Synthetic oligonucleotide
  Sense strand starting at position 3399 of SEQ ID NO: 1245326
gguagaugguggaagauaa

SEQ ID NO: 1554289 - RNA, 19 nt, Artificial Sequence
  Description of Artificial Sequence: Synthetic oligonucleotide
  Antisense strand to SEQ ID NO: 1554288
uuaucuuccaccaucuacc

SEQ ID NO: 1554290 - RNA, 19 nt, Artificial Sequence
  Description of Artificial Sequence: Synthetic oligonucleotide
  Sense strand starting at position 3426 of SEQ ID NO: 1245326
agacauaaacuguggccaa

SEQ ID NO: 1554291 - RNA, 19 nt, Artificial Sequence
  Description of Artificial Sequence: Synthetic oligonucleotide
  Antisense strand to SEQ ID NO: 1554290
uuggccacaguuuaugucu

SEQ ID NO: 1554292 - RNA, 19 nt, Artificial Sequence
  Description of Artificial Sequence: Synthetic oligonucleotide
  Sense strand starting at position 3439 of SEQ ID NO: 1245326
ggccaaaugccguucaugu

SEQ ID NO: 1554293 - RNA, 19 nt, Artificial Sequence
  Description of Artificial Sequence: Synthetic oligonucleotide
  Antisense strand to SEQ ID NO: 1554292
acaugaacggcauuuggcc

SEQ ID NO: 1554294 - RNA, 19 nt, Artificial Sequence
  Description of Artificial Sequence: Synthetic oligonucleotide
  Sense strand starting at position 3639 of SEQ ID NO: 1245326
cuuaguuaauggguaagau

SEQ ID NO: 1554295 - RNA, 19 nt, Artificial Sequence
  Description of Artificial Sequence: Synthetic oligonucleotide
  Antisense strand to SEQ ID NO: 1554294
aucuuacccauuaacuaag

SEQ ID NO: 1554296 - RNA, 19 nt, Artificial Sequence
  Description of Artificial Sequence: Synthetic oligonucleotide
  Sense strand starting at position 3677 of SEQ ID NO: 1245326
gcaaauugagauuagagcu

SEQ ID NO: 1554297 - RNA, 19 nt, Artificial Sequence
  Description of Artificial Sequence: Synthetic oligonucleotide
  Antisense strand to SEQ ID NO: 1554296
agcucuaaucucaauuugc

SEQ ID NO: 1554298 - RNA, 19 nt, Artificial Sequence
  Description of Artificial Sequence: Synthetic oligonucleotide
  Sense strand starting at position 3683 of SEQ ID NO: 1245326
ugagauuagagcuggagau

SEQ ID NO: 1554299 - RNA, 19 nt, Artificial Sequence
  Description of Artificial Sequence: Synthetic oligonucleotide
  Antisense strand to SEQ ID NO: 1554298
aucuccagcucuaaucuca

SEQ ID NO: 1554300 - RNA, 19 nt, Artificial Sequence
  Description of Artificial Sequence: Synthetic oligonucleotide
  Sense strand starting at position 3684 of SEQ ID NO: 1245326
gagauuagagcuggagauu

SEQ ID NO: 1554301 - RNA, 19 nt, Artificial Sequence
  Description of Artificial Sequence: Synthetic oligonucleotide
  Antisense strand to SEQ ID NO: 1554300
aaucuccagcucuaaucuc

SEQ ID NO: 1554302 - RNA, 19 nt, Artificial Sequence
  Description of Artificial Sequence: Synthetic oligonucleotide
  Sense strand starting at position 3697 of SEQ ID NO: 1245326
gagauucgucaucagggca

SEQ ID NO: 1554303 - RNA, 19 nt, Artificial Sequence
  Description of Artificial Sequence: Synthetic oligonucleotide
  Antisense strand to SEQ ID NO: 1554302
ugcccugaugacgaaucuc

SEQ ID NO: 1554304 - RNA, 19 nt, Artificial Sequence
  Description of Artificial Sequence: Synthetic oligonucleotide
  Sense strand starting at position 3710 of SEQ ID NO: 1245326
agggcaauuucucauuucu

SEQ ID NO: 1554305 - RNA, 19 nt, Artificial Sequence
  Description of Artificial Sequence: Synthetic oligonucleotide
  Antisense strand to SEQ ID NO: 1554304
agaaaugagaaauugcccu

SEQ ID NO: 1554306 - RNA, 19 nt, Artificial Sequence
  Description of Artificial Sequence: Synthetic oligonucleotide
  Sense strand starting at position 3870 of SEQ ID NO: 1245326
ucuuaccuuguugagagau

SEQ ID NO: 1554307 - RNA, 19 nt, Artificial Sequence
  Description of Artificial Sequence: Synthetic oligonucleotide
  Antisense strand to SEQ ID NO: 1554306
aucucucaacaagguaaga

SEQ ID NO: 1554308 - RNA, 19 nt, Artificial Sequence
  Description of Artificial Sequence: Synthetic oligonucleotide
  Sense strand starting at position 3883 of SEQ ID NO: 1245326
agagaucgagucugaauca

SEQ ID NO: 1554309 - RNA, 19 nt, Artificial Sequence
  Description of Artificial Sequence: Synthetic oligonucleotide
  Antisense strand to SEQ ID NO: 1554308
ugauucagacucgaucucu

SEQ ID NO: 1554310 - RNA, 19 nt, Artificial Sequence
  Description of Artificial Sequence: Synthetic oligonucleotide
  Sense strand starting at position 3894 of SEQ ID NO: 1245326
cugaaucaguuucuuaaug

SEQ ID NO: 1554311 - RNA, 19 nt, Artificial Sequence
  Description of Artificial Sequence: Synthetic oligonucleotide
  Antisense strand to SEQ ID NO: 1554310
cauuaagaaacugauucag

SEQ ID NO: 1554312 - RNA, 19 nt, Artificial Sequence
  Description of Artificial Sequence: Synthetic oligonucleotide
  Sense strand starting at position 3973 of SEQ ID NO: 1245326
acgaguuuguucuuuauuu

SEQ ID NO: 1554313 - RNA, 19 nt, Artificial Sequence
  Description of Artificial Sequence: Synthetic oligonucleotide
  Antisense strand to SEQ ID NO: 1554312
aaauaaagaacaaacucgu

SEQ ID NO: 1554314 - RNA, 19 nt, Artificial Sequence
  Description of Artificial Sequence: Synthetic oligonucleotide
  Sense strand starting at position 3974 of SEQ ID NO: 1245326
cgaguuuguucuuuauuua

SEQ ID NO: 1554315 - RNA, 19 nt, Artificial Sequence
  Description of Artificial Sequence: Synthetic oligonucleotide
  Antisense strand to SEQ ID NO: 1554314
uaaauaaagaacaaacucg

SEQ ID NO: 1554316 - RNA, 19 nt, Artificial Sequence
  Description of Artificial Sequence: Synthetic oligonucleotide
  Sense strand starting at position 505 of SEQ ID NO: 1245327
ccuggauguugauugauga

SEQ ID NO: 1554317 - RNA, 19 nt, Artificial Sequence
  Description of Artificial Sequence: Synthetic oligonucleotide
  Antisense strand to SEQ ID NO: 1554316
ucaucaaucaacauccagg

SEQ ID NO: 1554318 - RNA, 19 nt, Artificial Sequence
  Description of Artificial Sequence: Synthetic oligonucleotide
  Sense strand starting at position 506 of SEQ ID NO: 1245327
cuggauguugauugaugaa

SEQ ID NO: 1554319 - RNA, 19 nt, Artificial Sequence
  Description of Artificial Sequence: Synthetic oligonucleotide
  Antisense strand to SEQ ID NO: 1554318
uucaucaaucaacauccag

SEQ ID NO: 1554320 - RNA, 19 nt, Artificial Sequence
  Description of Artificial Sequence: Synthetic oligonucleotide
  Sense strand starting at position 611 of SEQ ID NO: 1245327
uuuguuuaagacugaagaa

SEQ ID NO: 1554321 - RNA, 19 nt, Artificial Sequence
  Description of Artificial Sequence: Synthetic oligonucleotide
  Antisense strand to SEQ ID NO: 1554320
uucuucagucuuaaacaaa

SEQ ID NO: 1554322 - RNA, 19 nt, Artificial Sequence
  Description of Artificial Sequence: Synthetic oligonucleotide
  Sense strand starting at position 1145 of SEQ ID NO: 1245327
agaggaacccugugcuaca

SEQ ID NO: 1554323 - RNA, 19 nt, Artificial Sequence
  Description of Artificial Sequence: Synthetic oligonucleotide
  Antisense strand to SEQ ID NO: 1554322
uguagcacaggguuccucu

SEQ ID NO: 1554324 - RNA, 19 nt, Artificial Sequence
  Description of Artificial Sequence: Synthetic oligonucleotide
  Sense strand starting at position 1187 of SEQ ID NO: 1245327
gucuuaggacuuuaaccuu

SEQ ID NO: 1554325 - RNA, 19 nt, Artificial Sequence
  Description of Artificial Sequence: Synthetic oligonucleotide
  Antisense strand to SEQ ID NO: 1554324
aagguuaaaguccuaagac

SEQ ID NO: 1554326 - RNA, 19 nt, Artificial Sequence
  Description of Artificial Sequence: Synthetic oligonucleotide
  Sense strand starting at position 1208 of SEQ ID NO: 1245327
cgauauaugacugggucau

SEQ ID NO: 1554327 - RNA, 19 nt, Artificial Sequence
  Description of Artificial Sequence: Synthetic oligonucleotide
  Antisense strand to SEQ ID NO: 1554326
augacccagucauauaucg

SEQ ID NO: 1554328 - RNA, 19 nt, Artificial Sequence
  Description of Artificial Sequence: Synthetic oligonucleotide
  Sense strand starting at position 1209 of SEQ ID NO: 1245327
gauauaugacugggucaua

SEQ ID NO: 1554329 - RNA, 19 nt, Artificial Sequence
  Description of Artificial Sequence: Synthetic oligonucleotide
  Antisense strand to SEQ ID NO: 1554328
uaugacccagucauauauc

SEQ ID NO: 1554330 - RNA, 19 nt, Artificial Sequence
  Description of Artificial Sequence: Synthetic oligonucleotide
  Sense strand starting at position 1210 of SEQ ID NO: 1245327
auauaugacugggucauaa

SEQ ID NO: 1554331 - RNA, 19 nt, Artificial Sequence
  Description of Artificial Sequence: Synthetic oligonucleotide
  Antisense strand to SEQ ID NO: 1554330
uuaugacccagucauauau

SEQ ID NO: 1554332 - RNA, 19 nt, Artificial Sequence
  Description of Artificial Sequence: Synthetic oligonucleotide
  Sense strand starting at position 1327 of SEQ ID NO: 1245327
ugguuaaauuuguugcaac

SEQ ID NO: 1554333 - RNA, 19 nt, Artificial Sequence
  Description of Artificial Sequence: Synthetic oligonucleotide
  Antisense strand to SEQ ID NO: 1554332
guugcaacaaauuuaacca

SEQ ID NO: 1554334 - RNA, 19 nt, Artificial Sequence
  Description of Artificial Sequence: Synthetic oligonucleotide
  Sense strand starting at position 1386 of SEQ ID NO: 1245327
cuaggagugcaguaucaaa

SEQ ID NO: 1554335 - RNA, 19 nt, Artificial Sequence
  Description of Artificial Sequence: Synthetic oligonucleotide
  Antisense strand to SEQ ID NO: 1554334
uuugauacugcacuccuag

SEQ ID NO: 1554336 - RNA, 19 nt, Artificial Sequence
  Description of Artificial Sequence: Synthetic oligonucleotide
  Sense strand starting at position 1585 of SEQ ID NO: 1245327
ucuuccucagauugggaau

SEQ ID NO: 1554337 - RNA, 19 nt, Artificial Sequence
  Description of Artificial Sequence: Synthetic oligonucleotide
  Antisense strand to SEQ ID NO: 1554336
auucccaaucugaggaaga

SEQ ID NO: 1554338 - RNA, 19 nt, Artificial Sequence
  Description of Artificial Sequence: Synthetic oligonucleotide
  Sense strand starting at position 1617 of SEQ ID NO: 1245327
uugucuuggccagaacuga

SEQ ID NO: 1554339 - RNA, 19 nt, Artificial Sequence
  Description of Artificial Sequence: Synthetic oligonucleotide
  Antisense strand to SEQ ID NO: 1554338
ucaguucuggccaagacaa

SEQ ID NO: 1554340 - RNA, 19 nt, Artificial Sequence
  Description of Artificial Sequence: Synthetic oligonucleotide
  Sense strand starting at position 1664 of SEQ ID NO: 1245327
aucuuaaacuucguagaau

SEQ ID NO: 1554341 - RNA, 19 nt, Artificial Sequence
  Description of Artificial Sequence: Synthetic oligonucleotide
  Antisense strand to SEQ ID NO: 1554340
auucuacgaaguuuaagau

SEQ ID NO: 1554342 - RNA, 19 nt, Artificial Sequence
  Description of Artificial Sequence: Synthetic oligonucleotide
  Sense strand starting at position 1698 of SEQ ID NO: 1245327
agagcacucacaggagauu

SEQ ID NO: 1554343 - RNA, 19 nt, Artificial Sequence
  Description of Artificial Sequence: Synthetic oligonucleotide
  Antisense strand to SEQ ID NO: 1554342
aaucuccugugagugcucu

SEQ ID NO: 1554344 - RNA, 19 nt, Artificial Sequence
  Description of Artificial Sequence: Synthetic oligonucleotide
  Sense strand starting at position 1857 of SEQ ID NO: 1245327
cagagucuuguuuaaaugu

SEQ ID NO: 1554345 - RNA, 19 nt, Artificial Sequence
  Description of Artificial Sequence: Synthetic oligonucleotide
  Antisense strand to SEQ ID NO: 1554344
acauuuaaacaagacucug

SEQ ID NO: 1554346 - RNA, 19 nt, Artificial Sequence
  Description of Artificial Sequence: Synthetic oligonucleotide
  Sense strand starting at position 2052 of SEQ ID NO: 1245327
cuugaagaucuggguauua

SEQ ID NO: 1554347 - RNA, 19 nt, Artificial Sequence
  Description of Artificial Sequence: Synthetic oligonucleotide
  Antisense strand to SEQ ID NO: 1554346
uaauacccagaucuucaag

SEQ ID NO: 1554348 - RNA, 19 nt, Artificial Sequence
  Description of Artificial Sequence: Synthetic oligonucleotide
  Sense strand starting at position 2130 of SEQ ID NO: 1245327
uaugaagucggauggaauc

SEQ ID NO: 1554349 - RNA, 19 nt, Artificial Sequence
  Description of Artificial Sequence: Synthetic oligonucleotide
  Antisense strand to SEQ ID NO: 1554348
gauuccauccgacuucaua

SEQ ID NO: 1554350 - RNA, 19 nt, Artificial Sequence
  Description of Artificial Sequence: Synthetic oligonucleotide
  Sense strand starting at position 2246 of SEQ ID NO: 1245327
aucugaugucaagaagcuu

SEQ ID NO: 1554351 - RNA, 19 nt, Artificial Sequence
  Description of Artificial Sequence: Synthetic oligonucleotide
  Antisense strand to SEQ ID NO: 1554350
aagcuucuugacaucagau

SEQ ID NO: 1554352 - RNA, 19 nt, Artificial Sequence
  Description of Artificial Sequence: Synthetic oligonucleotide
  Sense strand starting at position 2445 of SEQ ID NO: 1245327
acauuucuuucgcugaauu

SEQ ID NO: 1554353 - RNA, 19 nt, Artificial Sequence
  Description of Artificial Sequence: Synthetic oligonucleotide
  Antisense strand to SEQ ID NO: 1554352
aauucagcgaaagaaaugu

SEQ ID NO: 1554354 - RNA, 19 nt, Artificial Sequence
  Description of Artificial Sequence: Synthetic oligonucleotide
  Sense strand starting at position 2509 of SEQ ID NO: 1245327
agagauucugcuggaagac

SEQ ID NO: 1554355 - RNA, 19 nt, Artificial Sequence
  Description of Artificial Sequence: Synthetic oligonucleotide
  Antisense strand to SEQ ID NO: 1554354
gucuuccagcagaaucucu

SEQ ID NO: 1554356 - RNA, 19 nt, Artificial Sequence
  Description of Artificial Sequence: Synthetic oligonucleotide
  Sense strand starting at position 2620 of SEQ ID NO: 1245327
gagaguagccaugagacgu

SEQ ID NO: 1554357 - RNA, 19 nt, Artificial Sequence
  Description of Artificial Sequence: Synthetic oligonucleotide
  Antisense strand to SEQ ID NO: 1554356
acgucucauggcuacucuc

SEQ ID NO: 1554358 - RNA, 19 nt, Artificial Sequence
  Description of Artificial Sequence: Synthetic oligonucleotide
  Sense strand starting at position 2664 of SEQ ID NO: 1245327
ugcugccucaugggaauuu

SEQ ID NO: 1554359 - RNA, 19 nt, Artificial Sequence
  Description of Artificial Sequence: Synthetic oligonucleotide
  Antisense strand to SEQ ID NO: 1554358
aaauucccaugaggcagca

SEQ ID NO: 1554360 - RNA, 19 nt, Artificial Sequence
  Description of Artificial Sequence: Synthetic oligonucleotide
  Sense strand starting at position 2799 of SEQ ID NO: 1245327
ugacaaggugccugaugaa

SEQ ID NO: 1554361 - RNA, 19 nt, Artificial Sequence
  Description of Artificial Sequence: Synthetic oligonucleotide
  Antisense strand to SEQ ID NO: 1554360
uucaucaggcaccuuguca

SEQ ID NO: 1554362 - RNA, 19 nt, Artificial Sequence
  Description of Artificial Sequence: Synthetic oligonucleotide
  Sense strand starting at position 2818 of SEQ ID NO: 1245327
gagagaugcacauaguugu

SEQ ID NO: 1554363 - RNA, 19 nt, Artificial Sequence
  Description of Artificial Sequence: Synthetic oligonucleotide
  Antisense strand to SEQ ID NO: 1554362
acaacuaugugcaucucuc

SEQ ID NO: 1554364 - RNA, 19 nt, Artificial Sequence
  Description of Artificial Sequence: Synthetic oligonucleotide
  Sense strand starting at position 2954 of SEQ ID NO: 1245327
uuaugugaacagugaccau

SEQ ID NO: 1554365 - RNA, 19 nt, Artificial Sequence
  Description of Artificial Sequence: Synthetic oligonucleotide
  Antisense strand to SEQ ID NO: 1554364
auggucacuguucacauaa

SEQ ID NO: 1554366 - RNA, 19 nt, Artificial Sequence
  Description of Artificial Sequence: Synthetic oligonucleotide
  Sense strand starting at position 3013 of SEQ ID NO: 1245327
ggucuuguccugagugguu

SEQ ID NO: 1554367 - RNA, 19 nt, Artificial Sequence
  Description of Artificial Sequence: Synthetic oligonucleotide
  Antisense strand to SEQ ID NO: 1554366
aaccacucaggacaagacc

SEQ ID NO: 1554368 - RNA, 19 nt, Artificial Sequence
  Description of Artificial Sequence: Synthetic oligonucleotide
  Sense strand starting at position 3032 of SEQ ID NO: 1245327
uuucccaucuaguuggaga

SEQ ID NO: 1554369 - RNA, 19 nt, Artificial Sequence
  Description of Artificial Sequence: Synthetic oligonucleotide
  Antisense strand to SEQ ID NO: 1554368
ucuccaacuagaugggaaa

SEQ ID NO: 1554370 - RNA, 19 nt, Artificial Sequence
  Description of Artificial Sequence: Synthetic oligonucleotide
  Sense strand starting at position 3221 of SEQ ID NO: 1245327
gaaaguugauaguugugga

SEQ ID NO: 1554371 - RNA, 19 nt, Artificial Sequence
  Description of Artificial Sequence: Synthetic oligonucleotide
  Antisense strand to SEQ ID NO: 1554370
uccacaacuaucaacuuuc

SEQ ID NO: 1554372 - RNA, 19 nt, Artificial Sequence
  Description of Artificial Sequence: Synthetic oligonucleotide
  Sense strand starting at position 3409 of SEQ ID NO: 1245327
gacagcuuggucuaugaca

SEQ ID NO: 1554373 - RNA, 19 nt, Artificial Sequence
  Description of Artificial Sequence: Synthetic oligonucleotide
  Antisense strand to SEQ ID NO: 1554372
ugucauagaccaagcuguc

SEQ ID NO: 1554374 - RNA, 19 nt, Artificial Sequence
  Description of Artificial Sequence: Synthetic oligonucleotide
  Sense strand starting at position 3418 of SEQ ID NO: 1245327
gucuaugacaguugagaca

SEQ ID NO: 1554375 - RNA, 19 nt, Artificial Sequence
  Description of Artificial Sequence: Synthetic oligonucleotide
  Antisense strand to SEQ ID NO: 1554374
ugucucaacugucauagac

SEQ ID NO: 1554376 - RNA, 19 nt, Artificial Sequence
  Description of Artificial Sequence: Synthetic oligonucleotide
  Sense strand starting at position 3511 of SEQ ID NO: 1245327
ucaugauaagcauaugcaa

SEQ ID NO: 1554377 - RNA, 19 nt, Artificial Sequence
  Description of Artificial Sequence: Synthetic oligonucleotide
  Antisense strand to SEQ ID NO: 1554376
uugcauaugcuuaucauga

SEQ ID NO: 1554378 - RNA, 19 nt, Artificial Sequence
  Description of Artificial Sequence: Synthetic oligonucleotide
  Sense strand starting at position 3556 of SEQ ID NO: 1245327
gguaauuccucuuuaugga

SEQ ID NO: 1554379 - RNA, 19 nt, Artificial Sequence
  Description of Artificial Sequence: Synthetic oligonucleotide
  Antisense strand to SEQ ID NO: 1554378
uccauaaagaggaauuacc

SEQ ID NO: 1554380 - RNA, 19 nt, Artificial Sequence
  Description of Artificial Sequence: Synthetic oligonucleotide
  Sense strand starting at position 3557 of SEQ ID NO: 1245327
guaauuccucuuuauggau

SEQ ID NO: 1554381 - RNA, 19 nt, Artificial Sequence
  Description of Artificial Sequence: Synthetic oligonucleotide
  Antisense strand to SEQ ID NO: 1554380
auccauaaagaggaauuac

SEQ ID NO: 1554382 - RNA, 19 nt, Artificial Sequence
  Description of Artificial Sequence: Synthetic oligonucleotide
  Sense strand starting at position 3563 of SEQ ID NO: 1245327
ccucuuuauggauaaguuc

SEQ ID NO: 1554383 - RNA, 19 nt, Artificial Sequence
  Description of Artificial Sequence: Synthetic oligonucleotide
  Antisense strand to SEQ ID NO: 1554382
gaacuuauccauaaagagg

SEQ ID NO: 1554384 - RNA, 19 nt, Artificial Sequence
  Description of Artificial Sequence: Synthetic oligonucleotide
  Sense strand starting at position 3628 of SEQ ID NO: 1245327
uucuaaugagcucagaguu

SEQ ID NO: 1554385 - RNA, 19 nt, Artificial Sequence
  Description of Artificial Sequence: Synthetic oligonucleotide
  Antisense strand to SEQ ID NO: 1554384
aacucugagcucauuagaa

SEQ ID NO: 1554386 - RNA, 19 nt, Artificial Sequence
  Description of Artificial Sequence: Synthetic oligonucleotide
  Sense strand starting at position 3660 of SEQ ID NO: 1245327
aguugagcucuggaauggu

SEQ ID NO: 1554387 - RNA, 19 nt, Artificial Sequence
  Description of Artificial Sequence: Synthetic oligonucleotide
  Antisense strand to SEQ ID NO: 1554386
accauuccagagcucaacu

SEQ ID NO: 1554388 - RNA, 19 nt, Artificial Sequence
  Description of Artificial Sequence: Synthetic oligonucleotide
  Sense strand starting at position 3881 of SEQ ID NO: 1245327
gaaccugcucuguaagaua

SEQ ID NO: 1554389 - RNA, 19 nt, Artificial Sequence
  Description of Artificial Sequence: Synthetic oligonucleotide
  Antisense strand to SEQ ID NO: 1554388
uaucuuacagagcagguuc

SEQ ID NO: 1554390 - RNA, 19 nt, Artificial Sequence
  Description of Artificial Sequence: Synthetic oligonucleotide
  Sense strand starting at position 3892 of SEQ ID NO: 1245327
guaagauaauaagcacuau

SEQ ID NO: 1554391 - RNA, 19 nt, Artificial Sequence
  Description of Artificial Sequence: Synthetic oligonucleotide
  Antisense strand to SEQ ID NO: 1554390
auagugcuuauuaucuuac

SEQ ID NO: 1554392 - RNA, 19 nt, Artificial Sequence
  Description of Artificial Sequence: Synthetic oligonucleotide
  Sense strand starting at position 3906 of SEQ ID NO: 1245327
acuauuugcugggaaggga

SEQ ID NO: 1554393 - RNA, 19 nt, Artificial Sequence
  Description of Artificial Sequence: Synthetic oligonucleotide
  Antisense strand to SEQ ID NO: 1554392
ucccuucccagcaaauagu

SEQ ID NO: 1554394 - RNA, 19 nt, Artificial Sequence
  Description of Artificial Sequence: Synthetic oligonucleotide
  Sense strand starting at position 3956 of SEQ ID NO: 1245327
uugucuguggauuaaggaa

SEQ ID NO: 1554395 - RNA, 19 nt, Artificial Sequence
  Description of Artificial Sequence: Synthetic oligonucleotide
  Antisense strand to SEQ ID NO: 1554394
uuccuuaauccacagacaa

SEQ ID NO: 1554396 - RNA, 19 nt, Artificial Sequence
  Description of Artificial Sequence: Synthetic oligonucleotide
  Sense strand starting at position 446 of SEQ ID NO: 1245328
ggagcguagugccacgaua

SEQ ID NO: 1554397 - RNA, 19 nt, Artificial Sequence
  Description of Artificial Sequence: Synthetic oligonucleotide
  Antisense strand to SEQ ID NO: 1554396
uaucguggcacuacgcucc

SEQ ID NO: 1554398 - RNA, 19 nt, Artificial Sequence
  Description of Artificial Sequence: Synthetic oligonucleotide
  Sense strand starting at position 448 of SEQ ID NO: 1245328
agcguagugccacgauauc

SEQ ID NO: 1554399 - RNA, 19 nt, Artificial Sequence
  Description of Artificial Sequence: Synthetic oligonucleotide
  Antisense strand to SEQ ID NO: 1554398
gauaucguggcacuacgcu

SEQ ID NO: 1554400 - RNA, 19 nt, Artificial Sequence
  Description of Artificial Sequence: Synthetic oligonucleotide
  Sense strand starting at position 695 of SEQ ID NO: 1245328
cuccucccugaguguugaa

SEQ ID NO: 1554401 - RNA, 19 nt, Artificial Sequence
  Description of Artificial Sequence: Synthetic oligonucleotide
  Antisense strand to SEQ ID NO: 1554400
uucaacacucagggaggag

SEQ ID NO: 1554402 - RNA, 19 nt, Artificial Sequence
  Description of Artificial Sequence: Synthetic oligonucleotide
  Sense strand starting at position 760 of SEQ ID NO: 1245328
acguuaucuacuugucugu

SEQ ID NO: 1554403 - RNA, 19 nt, Artificial Sequence
  Description of Artificial Sequence: Synthetic oligonucleotide
  Antisense strand to SEQ ID NO: 1554402
acagacaaguagauaacgu

SEQ ID NO: 1554404 - RNA, 19 nt, Artificial Sequence
  Description of Artificial Sequence: Synthetic oligonucleotide
  Sense strand starting at position 762 of SEQ ID NO: 1245328
guuaucuacuugucuguca

SEQ ID NO: 1554405 - RNA, 19 nt, Artificial Sequence
  Description of Artificial Sequence: Synthetic oligonucleotide
  Antisense strand to SEQ ID NO: 1554404
ugacagacaaguagauaac

SEQ ID NO: 1554406 - RNA, 19 nt, Artificial Sequence
  Description of Artificial Sequence: Synthetic oligonucleotide
  Sense strand starting at position 858 of SEQ ID NO: 1245328
acaggugcccaauaacuau

SEQ ID NO: 1554407 - RNA, 19 nt, Artificial Sequence
  Description of Artificial Sequence: Synthetic oligonucleotide
  Antisense strand to SEQ ID NO: 1554406
auaguuauugggcaccugu

SEQ ID NO: 1554408 - RNA, 19 nt, Artificial Sequence
  Description of Artificial Sequence: Synthetic oligonucleotide
  Sense strand starting at position 869 of SEQ ID NO: 1245328
auaacuauuuagcggauau

SEQ ID NO: 1554409 - RNA, 19 nt, Artificial Sequence
  Description of Artificial Sequence: Synthetic oligonucleotide
  Antisense strand to SEQ ID NO: 1554408
auauccgcuaaauaguuau

SEQ ID NO: 1554410 - RNA, 19 nt, Artificial Sequence
  Description of Artificial Sequence: Synthetic oligonucleotide
  Sense strand starting at position 927 of SEQ ID NO: 1245328
auuuauaauugcuggcuua

SEQ ID NO: 1554411 - RNA, 19 nt, Artificial Sequence
  Description of Artificial Sequence: Synthetic oligonucleotide
  Antisense strand to SEQ ID NO: 1554410
uaagccagcaauuauaaau

SEQ ID NO: 1554412 - RNA, 19 nt, Artificial Sequence
  Description of Artificial Sequence: Synthetic oligonucleotide
  Sense strand starting at position 939 of SEQ ID NO: 1245328
uggcuuagcuauuagaaac

SEQ ID NO: 1554413 - RNA, 19 nt, Artificial Sequence
  Description of Artificial Sequence: Synthetic oligonucleotide
  Antisense strand to SEQ ID NO: 1554412
guuucuaauagcuaagcca

SEQ ID NO: 1554414 - RNA, 19 nt, Artificial Sequence
  Description of Artificial Sequence: Synthetic oligonucleotide
  Sense strand starting at position 972 of SEQ ID NO: 1245328
caggcuuagucucaaggaa

SEQ ID NO: 1554415 - RNA, 19 nt, Artificial Sequence
  Description of Artificial Sequence: Synthetic oligonucleotide
  Antisense strand to SEQ ID NO: 1554414
uuccuugagacuaagccug

SEQ ID NO: 1554416 - RNA, 19 nt, Artificial Sequence
  Description of Artificial Sequence: Synthetic oligonucleotide
  Sense strand starting at position 1014 of SEQ ID NO: 1245328
gcagguaguuuagaauuau

SEQ ID NO: 1554417 - RNA, 19 nt, Artificial Sequence
  Description of Artificial Sequence: Synthetic oligonucleotide
  Antisense strand to SEQ ID NO: 1554416
auaauucuaaacuaccugc

SEQ ID NO: 1554418 - RNA, 19 nt, Artificial Sequence
  Description of Artificial Sequence: Synthetic oligonucleotide
  Sense strand starting at position 1119 of SEQ ID NO: 1245328
uuaucugaguaaucagcca

SEQ ID NO: 1554419 - RNA, 19 nt, Artificial Sequence
  Description of Artificial Sequence: Synthetic oligonucleotide
  Antisense strand to SEQ ID NO: 1554418
uggcugauuacucagauaa

SEQ ID NO: 1554420 - RNA, 19 nt, Artificial Sequence
  Description of Artificial Sequence: Synthetic oligonucleotide
  Sense strand starting at position 1135 of SEQ ID NO: 1245328
ccacaauuacguugugaua

SEQ ID NO: 1554421 - RNA, 19 nt, Artificial Sequence
  Description of Artificial Sequence: Synthetic oligonucleotide
  Antisense strand to SEQ ID NO: 1554420
uaucacaacguaauugugg

SEQ ID NO: 1554422 - RNA, 19 nt, Artificial Sequence
  Description of Artificial Sequence: Synthetic oligonucleotide
  Sense strand starting at position 1137 of SEQ ID NO: 1245328
acaauuacguugugauaau

SEQ ID NO: 1554423 - RNA, 19 nt, Artificial Sequence
  Description of Artificial Sequence: Synthetic oligonucleotide
  Antisense strand to SEQ ID NO: 1554422
auuaucacaacguaauugu

SEQ ID NO: 1554424 - RNA, 19 nt, Artificial Sequence
  Description of Artificial Sequence: Synthetic oligonucleotide
  Sense strand starting at position 1138 of SEQ ID NO: 1245328
caauuacguugugauaauu

SEQ ID NO: 1554425 - RNA, 19 nt, Artificial Sequence
  Description of Artificial Sequence: Synthetic oligonucleotide
  Antisense strand to SEQ ID NO: 1554424
aauuaucacaacguaauug

SEQ ID NO: 1554426 - RNA, 19 nt, Artificial Sequence
  Description of Artificial Sequence: Synthetic oligonucleotide
  Sense strand starting at position 1147 of SEQ ID NO: 1245328
ugugauaauuucugcccua

SEQ ID NO: 1554427 - RNA, 19 nt, Artificial Sequence
  Description of Artificial Sequence: Synthetic oligonucleotide
  Antisense strand to SEQ ID NO: 1554426
uagggcagaaauuaucaca

SEQ ID NO: 1554428 - RNA, 19 nt, Artificial Sequence
  Description of Artificial Sequence: Synthetic oligonucleotide
  Sense strand starting at position 1148 of SEQ ID NO: 1245328
gugauaauuucugcccuau

SEQ ID NO: 1554429 - RNA, 19 nt, Artificial Sequence
  Description of Artificial Sequence: Synthetic oligonucleotide
  Antisense strand to SEQ ID NO: 1554428
auagggcagaaauuaucac

SEQ ID NO: 1554430 - RNA, 19 nt, Artificial Sequence
  Description of Artificial Sequence: Synthetic oligonucleotide
  Sense strand starting at position 1159 of SEQ ID NO: 1245328
ugcccuauauugggagauu

SEQ ID NO: 1554431 - RNA, 19 nt, Artificial Sequence
  Description of Artificial Sequence: Synthetic oligonucleotide
  Antisense strand to SEQ ID NO: 1554430
aaucucccaauauagggca

SEQ ID NO: 1554432 - RNA, 19 nt, Artificial Sequence
  Description of Artificial Sequence: Synthetic oligonucleotide
  Sense strand starting at position 1160 of SEQ ID NO: 1245328
gcccuauauugggagauuu

SEQ ID NO: 1554433 - RNA, 19 nt, Artificial Sequence
  Description of Artificial Sequence: Synthetic oligonucleotide
  Antisense strand to SEQ ID NO: 1554432
aaaucucccaauauagggc

SEQ ID NO: 1554434 - RNA, 19 nt, Artificial Sequence
  Description of Artificial Sequence: Synthetic oligonucleotide
  Sense strand starting at position 1228 of SEQ ID NO: 1245328
ucacaaaucuaaggaggau

SEQ ID NO: 1554435 - RNA, 19 nt, Artificial Sequence
  Description of Artificial Sequence: Synthetic oligonucleotide
  Antisense strand to SEQ ID NO: 1554434
auccuccuuagauuuguga

SEQ ID NO: 1554436 - RNA, 19 nt, Artificial Sequence
  Description of Artificial Sequence: Synthetic oligonucleotide
  Sense strand starting at position 1446 of SEQ ID NO: 1245328
acagguuuguuuccagaua

SEQ ID NO: 1554437 - RNA, 19 nt, Artificial Sequence
  Description of Artificial Sequence: Synthetic oligonucleotide
  Antisense strand to SEQ ID NO: 1554436
uaucuggaaacaaaccugu

SEQ ID NO: 1554438 - RNA, 19 nt, Artificial Sequence
  Description of Artificial Sequence: Synthetic oligonucleotide
  Sense strand starting at position 1447 of SEQ ID NO: 1245328
cagguuuguuuccagauaa

SEQ ID NO: 1554439 - RNA, 19 nt, Artificial Sequence
  Description of Artificial Sequence: Synthetic oligonucleotide
  Antisense strand to SEQ ID NO: 1554438
uuaucuggaaacaaaccug

SEQ ID NO: 1554440 - RNA, 19 nt, Artificial Sequence
  Description of Artificial Sequence: Synthetic oligonucleotide
  Sense strand starting at position 1616 of SEQ ID NO: 1245328
auaccaaucucuuggaaga

SEQ ID NO: 1554441 - RNA, 19 nt, Artificial Sequence
  Description of Artificial Sequence: Synthetic oligonucleotide
  Antisense strand to SEQ ID NO: 1554440
ucuuccaagagauugguau

SEQ ID NO: 1554442 - RNA, 19 nt, Artificial Sequence
  Description of Artificial Sequence: Synthetic oligonucleotide
  Sense strand starting at position 1618 of SEQ ID NO: 1245328
accaaucucuuggaagaca

SEQ ID NO: 1554443 - RNA, 19 nt, Artificial Sequence
  Description of Artificial Sequence: Synthetic oligonucleotide
  Antisense strand to SEQ ID NO: 1554442
ugucuuccaagagauuggu

SEQ ID NO: 1554444 - RNA, 19 nt, Artificial Sequence
  Description of Artificial Sequence: Synthetic oligonucleotide
  Sense strand starting at position 2087 of SEQ ID NO: 1245328
gagggcuggucuuggagaa

SEQ ID NO: 1554445 - RNA, 19 nt, Artificial Sequence
  Description of Artificial Sequence: Synthetic oligonucleotide
  Antisense strand to SEQ ID NO: 1554444
uucuccaagaccagcccuc

SEQ ID NO: 1554446 - RNA, 19 nt, Artificial Sequence
  Description of Artificial Sequence: Synthetic oligonucleotide
  Sense strand starting at position 2088 of SEQ ID NO: 1245328
agggcuggucuuggagaaa

SEQ ID NO: 1554447 - RNA, 19 nt, Artificial Sequence
  Description of Artificial Sequence: Synthetic oligonucleotide
  Antisense strand to SEQ ID NO: 1554446
uuucuccaagaccagcccu

SEQ ID NO: 1554448 - RNA, 19 nt, Artificial Sequence
  Description of Artificial Sequence: Synthetic oligonucleotide
  Sense strand starting at position 2514 of SEQ ID NO: 1245328
gaaagaaggucuuagagaa

SEQ ID NO: 1554449 - RNA, 19 nt, Artificial Sequence
  Description of Artificial Sequence: Synthetic oligonucleotide
  Antisense strand to SEQ ID NO: 1554448
uucucuaagaccuucuuuc

SEQ ID NO: 1554450 - RNA, 19 nt, Artificial Sequence
  Description of Artificial Sequence: Synthetic oligonucleotide
  Sense strand starting at position 2534 of SEQ ID NO: 1245328
cccaaagucuuaugcugau

SEQ ID NO: 1554451 - RNA, 19 nt, Artificial Sequence
  Description of Artificial Sequence: Synthetic oligonucleotide
  Antisense strand to SEQ ID NO: 1554450
aucagcauaagacuuuggg

SEQ ID NO: 1554452 - RNA, 19 nt, Artificial Sequence
  Description of Artificial Sequence: Synthetic oligonucleotide
  Sense strand starting at position 2540 of SEQ ID NO: 1245328
gucuuaugcugauucuguu

SEQ ID NO: 1554453 - RNA, 19 nt, Artificial Sequence
  Description of Artificial Sequence: Synthetic oligonucleotide
  Antisense strand to SEQ ID NO: 1554452
aacagaaucagcauaagac

SEQ ID NO: 1554454 - RNA, 19 nt, Artificial Sequence
  Description of Artificial Sequence: Synthetic oligonucleotide
  Sense strand starting at position 2546 of SEQ ID NO: 1245328
ugcugauucuguuccaaca

SEQ ID NO: 1554455 - RNA, 19 nt, Artificial Sequence
  Description of Artificial Sequence: Synthetic oligonucleotide
  Antisense strand to SEQ ID NO: 1554454
uguuggaacagaaucagca

SEQ ID NO: 1554456 - RNA, 19 nt, Artificial Sequence
  Description of Artificial Sequence: Synthetic oligonucleotide
  Sense strand starting at position 2572 of SEQ ID NO: 1245328
ccuagcauugcuuacugua

SEQ ID NO: 1554457 - RNA, 19 nt, Artificial Sequence
  Description of Artificial Sequence: Synthetic oligonucleotide
  Antisense strand to SEQ ID NO: 1554456
uacaguaagcaaugcuagg

SEQ ID NO: 1554458 - RNA, 19 nt, Artificial Sequence
  Description of Artificial Sequence: Synthetic oligonucleotide
  Sense strand starting at position 2582 of SEQ ID NO: 1245328
cuuacuguaccugaagcaa

SEQ ID NO: 1554459 - RNA, 19 nt, Artificial Sequence
  Description of Artificial Sequence: Synthetic oligonucleotide
  Antisense strand to SEQ ID NO: 1554458
uugcuucagguacaguaag

SEQ ID NO: 1554460 - RNA, 19 nt, Artificial Sequence
  Description of Artificial Sequence: Synthetic oligonucleotide
  Sense strand starting at position 2917 of SEQ ID NO: 1245328
uccacaauguagcagauua

SEQ ID NO: 1554461 - RNA, 19 nt, Artificial Sequence
  Description of Artificial Sequence: Synthetic oligonucleotide
  Antisense strand to SEQ ID NO: 1554460
uaaucugcuacauugugga

SEQ ID NO: 1554462 - RNA, 19 nt, Artificial Sequence
  Description of Artificial Sequence: Synthetic oligonucleotide
  Sense strand starting at position 3492 of SEQ ID NO: 1245328
ccggcauuauugucucuuu

SEQ ID NO: 1554463 - RNA, 19 nt, Artificial Sequence
  Description of Artificial Sequence: Synthetic oligonucleotide
  Antisense strand to SEQ ID NO: 1554462
aaagagacaauaaugccgg

SEQ ID NO: 1554464 - RNA, 19 nt, Artificial Sequence
  Description of Artificial Sequence: Synthetic oligonucleotide
  Sense strand starting at position 3493 of SEQ ID NO: 1245328
cggcauuauugucucuuua

SEQ ID NO: 1554465 - RNA, 19 nt, Artificial Sequence
  Description of Artificial Sequence: Synthetic oligonucleotide
  Antisense strand to SEQ ID NO: 1554464
uaaagagacaauaaugccg

SEQ ID NO: 1554466 - RNA, 19 nt, Artificial Sequence
  Description of Artificial Sequence: Synthetic oligonucleotide
  Sense strand starting at position 3495 of SEQ ID NO: 1245328
gcauuauugucucuuuagu

SEQ ID NO: 1554467 - RNA, 19 nt, Artificial Sequence
  Description of Artificial Sequence: Synthetic oligonucleotide
  Antisense strand to SEQ ID NO: 1554466
acuaaagagacaauaaugc

SEQ ID NO: 1554468 - RNA, 19 nt, Artificial Sequence
  Description of Artificial Sequence: Synthetic oligonucleotide
  Sense strand starting at position 3501 of SEQ ID NO: 1245328
uugucucuuuaguauguga

SEQ ID NO: 1554469 - RNA, 19 nt, Artificial Sequence
  Description of Artificial Sequence: Synthetic oligonucleotide
  Antisense strand to SEQ ID NO: 1554468
ucacauacuaaagagacaa

SEQ ID NO: 1554470 - RNA, 19 nt, Artificial Sequence
  Description of Artificial Sequence: Synthetic oligonucleotide
  Sense strand starting at position 45 of SEQ ID NO: 1245329
gggcaagacuaccaauuua

SEQ ID NO: 1554471 - RNA, 19 nt, Artificial Sequence
  Description of Artificial Sequence: Synthetic oligonucleotide
  Antisense strand to SEQ ID NO: 1554470
uaaauugguagucuugccc

SEQ ID NO: 1554472 - RNA, 19 nt, Artificial Sequence
  Description of Artificial Sequence: Synthetic oligonucleotide
  Sense strand starting at position 64 of SEQ ID NO: 1245329
gaggguaauuuagaagaua

SEQ ID NO: 1554473 - RNA, 19 nt, Artificial Sequence
  Description of Artificial Sequence: Synthetic oligonucleotide
  Antisense strand to SEQ ID NO: 1554472
uaucuucuaaauuacccuc

SEQ ID NO: 1554474 - RNA, 19 nt, Artificial Sequence
  Description of Artificial Sequence: Synthetic oligonucleotide
  Sense strand starting at position 84 of SEQ ID NO: 1245329
cgauaaagguaagagagaa

SEQ ID NO: 1554475 - RNA, 19 nt, Artificial Sequence
  Description of Artificial Sequence: Synthetic oligonucleotide
  Antisense strand to SEQ ID NO: 1554474
uucucucuuaccuuuaucg

SEQ ID NO: 1554476 - RNA, 19 nt, Artificial Sequence
  Description of Artificial Sequence: Synthetic oligonucleotide
  Sense strand starting at position 116 of SEQ ID NO: 1245329
agagaugcugaauggaguu

SEQ ID NO: 1554477 - RNA, 19 nt, Artificial Sequence
  Description of Artificial Sequence: Synthetic oligonucleotide
  Antisense strand to SEQ ID NO: 1554476
aacuccauucagcaucucu

SEQ ID NO: 1554478 - RNA, 19 nt, Artificial Sequence
  Description of Artificial Sequence: Synthetic oligonucleotide
  Sense strand starting at position 140 of SEQ ID NO: 1245329
aaaguauagauucggguga

SEQ ID NO: 1554479 - RNA, 19 nt, Artificial Sequence
  Description of Artificial Sequence: Synthetic oligonucleotide
  Antisense strand to SEQ ID NO: 1554478
ucacccgaaucuauacuuu

SEQ ID NO: 1554480 - RNA, 19 nt, Artificial Sequence
  Description of Artificial Sequence: Synthetic oligonucleotide
  Sense strand starting at position 144 of SEQ ID NO: 1245329
uauagauucgggugaauac

SEQ ID NO: 1554481 - RNA, 19 nt, Artificial Sequence
  Description of Artificial Sequence: Synthetic oligonucleotide
  Antisense strand to SEQ ID NO: 1554480
guauucacccgaaucuaua

SEQ ID NO: 1554482 - RNA, 19 nt, Artificial Sequence
  Description of Artificial Sequence: Synthetic oligonucleotide
  Sense strand starting at position 212 of SEQ ID NO: 1245329
gauagaaguucuucuagga

SEQ ID NO: 1554483 - RNA, 19 nt, Artificial Sequence
  Description of Artificial Sequence: Synthetic oligonucleotide
  Antisense strand to SEQ ID NO: 1554482
uccuagaagaacuucuauc

SEQ ID NO: 1554484 - RNA, 19 nt, Artificial Sequence
  Description of Artificial Sequence: Synthetic oligonucleotide
  Sense strand starting at position 298 of SEQ ID NO: 1245329
guuugaaccaaaggguuaa

SEQ ID NO: 1554485 - RNA, 19 nt, Artificial Sequence
  Description of Artificial Sequence: Synthetic oligonucleotide
  Antisense strand to SEQ ID NO: 1554484
uuaacccuuugguucaaac

SEQ ID NO: 1554486 - RNA, 19 nt, Artificial Sequence
  Description of Artificial Sequence: Synthetic oligonucleotide
  Sense strand starting at position 444 of SEQ ID NO: 1245329
gugaaaccuggugagcaau

SEQ ID NO: 1554487 - RNA, 19 nt, Artificial Sequence
  Description of Artificial Sequence: Synthetic oligonucleotide
  Antisense strand to SEQ ID NO: 1554486
auugcucaccagguuucac

SEQ ID NO: 1554488 - RNA, 19 nt, Artificial Sequence
  Description of Artificial Sequence: Synthetic oligonucleotide
  Sense strand starting at position 455 of SEQ ID NO: 1245329
ugagcaaugccauucgugu

SEQ ID NO: 1554489 - RNA, 19 nt, Artificial Sequence
  Description of Artificial Sequence: Synthetic oligonucleotide
  Antisense strand to SEQ ID NO: 1554488
acacgaauggcauugcuca

SEQ ID NO: 1554490 - RNA, 19 nt, Artificial Sequence
  Description of Artificial Sequence: Synthetic oligonucleotide
  Sense strand starting at position 456 of SEQ ID NO: 1245329
gagcaaugccauucguguu

SEQ ID NO: 1554491 - RNA, 19 nt, Artificial Sequence
  Description of Artificial Sequence: Synthetic oligonucleotide
  Antisense strand to SEQ ID NO: 1554490
aacacgaauggcauugcuc

SEQ ID NO: 1554492 - RNA, 19 nt, Artificial Sequence
  Description of Artificial Sequence: Synthetic oligonucleotide
  Sense strand starting at position 484 of SEQ ID NO: 1245329
ggcuguccacagcauuaaa

SEQ ID NO: 1554493 - RNA, 19 nt, Artificial Sequence
  Description of Artificial Sequence: Synthetic oligonucleotide
  Antisense strand to SEQ ID NO: 1554492
uuuaaugcuguggacagcc

SEQ ID NO: 1554494 - RNA, 19 nt, Artificial Sequence
  Description of Artificial Sequence: Synthetic oligonucleotide
  Sense strand starting at position 591 of SEQ ID NO: 1245329
ccuucagugguugagaaga

SEQ ID NO: 1554495 - RNA, 19 nt, Artificial Sequence
  Description of Artificial Sequence: Synthetic oligonucleotide
  Antisense strand to SEQ ID NO: 1554494
ucuucucaaccacugaagg

SEQ ID NO: 1554496 - RNA, 19 nt, Artificial Sequence
  Description of Artificial Sequence: Synthetic oligonucleotide
  Sense strand starting at position 596 of SEQ ID NO: 1245329
agugguugagaagauguca

SEQ ID NO: 1554497 - RNA, 19 nt, Artificial Sequence
  Description of Artificial Sequence: Synthetic oligonucleotide
  Antisense strand to SEQ ID NO: 1554496
ugacaucuucucaaccacu

SEQ ID NO: 1554498 - RNA, 19 nt, Artificial Sequence
  Description of Artificial Sequence: Synthetic oligonucleotide
  Sense strand starting at position 730 of SEQ ID NO: 1245329
uuauuucugucauuacugu

SEQ ID NO: 1554499 - RNA, 19 nt, Artificial Sequence
  Description of Artificial Sequence: Synthetic oligonucleotide
  Antisense strand to SEQ ID NO: 1554498
acaguaaugacagaaauaa

SEQ ID NO: 1554500 - RNA, 19 nt, Artificial Sequence
  Description of Artificial Sequence: Synthetic oligonucleotide
  Sense strand starting at position 789 of SEQ ID NO: 1245329
gcagacguugcagaaacau

SEQ ID NO: 1554501 - RNA, 19 nt, Artificial Sequence
  Description of Artificial Sequence: Synthetic oligonucleotide
  Antisense strand to SEQ ID NO: 1554500
auguuucugcaacgucugc

SEQ ID NO: 1554502 - RNA, 19 nt, Artificial Sequence
  Description of Artificial Sequence: Synthetic oligonucleotide
  Sense strand starting at position 990 of SEQ ID NO: 1245329
cugagaaacguccauaauu

SEQ ID NO: 1554503 - RNA, 19 nt, Artificial Sequence
  Description of Artificial Sequence: Synthetic oligonucleotide
  Antisense strand to SEQ ID NO: 1554502
aauuauggacguuucucag

SEQ ID NO: 1554504 - RNA, 19 nt, Artificial Sequence
  Description of Artificial Sequence: Synthetic oligonucleotide
  Sense strand starting at position 992 of SEQ ID NO: 1245329
gagaaacguccauaauucu

SEQ ID NO: 1554505 - RNA, 19 nt, Artificial Sequence
  Description of Artificial Sequence: Synthetic oligonucleotide
  Antisense strand to SEQ ID NO: 1554504
agaauuauggacguuucuc

SEQ ID NO: 1554506 - RNA, 19 nt, Artificial Sequence
  Description of Artificial Sequence: Synthetic oligonucleotide
  Sense strand starting at position 1086 of SEQ ID NO: 1245329
ccaggagcgguuuaaauuc

SEQ ID NO: 1554507 - RNA, 19 nt, Artificial Sequence
  Description of Artificial Sequence: Synthetic oligonucleotide
  Antisense strand to SEQ ID NO: 1554506
gaauuuaaaccgcuccugg

SEQ ID NO: 1554508 - RNA, 19 nt, Artificial Sequence
  Description of Artificial Sequence: Synthetic oligonucleotide
  Sense strand starting at position 1095 of SEQ ID NO: 1245329
guuuaaauuccacaaucgu

SEQ ID NO: 1554509 - RNA, 19 nt, Artificial Sequence
  Description of Artificial Sequence: Synthetic oligonucleotide
  Antisense strand to SEQ ID NO: 1554508
acgauuguggaauuuaaac

SEQ ID NO: 1554510 - RNA, 19 nt, Artificial Sequence
  Description of Artificial Sequence: Synthetic oligonucleotide
  Sense strand starting at position 2279 of SEQ ID NO: 1245329
aaaggaaagucuccucguu

SEQ ID NO: 1554511 - RNA, 19 nt, Artificial Sequence
  Description of Artificial Sequence: Synthetic oligonucleotide
  Antisense strand to SEQ ID NO: 1554510
aacgaggagacuuuccuuu

SEQ ID NO: 1554512 - RNA, 19 nt, Artificial Sequence
  Description of Artificial Sequence: Synthetic oligonucleotide
  Sense strand starting at position 2589 of SEQ ID NO: 1245329
guuguuugugccgccgaau

SEQ ID NO: 1554513 - RNA, 19 nt, Artificial Sequence
  Description of Artificial Sequence: Synthetic oligonucleotide
  Antisense strand to SEQ ID NO: 1554512
auucggcggcacaaacaac

SEQ ID NO: 1554514 - RNA, 19 nt, Artificial Sequence
  Description of Artificial Sequence: Synthetic oligonucleotide
  Sense strand starting at position 2590 of SEQ ID NO: 1245329
uuguuugugccgccgaauu

SEQ ID NO: 1554515 - RNA, 19 nt, Artificial Sequence
  Description of Artificial Sequence: Synthetic oligonucleotide
  Antisense strand to SEQ ID NO: 1554514
aauucggcggcacaaacaa

SEQ ID NO: 1554516 - RNA, 19 nt, Artificial Sequence
  Description of Artificial Sequence: Synthetic oligonucleotide
  Sense strand starting at position 2613 of SEQ ID NO: 1245329
gguagugugguauacaagu

SEQ ID NO: 1554517 - RNA, 19 nt, Artificial Sequence
  Description of Artificial Sequence: Synthetic oligonucleotide
  Antisense strand to SEQ ID NO: 1554516
acuuguauaccacacuacc

SEQ ID NO: 1554518 - RNA, 19 nt, Artificial Sequence
  Description of Artificial Sequence: Synthetic oligonucleotide
  Sense strand starting at position 2650 of SEQ ID NO: 1245329
cuaauuucuuuggaaacug

SEQ ID NO: 1554519 - RNA, 19 nt, Artificial Sequence
  Description of Artificial Sequence: Synthetic oligonucleotide
  Antisense strand to SEQ ID NO: 1554518
caguuuccaaagaaauuag

SEQ ID NO: 1554520 - RNA, 19 nt, Artificial Sequence
  Description of Artificial Sequence: Synthetic oligonucleotide
  Sense strand starting at position 2659 of SEQ ID NO: 1245329
uuggaaacuggcugaacau

SEQ ID NO: 1554521 - RNA, 19 nt, Artificial Sequence
  Description of Artificial Sequence: Synthetic oligonucleotide
  Antisense strand to SEQ ID NO: 1554520
auguucagccaguuuccaa

SEQ ID NO: 1554522 - RNA, 19 nt, Artificial Sequence
  Description of Artificial Sequence: Synthetic oligonucleotide
  Sense strand starting at position 2859 of SEQ ID NO: 1245329
guguuucuugaauaguaug

SEQ ID NO: 1554523 - RNA, 19 nt, Artificial Sequence
  Description of Artificial Sequence: Synthetic oligonucleotide
  Antisense strand to SEQ ID NO: 1554522
cauacuauucaagaaacac

SEQ ID NO: 1554524 - RNA, 19 nt, Artificial Sequence
  Description of Artificial Sequence: Synthetic oligonucleotide
  Sense strand starting at position 2950 of SEQ ID NO: 1245329
augaguugguacccgaauu

SEQ ID NO: 1554525 - RNA, 19 nt, Artificial Sequence
  Description of Artificial Sequence: Synthetic oligonucleotide
  Antisense strand to SEQ ID NO: 1554524
aauucggguaccaacucau

SEQ ID NO: 1554526 - RNA, 19 nt, Artificial Sequence
  Description of Artificial Sequence: Synthetic oligonucleotide
  Sense strand starting at position 2951 of SEQ ID NO: 1245329
ugaguugguacccgaauua

SEQ ID NO: 1554527 - RNA, 19 nt, Artificial Sequence
  Description of Artificial Sequence: Synthetic oligonucleotide
  Antisense strand to SEQ ID NO: 1554526
uaauucggguaccaacuca

SEQ ID NO: 1554528 - RNA, 19 nt, Artificial Sequence
  Description of Artificial Sequence: Synthetic oligonucleotide
  Sense strand starting at position 3082 of SEQ ID NO: 1245329
uggaucuuuaggugaugca

SEQ ID NO: 1554529 - RNA, 19 nt, Artificial Sequence
  Description of Artificial Sequence: Synthetic oligonucleotide
  Antisense strand to SEQ ID NO: 1554528
ugcaucaccuaaagaucca

SEQ ID NO: 1554530 - RNA, 19 nt, Artificial Sequence
  Description of Artificial Sequence: Synthetic oligonucleotide
  Sense strand starting at position 3083 of SEQ ID NO: 1245329
ggaucuuuaggugaugcaa

SEQ ID NO: 1554531 - RNA, 19 nt, Artificial Sequence
  Description of Artificial Sequence: Synthetic oligonucleotide
  Antisense strand to SEQ ID NO: 1554530
uugcaucaccuaaagaucc

SEQ ID NO: 1554532 - RNA, 19 nt, Artificial Sequence
  Description of Artificial Sequence: Synthetic oligonucleotide
  Sense strand starting at position 3177 of SEQ ID NO: 1245329
uauuguuaccgugauugaa

SEQ ID NO: 1554533 - RNA, 19 nt, Artificial Sequence
  Description of Artificial Sequence: Synthetic oligonucleotide
  Antisense strand to SEQ ID NO: 1554532
uucaaucacgguaacaaua

SEQ ID NO: 1554534 - RNA, 19 nt, Artificial Sequence
  Description of Artificial Sequence: Synthetic oligonucleotide
  Sense strand starting at position 3179 of SEQ ID NO: 1245329
uuguuaccgugauugaaau

SEQ ID NO: 1554535 - RNA, 19 nt, Artificial Sequence
  Description of Artificial Sequence: Synthetic oligonucleotide
  Antisense strand to SEQ ID NO: 1554534
auuucaaucacgguaacaa

SEQ ID NO: 1554536 - RNA, 19 nt, Artificial Sequence
  Description of Artificial Sequence: Synthetic oligonucleotide
  Sense strand starting at position 3185 of SEQ ID NO: 1245329
ccgugauugaaaugcaaca

SEQ ID NO: 1554537 - RNA, 19 nt, Artificial Sequence
  Description of Artificial Sequence: Synthetic oligonucleotide
  Antisense strand to SEQ ID NO: 1554536
uguugcauuucaaucacgg

SEQ ID NO: 1554538 - RNA, 19 nt, Artificial Sequence
  Description of Artificial Sequence: Synthetic oligonucleotide
  Sense strand starting at position 3747 of SEQ ID NO: 1245329
uuaaauguaugguuaagac

SEQ ID NO: 1554539 - RNA, 19 nt, Artificial Sequence
  Description of Artificial Sequence: Synthetic oligonucleotide
  Antisense strand to SEQ ID NO: 1554538
gucuuaaccauacauuuaa

SEQ ID NO: 1554540 - RNA, 19 nt, Artificial Sequence
  Description of Artificial Sequence: Synthetic oligonucleotide
  Sense strand starting at position 3770 of SEQ ID NO: 1245329
ggguucugagucuggcaga

SEQ ID NO: 1554541 - RNA, 19 nt, Artificial Sequence
  Description of Artificial Sequence: Synthetic oligonucleotide
  Antisense strand to SEQ ID NO: 1554540
ucugccagacucagaaccc

SEQ ID NO: 1554542 - RNA, 19 nt, Artificial Sequence
  Description of Artificial Sequence: Synthetic oligonucleotide
  Sense strand starting at position 3839 of SEQ ID NO: 1245329
acaaguuucucaguuggaa

SEQ ID NO: 1554543 - RNA, 19 nt, Artificial Sequence
  Description of Artificial Sequence: Synthetic oligonucleotide
  Antisense strand to SEQ ID NO: 1554542
uuccaacugagaaacuugu

SEQ ID NO: 1554544 - RNA, 19 nt, Artificial Sequence
  Description of Artificial Sequence: Synthetic oligonucleotide
  Sense strand starting at position 3851 of SEQ ID NO: 1245329
guuggaaccucaguuucua

SEQ ID NO: 1554545 - RNA, 19 nt, Artificial Sequence
  Description of Artificial Sequence: Synthetic oligonucleotide
  Antisense strand to SEQ ID NO: 1554544
uagaaacugagguuccaac

SEQ ID NO: 1554546 - RNA, 19 nt, Artificial Sequence
  Description of Artificial Sequence: Synthetic oligonucleotide
  Sense strand starting at position 3957 of SEQ ID NO: 1245329
gggccuaaucuagguaaua

SEQ ID NO: 1554547 - RNA, 19 nt, Artificial Sequence
  Description of Artificial Sequence: Synthetic oligonucleotide
  Antisense strand to SEQ ID NO: 1554546
uauuaccuagauuaggccc

SEQ ID NO: 1554548 - RNA, 19 nt, Artificial Sequence
  Description of Artificial Sequence: Synthetic oligonucleotide
  Sense strand starting at position 3958 of SEQ ID NO: 1245329
ggccuaaucuagguaauaa

SEQ ID NO: 1554549 - RNA, 19 nt, Artificial Sequence
  Description of Artificial Sequence: Synthetic oligonucleotide
  Antisense strand to SEQ ID NO: 1554548
uuauuaccuagauuaggcc

SEQ ID NO: 1554550 - RNA, 19 nt, Artificial Sequence
  Description of Artificial Sequence: Synthetic oligonucleotide
  Sense strand starting at position 117 of SEQ ID NO: 1245330
cugguauuccagcggcaca

SEQ ID NO: 1554551 - RNA, 19 nt, Artificial Sequence
  Description of Artificial Sequence: Synthetic oligonucleotide
  Antisense strand to SEQ ID NO: 1554550
ugugccgcuggaauaccag

SEQ ID NO: 1554552 - RNA, 19 nt, Artificial Sequence
  Description of Artificial Sequence: Synthetic oligonucleotide
  Sense strand starting at position 118 of SEQ ID NO: 1245330
ugguauuccagcggcacaa

SEQ ID NO: 1554553 - RNA, 19 nt, Artificial Sequence
  Description of Artificial Sequence: Synthetic oligonucleotide
  Antisense strand to SEQ ID NO: 1554552
uugugccgcuggaauacca

SEQ ID NO: 1554554 - RNA, 19 nt, Artificial Sequence
  Description of Artificial Sequence: Synthetic oligonucleotide
  Sense strand starting at position 347 of SEQ ID NO: 1245330
gcaaguauuucccacuaag

SEQ ID NO: 1554555 - RNA, 19 nt, Artificial Sequence
  Description of Artificial Sequence: Synthetic oligonucleotide
  Antisense strand to SEQ ID NO: 1554554
cuuagugggaaauacuugc

SEQ ID NO: 1554556 - RNA, 19 nt, Artificial Sequence
  Description of Artificial Sequence: Synthetic oligonucleotide
  Sense strand starting at position 465 of SEQ ID NO: 1245330
aaucguuuaccugacgcua

SEQ ID NO: 1554557 - RNA, 19 nt, Artificial Sequence
  Description of Artificial Sequence: Synthetic oligonucleotide
  Antisense strand to SEQ ID NO: 1554556
uagcgucagguaaacgauu

SEQ ID NO: 1554558 - RNA, 19 nt, Artificial Sequence
  Description of Artificial Sequence: Synthetic oligonucleotide
  Sense strand starting at position 515 of SEQ ID NO: 1245330
auguguuuaccugacacua

SEQ ID NO: 1554559 - RNA, 19 nt, Artificial Sequence
  Description of Artificial Sequence: Synthetic oligonucleotide
  Antisense strand to SEQ ID NO: 1554558
uagugucagguaaacacau

SEQ ID NO: 1554560 - RNA, 19 nt, Artificial Sequence
  Description of Artificial Sequence: Synthetic oligonucleotide
  Sense strand starting at position 814 of SEQ ID NO: 1245330
cugaguaaacccuggcuau

SEQ ID NO: 1554561 - RNA, 19 nt, Artificial Sequence
  Description of Artificial Sequence: Synthetic oligonucleotide
  Antisense strand to SEQ ID NO: 1554560
auagccaggguuuacucag

SEQ ID NO: 1554562 - RNA, 19 nt, Artificial Sequence
  Description of Artificial Sequence: Synthetic oligonucleotide
  Sense strand starting at position 815 of SEQ ID NO: 1245330
ugaguaaacccuggcuaua

SEQ ID NO: 1554563 - RNA, 19 nt, Artificial Sequence
  Description of Artificial Sequence: Synthetic oligonucleotide
  Antisense strand to SEQ ID NO: 1554562
uauagccaggguuuacuca

SEQ ID NO: 1554564 - RNA, 19 nt, Artificial Sequence
  Description of Artificial Sequence: Synthetic oligonucleotide
  Sense strand starting at position 817 of SEQ ID NO: 1245330
aguaaacccuggcuauaaa

SEQ ID NO: 1554565 - RNA, 19 nt, Artificial Sequence
  Description of Artificial Sequence: Synthetic oligonucleotide
  Antisense strand to SEQ ID NO: 1554564
uuuauagccaggguuuacu

SEQ ID NO: 1554566 - RNA, 19 nt, Artificial Sequence
  Description of Artificial Sequence: Synthetic oligonucleotide
  Sense strand starting at position 818 of SEQ ID NO: 1245330
guaaacccuggcuauaaau

SEQ ID NO: 1554567 - RNA, 19 nt, Artificial Sequence
  Description of Artificial Sequence: Synthetic oligonucleotide
  Antisense strand to SEQ ID NO: 1554566
auuuauagccaggguuuac

SEQ ID NO: 1554568 - RNA, 19 nt, Artificial Sequence
  Description of Artificial Sequence: Synthetic oligonucleotide
  Sense strand starting at position 827 of SEQ ID NO: 1245330
ggcuauaaauuacuguuua

SEQ ID NO: 1554569 - RNA, 19 nt, Artificial Sequence
  Description of Artificial Sequence: Synthetic oligonucleotide
  Antisense strand to SEQ ID NO: 1554568
uaaacaguaauuuauagcc

SEQ ID NO: 1554570 - RNA, 19 nt, Artificial Sequence
  Description of Artificial Sequence: Synthetic oligonucleotide
  Sense strand starting at position 835 of SEQ ID NO: 1245330
auuacuguuuaggucauaa

SEQ ID NO: 1554571 - RNA, 19 nt, Artificial Sequence
  Description of Artificial Sequence: Synthetic oligonucleotide
  Antisense strand to SEQ ID NO: 1554570
uuaugaccuaaacaguaau

SEQ ID NO: 1554572 - RNA, 19 nt, Artificial Sequence
  Description of Artificial Sequence: Synthetic oligonucleotide
  Sense strand starting at position 866 of SEQ ID NO: 1245330
uacauuagacaaugacgua

SEQ ID NO: 1554573 - RNA, 19 nt, Artificial Sequence
  Description of Artificial Sequence: Synthetic oligonucleotide
  Antisense strand to SEQ ID NO: 1554572
uacgucauugucuaaugua

SEQ ID NO: 1554574 - RNA, 19 nt, Artificial Sequence
  Description of Artificial Sequence: Synthetic oligonucleotide
  Sense strand starting at position 1096 of SEQ ID NO: 1245330
aggaaaggcugucuaaugu

SEQ ID NO: 1554575 - RNA, 19 nt, Artificial Sequence
  Description of Artificial Sequence: Synthetic oligonucleotide
  Antisense strand to SEQ ID NO: 1554574
acauuagacagccuuuccu

SEQ ID NO: 1554576 - RNA, 19 nt, Artificial Sequence
  Description of Artificial Sequence: Synthetic oligonucleotide
  Sense strand starting at position 1102 of SEQ ID NO: 1245330
ggcugucuaauguggaaua

SEQ ID NO: 1554577 - RNA, 19 nt, Artificial Sequence
  Description of Artificial Sequence: Synthetic oligonucleotide
  Antisense strand to SEQ ID NO: 1554576
uauuccacauuagacagcc

SEQ ID NO: 1554578 - RNA, 19 nt, Artificial Sequence
  Description of Artificial Sequence: Synthetic oligonucleotide
  Sense strand starting at position 1104 of SEQ ID NO: 1245330
cugucuaauguggaauacu

SEQ ID NO: 1554579 - RNA, 19 nt, Artificial Sequence
  Description of Artificial Sequence: Synthetic oligonucleotide
  Antisense strand to SEQ ID NO: 1554578
aguauuccacauuagacag

SEQ ID NO: 1554580 - RNA, 19 nt, Artificial Sequence
  Description of Artificial Sequence: Synthetic oligonucleotide
  Sense strand starting at position 1123 of SEQ ID NO: 1245330
gcuaguuucccgugaggag

SEQ ID NO: 1554581 - RNA, 19 nt, Artificial Sequence
  Description of Artificial Sequence: Synthetic oligonucleotide
  Antisense strand to SEQ ID NO: 1554580
cuccucacgggaaacuagc

SEQ ID NO: 1554582 - RNA, 19 nt, Artificial Sequence
  Description of Artificial Sequence: Synthetic oligonucleotide
  Sense strand starting at position 1124 of SEQ ID NO: 1245330
cuaguuucccgugaggagu

SEQ ID NO: 1554583 - RNA, 19 nt, Artificial Sequence
  Description of Artificial Sequence: Synthetic oligonucleotide
  Antisense strand to SEQ ID NO: 1554582
acuccucacgggaaacuag

SEQ ID NO: 1554584 - RNA, 19 nt, Artificial Sequence
  Description of Artificial Sequence: Synthetic oligonucleotide
  Sense strand starting at position 2550 of SEQ ID NO: 1245330
ugucgcauuuaucagggaa

SEQ ID NO: 1554585 - RNA, 19 nt, Artificial Sequence
  Description of Artificial Sequence: Synthetic oligonucleotide
  Antisense strand to SEQ ID NO: 1554584
uucccugauaaaugcgaca

SEQ ID NO: 1554586 - RNA, 19 nt, Artificial Sequence
  Description of Artificial Sequence: Synthetic oligonucleotide
  Sense strand starting at position 2631 of SEQ ID NO: 1245330
ggagaagucacccgcauug

SEQ ID NO: 1554587 - RNA, 19 nt, Artificial Sequence
  Description of Artificial Sequence: Synthetic oligonucleotide
  Antisense strand to SEQ ID NO: 1554586
caaugcgggugacuucucc

SEQ ID NO: 1554588 - RNA, 19 nt, Artificial Sequence
  Description of Artificial Sequence: Synthetic oligonucleotide
  Sense strand starting at position 2814 of SEQ ID NO: 1245330
cgauuucuugcugguugaa

SEQ ID NO: 1554589 - RNA, 19 nt, Artificial Sequence
  Description of Artificial Sequence: Synthetic oligonucleotide
  Antisense strand to SEQ ID NO: 1554588
uucaaccagcaagaaaucg

SEQ ID NO: 1554590 - RNA, 19 nt, Artificial Sequence
  Description of Artificial Sequence: Synthetic oligonucleotide
  Sense strand starting at position 2950 of SEQ ID NO: 1245330
auaauuugcagguguuagu

SEQ ID NO: 1554591 - RNA, 19 nt, Artificial Sequence
  Description of Artificial Sequence: Synthetic oligonucleotide
  Antisense strand to SEQ ID NO: 1554590
acuaacaccugcaaauuau

SEQ ID NO: 1554592 - RNA, 19 nt, Artificial Sequence
  Description of Artificial Sequence: Synthetic oligonucleotide
  Sense strand starting at position 2972 of SEQ ID NO: 1245330
agcguccuuccggauucau

SEQ ID NO: 1554593 - RNA, 19 nt, Artificial Sequence
  Description of Artificial Sequence: Synthetic oligonucleotide
  Antisense strand to SEQ ID NO: 1554592
augaauccggaaggacgcu

SEQ ID NO: 1554594 - RNA, 19 nt, Artificial Sequence
  Description of Artificial Sequence: Synthetic oligonucleotide
  Sense strand starting at position 3047 of SEQ ID NO: 1245330
gagcauguggaaugaauau

SEQ ID NO: 1554595 - RNA, 19 nt, Artificial Sequence
  Description of Artificial Sequence: Synthetic oligonucleotide
  Antisense strand to SEQ ID NO: 1554594
auauucauuccacaugcuc

SEQ ID NO: 1554596 - RNA, 19 nt, Artificial Sequence
  Description of Artificial Sequence: Synthetic oligonucleotide
  Sense strand starting at position 3056 of SEQ ID NO: 1245330
gaaugaauaucacaguggu

SEQ ID NO: 1554597 - RNA, 19 nt, Artificial Sequence
  Description of Artificial Sequence: Synthetic oligonucleotide
  Antisense strand to SEQ ID NO: 1554596
accacugugauauucauuc

SEQ ID NO: 1554598 - RNA, 19 nt, Artificial Sequence
  Description of Artificial Sequence: Synthetic oligonucleotide
  Sense strand starting at position 3059 of SEQ ID NO: 1245330
ugaauaucacagugguaaa

SEQ ID NO: 1554599 - RNA, 19 nt, Artificial Sequence
  Description of Artificial Sequence: Synthetic oligonucleotide
  Antisense strand to SEQ ID NO: 1554598
uuuaccacugugauauuca

SEQ ID NO: 1554600 - RNA, 19 nt, Artificial Sequence
  Description of Artificial Sequence: Synthetic oligonucleotide
  Sense strand starting at position 3087 of SEQ ID NO: 1245330
agggcaauuagccguagaa

SEQ ID NO: 1554601 - RNA, 19 nt, Artificial Sequence
  Description of Artificial Sequence: Synthetic oligonucleotide
  Antisense strand to SEQ ID NO: 1554600
uucuacggcuaauugcccu

SEQ ID NO: 1554602 - RNA, 19 nt, Artificial Sequence
  Description of Artificial Sequence: Synthetic oligonucleotide
  Sense strand starting at position 3089 of SEQ ID NO: 1245330
ggcaauuagccguagaaag

SEQ ID NO: 1554603 - RNA, 19 nt, Artificial Sequence
  Description of Artificial Sequence: Synthetic oligonucleotide
  Antisense strand to SEQ ID NO: 1554602
cuuucuacggcuaauugcc

SEQ ID NO: 1554604 - RNA, 19 nt, Artificial Sequence
  Description of Artificial Sequence: Synthetic oligonucleotide
  Sense strand starting at position 3091 of SEQ ID NO: 1245330
caauuagccguagaaagaa

SEQ ID NO: 1554605 - RNA, 19 nt, Artificial Sequence
  Description of Artificial Sequence: Synthetic oligonucleotide
  Antisense strand to SEQ ID NO: 1554604
uucuuucuacggcuaauug

SEQ ID NO: 1554606 - RNA, 19 nt, Artificial Sequence
  Description of Artificial Sequence: Synthetic oligonucleotide
  Sense strand starting at position 3159 of SEQ ID NO: 1245330
uuaaucacccauugguaga

SEQ ID NO: 1554607 - RNA, 19 nt, Artificial Sequence
  Description of Artificial Sequence: Synthetic oligonucleotide
  Antisense strand to SEQ ID NO: 1554606
ucuaccaaugggugauuaa

SEQ ID NO: 1554608 - RNA, 19 nt, Artificial Sequence
  Description of Artificial Sequence: Synthetic oligonucleotide
  Sense strand starting at position 3204 of SEQ ID NO: 1245330
aggcuaguccugugugaaa

SEQ ID NO: 1554609 - RNA, 19 nt, Artificial Sequence
  Description of Artificial Sequence: Synthetic oligonucleotide
  Antisense strand to SEQ ID NO: 1554608
uuucacacaggacuagccu

SEQ ID NO: 1554610 - RNA, 19 nt, Artificial Sequence
  Description of Artificial Sequence: Synthetic oligonucleotide
  Sense strand starting at position 3222 of SEQ ID NO: 1245330
agcccuacagaguguugaa

SEQ ID NO: 1554611 - RNA, 19 nt, Artificial Sequence
  Description of Artificial Sequence: Synthetic oligonucleotide
  Antisense strand to SEQ ID NO: 1554610
uucaacacucuguagggcu

SEQ ID NO: 1554612 - RNA, 19 nt, Artificial Sequence
  Description of Artificial Sequence: Synthetic oligonucleotide
  Sense strand starting at position 3234 of SEQ ID NO: 1245330
uguugaaagcaucaaccaa

SEQ ID NO: 1554613 - RNA, 19 nt, Artificial Sequence
  Description of Artificial Sequence: Synthetic oligonucleotide
  Antisense strand to SEQ ID NO: 1554612
uugguugaugcuuucaaca

SEQ ID NO: 1554614 - RNA, 19 nt, Artificial Sequence
  Description of Artificial Sequence: Synthetic oligonucleotide
  Sense strand starting at position 3249 of SEQ ID NO: 1245330
ccaaauaggcaauguauau

SEQ ID NO: 1554615 - RNA, 19 nt, Artificial Sequence
  Description of Artificial Sequence: Synthetic oligonucleotide
  Antisense strand to SEQ ID NO: 1554614
auauacauugccuauuugg

SEQ ID NO: 1554616 - RNA, 19 nt, Artificial Sequence
  Description of Artificial Sequence: Synthetic oligonucleotide
  Sense strand starting at position 3332 of SEQ ID NO: 1245330
ugcaucuugcgguagaaac

SEQ ID NO: 1554617 - RNA, 19 nt, Artificial Sequence
  Description of Artificial Sequence: Synthetic oligonucleotide
  Antisense strand to SEQ ID NO: 1554616
guuucuaccgcaagaugca

SEQ ID NO: 1554618 - RNA, 19 nt, Artificial Sequence
  Description of Artificial Sequence: Synthetic oligonucleotide
  Sense strand starting at position 3334 of SEQ ID NO: 1245330
caucuugcgguagaaacua

SEQ ID NO: 1554619 - RNA, 19 nt, Artificial Sequence
  Description of Artificial Sequence: Synthetic oligonucleotide
  Antisense strand to SEQ ID NO: 1554618
uaguuucuaccgcaagaug

SEQ ID NO: 1554620 - RNA, 19 nt, Artificial Sequence
  Description of Artificial Sequence: Synthetic oligonucleotide
  Sense strand starting at position 3886 of SEQ ID NO: 1245330
guagcaaugcaguaucuau

SEQ ID NO: 1554621 - RNA, 19 nt, Artificial Sequence
  Description of Artificial Sequence: Synthetic oligonucleotide
  Antisense strand to SEQ ID NO: 1554620
auagauacugcauugcuac

SEQ ID NO: 1554622 - RNA, 19 nt, Artificial Sequence
  Description of Artificial Sequence: Synthetic oligonucleotide
  Sense strand starting at position 3896 of SEQ ID NO: 1245330
aguaucuaugugugccaaa

SEQ ID NO: 1554623 - RNA, 19 nt, Artificial Sequence
  Description of Artificial Sequence: Synthetic oligonucleotide
  Antisense strand to SEQ ID NO: 1554622
uuuggcacacauagauacu

SEQ ID NO: 1554624 - RNA, 19 nt, Artificial Sequence
  Description of Artificial Sequence: Synthetic oligonucleotide
  Sense strand starting at position 3897 of SEQ ID NO: 1245330
guaucuaugugugccaaag

SEQ ID NO: 1554625 - RNA, 19 nt, Artificial Sequence
  Description of Artificial Sequence: Synthetic oligonucleotide
  Antisense strand to SEQ ID NO: 1554624
cuuuggcacacauagauac

SEQ ID NO: 1554626 - RNA, 19 nt, Artificial Sequence
  Description of Artificial Sequence: Synthetic oligonucleotide
  Sense strand starting at position 3929 of SEQ ID NO: 1245330
acauguaauuccuuaugug

SEQ ID NO: 1554627 - RNA, 19 nt, Artificial Sequence
  Description of Artificial Sequence: Synthetic oligonucleotide
  Antisense strand to SEQ ID NO: 1554626
cacauaaggaauuacaugu

SEQ ID NO: 1554628 - RNA, 19 nt, Artificial Sequence
  Description of Artificial Sequence: Synthetic oligonucleotide
  Sense strand starting at position 3936 of SEQ ID NO: 1245330
auuccuuaugugugacacu

SEQ ID NO: 1554629 - RNA, 19 nt, Artificial Sequence
  Description of Artificial Sequence: Synthetic oligonucleotide
  Antisense strand to SEQ ID NO: 1554628
agugucacacauaaggaau

SEQ ID NO: 1554630 - RNA, 19 nt, Artificial Sequence
  Description of Artificial Sequence: Synthetic oligonucleotide
  Sense strand starting at position 243 of SEQ ID NO: 1245331
ccaagacuguucuacagca

SEQ ID NO: 1554631 - RNA, 19 nt, Artificial Sequence
  Description of Artificial Sequence: Synthetic oligonucleotide
  Antisense strand to SEQ ID NO: 1554630
ugcuguagaacagucuugg

SEQ ID NO: 1554632 - RNA, 19 nt, Artificial Sequence
  Description of Artificial Sequence: Synthetic oligonucleotide
  Sense strand starting at position 430 of SEQ ID NO: 1245331
gagcuaugacuacagcacu

SEQ ID NO: 1554633 - RNA, 19 nt, Artificial Sequence
  Description of Artificial Sequence: Synthetic oligonucleotide
  Antisense strand to SEQ ID NO: 1554632
agugcuguagucauagcuc

SEQ ID NO: 1554634 - RNA, 19 nt, Artificial Sequence
  Description of Artificial Sequence: Synthetic oligonucleotide
  Sense strand starting at position 671 of SEQ ID NO: 1245331
ucuuaaagccaaugaggaa

SEQ ID NO: 1554635 - RNA, 19 nt, Artificial Sequence
  Description of Artificial Sequence: Synthetic oligonucleotide
  Antisense strand to SEQ ID NO: 1554634
uuccucauuggcuuuaaga

SEQ ID NO: 1554636 - RNA, 19 nt, Artificial Sequence
  Description of Artificial Sequence: Synthetic oligonucleotide
  Sense strand starting at position 824 of SEQ ID NO: 1245331
uuauaaaccuauugcgaau

SEQ ID NO: 1554637 - RNA, 19 nt, Artificial Sequence
  Description of Artificial Sequence: Synthetic oligonucleotide
  Antisense strand to SEQ ID NO: 1554636
auucgcaauagguuuauaa

SEQ ID NO: 1554638 - RNA, 19 nt, Artificial Sequence
  Description of Artificial Sequence: Synthetic oligonucleotide
  Sense strand starting at position 833 of SEQ ID NO: 1245331
uauugcgaauuguggagaa

SEQ ID NO: 1554639 - RNA, 19 nt, Artificial Sequence
  Description of Artificial Sequence: Synthetic oligonucleotide
  Antisense strand to SEQ ID NO: 1554638
uucuccacaauucgcaaua

SEQ ID NO: 1554640 - RNA, 19 nt, Artificial Sequence
  Description of Artificial Sequence: Synthetic oligonucleotide
  Sense strand starting at position 835 of SEQ ID NO: 1245331
uugcgaauuguggagaaca

SEQ ID NO: 1554641 - RNA, 19 nt, Artificial Sequence
  Description of Artificial Sequence: Synthetic oligonucleotide
  Antisense strand to SEQ ID NO: 1554640
uguucuccacaauucgcaa

SEQ ID NO: 1554642 - RNA, 19 nt, Artificial Sequence
  Description of Artificial Sequence: Synthetic oligonucleotide
  Sense strand starting at position 837 of SEQ ID NO: 1245331
gcgaauuguggagaacaac

SEQ ID NO: 1554643 - RNA, 19 nt, Artificial Sequence
  Description of Artificial Sequence: Synthetic oligonucleotide
  Antisense strand to SEQ ID NO: 1554642
guuguucuccacaauucgc

SEQ ID NO: 1554644 - RNA, 19 nt, Artificial Sequence
  Description of Artificial Sequence: Synthetic oligonucleotide
  Sense strand starting at position 883 of SEQ ID NO: 1245331
aguuuauuacacugagauc

SEQ ID NO: 1554645 - RNA, 19 nt, Artificial Sequence
  Description of Artificial Sequence: Synthetic oligonucleotide
  Antisense strand to SEQ ID NO: 1554644
gaucucaguguaauaaacu

SEQ ID NO: 1554646 - RNA, 19 nt, Artificial Sequence
  Description of Artificial Sequence: Synthetic oligonucleotide
  Sense strand starting at position 906 of SEQ ID NO: 1245331
uguuaucacucacacuagu

SEQ ID NO: 1554647 - RNA, 19 nt, Artificial Sequence
  Description of Artificial Sequence: Synthetic oligonucleotide
  Antisense strand to SEQ ID NO: 1554646
acuagugugagugauaaca

SEQ ID NO: 1554648 - RNA, 19 nt, Artificial Sequence
  Description of Artificial Sequence: Synthetic oligonucleotide
  Sense strand starting at position 987 of SEQ ID NO: 1245331
acgagaaucuaucaaucuu

SEQ ID NO: 1554649 - RNA, 19 nt, Artificial Sequence
  Description of Artificial Sequence: Synthetic oligonucleotide
  Antisense strand to SEQ ID NO: 1554648
aagauugauagauucucgu

SEQ ID NO: 1554650 - RNA, 19 nt, Artificial Sequence
  Description of Artificial Sequence: Synthetic oligonucleotide
  Sense strand starting at position 1067 of SEQ ID NO: 1245331
gcuuguucucuccggaaau

SEQ ID NO: 1554651 - RNA, 19 nt, Artificial Sequence
  Description of Artificial Sequence: Synthetic oligonucleotide
  Antisense strand to SEQ ID NO: 1554650
auuuccggagagaacaagc

SEQ ID NO: 1554652 - RNA, 19 nt, Artificial Sequence
  Description of Artificial Sequence: Synthetic oligonucleotide
  Sense strand starting at position 1069 of SEQ ID NO: 1245331
uuguucucuccggaaauca

SEQ ID NO: 1554653 - RNA, 19 nt, Artificial Sequence
  Description of Artificial Sequence: Synthetic oligonucleotide
  Antisense strand to SEQ ID NO: 1554652
ugauuuccggagagaacaa

SEQ ID NO: 1554654 - RNA, 19 nt, Artificial Sequence
  Description of Artificial Sequence: Synthetic oligonucleotide
  Sense strand starting at position 1160 of SEQ ID NO: 1245331
gcacgauauugcuguauuu

SEQ ID NO: 1554655 - RNA, 19 nt, Artificial Sequence
  Description of Artificial Sequence: Synthetic oligonucleotide
  Antisense strand to SEQ ID NO: 1554654
aaauacagcaauaucgugc

SEQ ID NO: 1554656 - RNA, 19 nt, Artificial Sequence
  Description of Artificial Sequence: Synthetic oligonucleotide
  Sense strand starting at position 1298 of SEQ ID NO: 1245331
cugguauuccagcggcaca

SEQ ID NO: 1554657 - RNA, 19 nt, Artificial Sequence
  Description of Artificial Sequence: Synthetic oligonucleotide
  Antisense strand to SEQ ID NO: 1554656
ugugccgcuggaauaccag

SEQ ID NO: 1554658 - RNA, 19 nt, Artificial Sequence
  Description of Artificial Sequence: Synthetic oligonucleotide
  Sense strand starting at position 1299 of SEQ ID NO: 1245331
ugguauuccagcggcacaa

SEQ ID NO: 1554659 - RNA, 19 nt, Artificial Sequence
  Description of Artificial Sequence: Synthetic oligonucleotide
  Antisense strand to SEQ ID NO: 1554658
uugugccgcuggaauacca

SEQ ID NO: 1554660 - RNA, 19 nt, Artificial Sequence
  Description of Artificial Sequence: Synthetic oligonucleotide
  Sense strand starting at position 1463 of SEQ ID NO: 1245331
ggcagacauugcuguauuu

SEQ ID NO: 1554661 - RNA, 19 nt, Artificial Sequence
  Description of Artificial Sequence: Synthetic oligonucleotide
  Antisense strand to SEQ ID NO: 1554660
aaauacagcaaugucugcc

SEQ ID NO: 1554662 - RNA, 19 nt, Artificial Sequence
  Description of Artificial Sequence: Synthetic oligonucleotide
  Sense strand starting at position 1528 of SEQ ID NO: 1245331
gcaaguauuucccacuaag

SEQ ID NO: 1554663 - RNA, 19 nt, Artificial Sequence
  Description of Artificial Sequence: Synthetic oligonucleotide
  Antisense strand to SEQ ID NO: 1554662
cuuagugggaaauacuugc

SEQ ID NO: 1554664 - RNA, 19 nt, Artificial Sequence
  Description of Artificial Sequence: Synthetic oligonucleotide
  Sense strand starting at position 1646 of SEQ ID NO: 1245331
aaucguuuaccugacgcua

SEQ ID NO: 1554665 - RNA, 19 nt, Artificial Sequence
  Description of Artificial Sequence: Synthetic oligonucleotide
  Antisense strand to SEQ ID NO: 1554664
uagcgucagguaaacgauu

SEQ ID NO: 1554666 - RNA, 19 nt, Artificial Sequence
  Description of Artificial Sequence: Synthetic oligonucleotide
  Sense strand starting at position 1696 of SEQ ID NO: 1245331
auguguuuaccugacacua

SEQ ID NO: 1554667 - RNA, 19 nt, Artificial Sequence
  Description of Artificial Sequence: Synthetic oligonucleotide
  Antisense strand to SEQ ID NO: 1554666
uagugucagguaaacacau

SEQ ID NO: 1554668 - RNA, 19 nt, Artificial Sequence
  Description of Artificial Sequence: Synthetic oligonucleotide
  Sense strand starting at position 1698 of SEQ ID NO: 1245331
guguuuaccugacacuaaa

SEQ ID NO: 1554669 - RNA, 19 nt, Artificial Sequence
  Description of Artificial Sequence: Synthetic oligonucleotide
  Antisense strand to SEQ ID NO: 1554668
uuuagugucagguaaacac

SEQ ID NO: 1554670 - RNA, 19 nt, Artificial Sequence
  Description of Artificial Sequence: Synthetic oligonucleotide
  Sense strand starting at position 1985 of SEQ ID NO: 1245331
caaugagcaucugaguaaa

SEQ ID NO: 1554671 - RNA, 19 nt, Artificial Sequence
  Description of Artificial Sequence: Synthetic oligonucleotide
  Antisense strand to SEQ ID NO: 1554670
uuuacucagaugcucauug

SEQ ID NO: 1554672 - RNA, 19 nt, Artificial Sequence
  Description of Artificial Sequence: Synthetic oligonucleotide
  Sense strand starting at position 1995 of SEQ ID NO: 1245331
cugaguaaacccuggcuau

SEQ ID NO: 1554673 - RNA, 19 nt, Artificial Sequence
  Description of Artificial Sequence: Synthetic oligonucleotide
  Antisense strand to SEQ ID NO: 1554672
auagccaggguuuacucag

SEQ ID NO: 1554674 - RNA, 19 nt, Artificial Sequence
  Description of Artificial Sequence: Synthetic oligonucleotide
  Sense strand starting at position 1996 of SEQ ID NO: 1245331
ugaguaaacccuggcuaua

SEQ ID NO: 1554675 - RNA, 19 nt, Artificial Sequence
  Description of Artificial Sequence: Synthetic oligonucleotide
  Antisense strand to SEQ ID NO: 1554674
uauagccaggguuuacuca

SEQ ID NO: 1554676 - RNA, 19 nt, Artificial Sequence
  Description of Artificial Sequence: Synthetic oligonucleotide
  Sense strand starting at position 1998 of SEQ ID NO: 1245331
aguaaacccuggcuauaaa

SEQ ID NO: 1554677 - RNA, 19 nt, Artificial Sequence
  Description of Artificial Sequence: Synthetic oligonucleotide
  Antisense strand to SEQ ID NO: 1554676
uuuauagccaggguuuacu

SEQ ID NO: 1554678 - RNA, 19 nt, Artificial Sequence
  Description of Artificial Sequence: Synthetic oligonucleotide
  Sense strand starting at position 1999 of SEQ ID NO: 1245331
guaaacccuggcuauaaau

SEQ ID NO: 1554679 - RNA, 19 nt, Artificial Sequence
  Description of Artificial Sequence: Synthetic oligonucleotide
  Antisense strand to SEQ ID NO: 1554678
auuuauagccaggguuuac

SEQ ID NO: 1554680 - RNA, 19 nt, Artificial Sequence
  Description of Artificial Sequence: Synthetic oligonucleotide
  Sense strand starting at position 2008 of SEQ ID NO: 1245331
ggcuauaaauuacuguuua

SEQ ID NO: 1554681 - RNA, 19 nt, Artificial Sequence
  Description of Artificial Sequence: Synthetic oligonucleotide
  Antisense strand to SEQ ID NO: 1554680
uaaacaguaauuuauagcc

SEQ ID NO: 1554682 - RNA, 19 nt, Artificial Sequence
  Description of Artificial Sequence: Synthetic oligonucleotide
  Sense strand starting at position 2016 of SEQ ID NO: 1245331
auuacuguuuaggucauaa

SEQ ID NO: 1554683 - RNA, 19 nt, Artificial Sequence
  Description of Artificial Sequence: Synthetic oligonucleotide
  Antisense strand to SEQ ID NO: 1554682
uuaugaccuaaacaguaau

SEQ ID NO: 1554684 - RNA, 19 nt, Artificial Sequence
  Description of Artificial Sequence: Synthetic oligonucleotide
  Sense strand starting at position 2020 of SEQ ID NO: 1245331
cuguuuaggucauaauccu

SEQ ID NO: 1554685 - RNA, 19 nt, Artificial Sequence
  Description of Artificial Sequence: Synthetic oligonucleotide
  Antisense strand to SEQ ID NO: 1554684
aggauuaugaccuaaacag

SEQ ID NO: 1554686 - RNA, 19 nt, Artificial Sequence
  Description of Artificial Sequence: Synthetic oligonucleotide
  Sense strand starting at position 2047 of SEQ ID NO: 1245331
uacauuagacaaugacgua

SEQ ID NO: 1554687 - RNA, 19 nt, Artificial Sequence
  Description of Artificial Sequence: Synthetic oligonucleotide
  Antisense strand to SEQ ID NO: 1554686
uacgucauugucuaaugua

SEQ ID NO: 1554688 - RNA, 19 nt, Artificial Sequence
  Description of Artificial Sequence: Synthetic oligonucleotide
  Sense strand starting at position 2092 of SEQ ID NO: 1245331
ccgacauccugucaacuuu

SEQ ID NO: 1554689 - RNA, 19 nt, Artificial Sequence
  Description of Artificial Sequence: Synthetic oligonucleotide
  Antisense strand to SEQ ID NO: 1554688
aaaguugacaggaugucgg

SEQ ID NO: 1554690 - RNA, 19 nt, Artificial Sequence
  Description of Artificial Sequence: Synthetic oligonucleotide
  Sense strand starting at position 2277 of SEQ ID NO: 1245331
aggaaaggcugucuaaugu

SEQ ID NO: 1554691 - RNA, 19 nt, Artificial Sequence
  Description of Artificial Sequence: Synthetic oligonucleotide
  Antisense strand to SEQ ID NO: 1554690
acauuagacagccuuuccu

SEQ ID NO: 1554692 - RNA, 19 nt, Artificial Sequence
  Description of Artificial Sequence: Synthetic oligonucleotide
  Sense strand starting at position 2281 of SEQ ID NO: 1245331
aaggcugucuaauguggaa

SEQ ID NO: 1554693 - RNA, 19 nt, Artificial Sequence
  Description of Artificial Sequence: Synthetic oligonucleotide
  Antisense strand to SEQ ID NO: 1554692
uuccacauuagacagccuu

SEQ ID NO: 1554694 - RNA, 19 nt, Artificial Sequence
  Description of Artificial Sequence: Synthetic oligonucleotide
  Sense strand starting at position 2283 of SEQ ID NO: 1245331
ggcugucuaauguggaaua

SEQ ID NO: 1554695 - RNA, 19 nt, Artificial Sequence
  Description of Artificial Sequence: Synthetic oligonucleotide
  Antisense strand to SEQ ID NO: 1554694
uauuccacauuagacagcc

SEQ ID NO: 1554696 - RNA, 19 nt, Artificial Sequence
  Description of Artificial Sequence: Synthetic oligonucleotide
  Sense strand starting at position 2285 of SEQ ID NO: 1245331
cugucuaauguggaauacu

SEQ ID NO: 1554697 - RNA, 19 nt, Artificial Sequence
  Description of Artificial Sequence: Synthetic oligonucleotide
  Antisense strand to SEQ ID NO: 1554696
aguauuccacauuagacag

SEQ ID NO: 1554698 - RNA, 19 nt, Artificial Sequence
  Description of Artificial Sequence: Synthetic oligonucleotide
  Sense strand starting at position 2304 of SEQ ID NO: 1245331
gcuaguuucccgugaggag

SEQ ID NO: 1554699 - RNA, 19 nt, Artificial Sequence
  Description of Artificial Sequence: Synthetic oligonucleotide
  Antisense strand to SEQ ID NO: 1554698
cuccucacgggaaacuagc

SEQ ID NO: 1554700 - RNA, 19 nt, Artificial Sequence
  Description of Artificial Sequence: Synthetic oligonucleotide
  Sense strand starting at position 2305 of SEQ ID NO: 1245331
cuaguuucccgugaggagu

SEQ ID NO: 1554701 - RNA, 19 nt, Artificial Sequence
  Description of Artificial Sequence: Synthetic oligonucleotide
  Antisense strand to SEQ ID NO: 1554700
acuccucacgggaaacuag

SEQ ID NO: 1554702 - RNA, 19 nt, Artificial Sequence
  Description of Artificial Sequence: Synthetic oligonucleotide
  Sense strand starting at position 3722 of SEQ ID NO: 1245331
gcaagagggugucgcauuu

SEQ ID NO: 1554703 - RNA, 19 nt, Artificial Sequence
  Description of Artificial Sequence: Synthetic oligonucleotide
  Antisense strand to SEQ ID NO: 1554702
aaaugcgacacccucuugc

SEQ ID NO: 1554704 - RNA, 19 nt, Artificial Sequence
  Description of Artificial Sequence: Synthetic oligonucleotide
  Sense strand starting at position 3731 of SEQ ID NO: 1245331
ugucgcauuuaucagggaa

SEQ ID NO: 1554705 - RNA, 19 nt, Artificial Sequence
  Description of Artificial Sequence: Synthetic oligonucleotide
  Antisense strand to SEQ ID NO: 1554704
uucccugauaaaugcgaca

SEQ ID NO: 1554706 - RNA, 19 nt, Artificial Sequence
  Description of Artificial Sequence: Synthetic oligonucleotide
  Sense strand starting at position 3733 of SEQ ID NO: 1245331
ucgcauuuaucagggaagu

SEQ ID NO: 1554707 - RNA, 19 nt, Artificial Sequence
  Description of Artificial Sequence: Synthetic oligonucleotide
  Antisense strand to SEQ ID NO: 1554706
acuucccugauaaaugcga

SEQ ID NO: 1554708 - RNA, 19 nt, Artificial Sequence
  Description of Artificial Sequence: Synthetic oligonucleotide
  Sense strand starting at position 3812 of SEQ ID NO: 1245331
ggagaagucacccgcauug

SEQ ID NO: 1554709 - RNA, 19 nt, Artificial Sequence
  Description of Artificial Sequence: Synthetic oligonucleotide
  Antisense strand to SEQ ID NO: 1554708
caaugcgggugacuucucc

SEQ ID NO: 1554710 - RNA, 19 nt, Artificial Sequence
  Description of Artificial Sequence: Synthetic oligonucleotide
  Sense strand starting at position 84 of SEQ ID NO: 1245332
aggauaugcuccuccagaa

SEQ ID NO: 1554711 - RNA, 19 nt, Artificial Sequence
  Description of Artificial Sequence: Synthetic oligonucleotide
  Antisense strand to SEQ ID NO: 1554710
uucuggaggagcauauccu

SEQ ID NO: 1554712 - RNA, 19 nt, Artificial Sequence
  Description of Artificial Sequence: Synthetic oligonucleotide
  Sense strand starting at position 272 of SEQ ID NO: 1245332
gcaguuauuucuuaaauag

SEQ ID NO: 1554713 - RNA, 19 nt, Artificial Sequence
  Description of Artificial Sequence: Synthetic oligonucleotide
  Antisense strand to SEQ ID NO: 1554712
cuauuuaagaaauaacugc

SEQ ID NO: 1554714 - RNA, 19 nt, Artificial Sequence
  Description of Artificial Sequence: Synthetic oligonucleotide
  Sense strand starting at position 503 of SEQ ID NO: 1245332
ugaucagcauccuccgaau

SEQ ID NO: 1554715 - RNA, 19 nt, Artificial Sequence
  Description of Artificial Sequence: Synthetic oligonucleotide
  Antisense strand to SEQ ID NO: 1554714
auucggaggaugcugauca

SEQ ID NO: 1554716 - RNA, 19 nt, Artificial Sequence
  Description of Artificial Sequence: Synthetic oligonucleotide
  Sense strand starting at position 505 of SEQ ID NO: 1245332
aucagcauccuccgaauua

SEQ ID NO: 1554717 - RNA, 19 nt, Artificial Sequence
  Description of Artificial Sequence: Synthetic oligonucleotide
  Antisense strand to SEQ ID NO: 1554716
uaauucggaggaugcugau

SEQ ID NO: 1554718 - RNA, 19 nt, Artificial Sequence
  Description of Artificial Sequence: Synthetic oligonucleotide
  Sense strand starting at position 549 of SEQ ID NO: 1245332
agacuuauguaacagaaac

SEQ ID NO: 1554719 - RNA, 19 nt, Artificial Sequence
  Description of Artificial Sequence: Synthetic oligonucleotide
  Antisense strand to SEQ ID NO: 1554718
guuucuguuacauaagucu

SEQ ID NO: 1554720 - RNA, 19 nt, Artificial Sequence
  Description of Artificial Sequence: Synthetic oligonucleotide
  Sense strand starting at position 822 of SEQ ID NO: 1245332
cauaaucuacguggucuga

SEQ ID NO: 1554721 - RNA, 19 nt, Artificial Sequence
  Description of Artificial Sequence: Synthetic oligonucleotide
  Antisense strand to SEQ ID NO: 1554720
ucagaccacguagauuaug

SEQ ID NO: 1554722 - RNA, 19 nt, Artificial Sequence
  Description of Artificial Sequence: Synthetic oligonucleotide
  Sense strand starting at position 828 of SEQ ID NO: 1245332
cuacguggucugaguggua

SEQ ID NO: 1554723 - RNA, 19 nt, Artificial Sequence
  Description of Artificial Sequence: Synthetic oligonucleotide
  Antisense strand to SEQ ID NO: 1554722
uaccacucagaccacguag

SEQ ID NO: 1554724 - RNA, 19 nt, Artificial Sequence
  Description of Artificial Sequence: Synthetic oligonucleotide
  Sense strand starting at position 873 of SEQ ID NO: 1245332
ugaucuuugcuacacagca

SEQ ID NO: 1554725 - RNA, 19 nt, Artificial Sequence
  Description of Artificial Sequence: Synthetic oligonucleotide
  Antisense strand to SEQ ID NO: 1554724
ugcuguguagcaaagauca

SEQ ID NO: 1554726 - RNA, 19 nt, Artificial Sequence
  Description of Artificial Sequence: Synthetic oligonucleotide
  Sense strand starting at position 942 of SEQ ID NO: 1245332
ucugaaagucuaggucagu

SEQ ID NO: 1554727 - RNA, 19 nt, Artificial Sequence
  Description of Artificial Sequence: Synthetic oligonucleotide
  Antisense strand to SEQ ID NO: 1554726
acugaccuagacuuucaga

SEQ ID NO: 1554728 - RNA, 19 nt, Artificial Sequence
  Description of Artificial Sequence: Synthetic oligonucleotide
  Sense strand starting at position 943 of SEQ ID NO: 1245332
cugaaagucuaggucagua

SEQ ID NO: 1554729 - RNA, 19 nt, Artificial Sequence
  Description of Artificial Sequence: Synthetic oligonucleotide
  Antisense strand to SEQ ID NO: 1554728
uacugaccuagacuuucag

SEQ ID NO: 1554730 - RNA, 19 nt, Artificial Sequence
  Description of Artificial Sequence: Synthetic oligonucleotide
  Sense strand starting at position 1014 of SEQ ID NO: 1245332
gaaccuuuguguuccgacu

SEQ ID NO: 1554731 - RNA, 19 nt, Artificial Sequence
  Description of Artificial Sequence: Synthetic oligonucleotide
  Antisense strand to SEQ ID NO: 1554730
agucggaacacaaagguuc

SEQ ID NO: 1554732 - RNA, 19 nt, Artificial Sequence
  Description of Artificial Sequence: Synthetic oligonucleotide
  Sense strand starting at position 1080 of SEQ ID NO: 1245332
ggcagcucccuguguauuu

SEQ ID NO: 1554733 - RNA, 19 nt, Artificial Sequence
  Description of Artificial Sequence: Synthetic oligonucleotide
  Antisense strand to SEQ ID NO: 1554732
aaauacacagggagcugcc

SEQ ID NO: 1554734 - RNA, 19 nt, Artificial Sequence
  Description of Artificial Sequence: Synthetic oligonucleotide
  Sense strand starting at position 1081 of SEQ ID NO: 1245332
gcagcucccuguguauuua

SEQ ID NO: 1554735 - RNA, 19 nt, Artificial Sequence
  Description of Artificial Sequence: Synthetic oligonucleotide
  Antisense strand to SEQ ID NO: 1554734
uaaauacacagggagcugc

SEQ ID NO: 1554736 - RNA, 19 nt, Artificial Sequence
  Description of Artificial Sequence: Synthetic oligonucleotide
  Sense strand starting at position 1109 of SEQ ID NO: 1245332
acauuaacuggucacgaca

SEQ ID NO: 1554737 - RNA, 19 nt, Artificial Sequence
  Description of Artificial Sequence: Synthetic oligonucleotide
  Antisense strand to SEQ ID NO: 1554736
ugucgugaccaguuaaugu

SEQ ID NO: 1554738 - RNA, 19 nt, Artificial Sequence
  Description of Artificial Sequence: Synthetic oligonucleotide
  Sense strand starting at position 1211 of SEQ ID NO: 1245332
auaaauauuugcugcagaa

SEQ ID NO: 1554739 - RNA, 19 nt, Artificial Sequence
  Description of Artificial Sequence: Synthetic oligonucleotide
  Antisense strand to SEQ ID NO: 1554738
uucugcagcaaauauuuau

SEQ ID NO: 1554740 - RNA, 19 nt, Artificial Sequence
  Description of Artificial Sequence: Synthetic oligonucleotide
  Sense strand starting at position 1367 of SEQ ID NO: 1245332
cccaaacucggcugaguuu

SEQ ID NO: 1554741 - RNA, 19 nt, Artificial Sequence
  Description of Artificial Sequence: Synthetic oligonucleotide
  Antisense strand to SEQ ID NO: 1554740
aaacucagccgaguuuggg

SEQ ID NO: 1554742 - RNA, 19 nt, Artificial Sequence
  Description of Artificial Sequence: Synthetic oligonucleotide
  Sense strand starting at position 1640 of SEQ ID NO: 1245332
gcguaaaugcgugaaagac

SEQ ID NO: 1554743 - RNA, 19 nt, Artificial Sequence
  Description of Artificial Sequence: Synthetic oligonucleotide
  Antisense strand to SEQ ID NO: 1554742
gucuuucacgcauuuacgc

SEQ ID NO: 1554744 - RNA, 19 nt, Artificial Sequence
  Description of Artificial Sequence: Synthetic oligonucleotide
  Sense strand starting at position 1649 of SEQ ID NO: 1245332
cgugaaagacuccgagaaa

SEQ ID NO: 1554745 - RNA, 19 nt, Artificial Sequence
  Description of Artificial Sequence: Synthetic oligonucleotide
  Antisense strand to SEQ ID NO: 1554744
uuucucggagucuuucacg

SEQ ID NO: 1554746 - RNA, 19 nt, Artificial Sequence
  Description of Artificial Sequence: Synthetic oligonucleotide
  Sense strand starting at position 2537 of SEQ ID NO: 1245332
ggagcaucugccgagauag

SEQ ID NO: 1554747 - RNA, 19 nt, Artificial Sequence
  Description of Artificial Sequence: Synthetic oligonucleotide
  Antisense strand to SEQ ID NO: 1554746
cuaucucggcagaugcucc

SEQ ID NO: 1554748 - RNA, 19 nt, Artificial Sequence
  Description of Artificial Sequence: Synthetic oligonucleotide
  Sense strand starting at position 2657 of SEQ ID NO: 1245332
caaagucgugccuaacaau

SEQ ID NO: 1554749 - RNA, 19 nt, Artificial Sequence
  Description of Artificial Sequence: Synthetic oligonucleotide
  Antisense strand to SEQ ID NO: 1554748
auuguuaggcacgacuuug

SEQ ID NO: 1554750 - RNA, 19 nt, Artificial Sequence
  Description of Artificial Sequence: Synthetic oligonucleotide
  Sense strand starting at position 2664 of SEQ ID NO: 1245332
gugccuaacaauuggaaag

SEQ ID NO: 1554751 - RNA, 19 nt, Artificial Sequence
  Description of Artificial Sequence: Synthetic oligonucleotide
  Antisense strand to SEQ ID NO: 1554750
cuuuccaauuguuaggcac

SEQ ID NO: 1554752 - RNA, 19 nt, Artificial Sequence
  Description of Artificial Sequence: Synthetic oligonucleotide
  Sense strand starting at position 2793 of SEQ ID NO: 1245332
gcaggaaagugggucgauu

SEQ ID NO: 1554753 - RNA, 19 nt, Artificial Sequence
  Description of Artificial Sequence: Synthetic oligonucleotide
  Antisense strand to SEQ ID NO: 1554752
aaucgacccacuuuccugc

SEQ ID NO: 1554754 - RNA, 19 nt, Artificial Sequence
  Description of Artificial Sequence: Synthetic oligonucleotide
  Sense strand starting at position 2805 of SEQ ID NO: 1245332
gucgauuucgucugacuug

SEQ ID NO: 1554755 - RNA, 19 nt, Artificial Sequence
  Description of Artificial Sequence: Synthetic oligonucleotide
  Antisense strand to SEQ ID NO: 1554754
caagucagacgaaaucgac

SEQ ID NO: 1554756 - RNA, 19 nt, Artificial Sequence
  Description of Artificial Sequence: Synthetic oligonucleotide
  Sense strand starting at position 2829 of SEQ ID NO: 1245332
uuggaauuaaguugugaaa

SEQ ID NO: 1554757 - RNA, 19 nt, Artificial Sequence
  Description of Artificial Sequence: Synthetic oligonucleotide
  Antisense strand to SEQ ID NO: 1554756
uuucacaacuuaauuccaa

SEQ ID NO: 1554758 - RNA, 19 nt, Artificial Sequence
  Description of Artificial Sequence: Synthetic oligonucleotide
  Sense strand starting at position 2872 of SEQ ID NO: 1245332
uuaagagaguacuuacuua

SEQ ID NO: 1554759 - RNA, 19 nt, Artificial Sequence
  Description of Artificial Sequence: Synthetic oligonucleotide
  Antisense strand to SEQ ID NO: 1554758
uaaguaaguacucucuuaa

SEQ ID NO: 1554760 - RNA, 19 nt, Artificial Sequence
  Description of Artificial Sequence: Synthetic oligonucleotide
  Sense strand starting at position 2883 of SEQ ID NO: 1245332
cuuacuuagugccuuguaa

SEQ ID NO: 1554761 - RNA, 19 nt, Artificial Sequence
  Description of Artificial Sequence: Synthetic oligonucleotide
  Antisense strand to SEQ ID NO: 1554760
uuacaaggcacuaaguaag

SEQ ID NO: 1554762 - RNA, 19 nt, Artificial Sequence
  Description of Artificial Sequence: Synthetic oligonucleotide
  Sense strand starting at position 3048 of SEQ ID NO: 1245332
agggaaaguuuauauaaag

SEQ ID NO: 1554763 - RNA, 19 nt, Artificial Sequence
  Description of Artificial Sequence: Synthetic oligonucleotide
  Antisense strand to SEQ ID NO: 1554762
cuuuauauaaacuuucccu

SEQ ID NO: 1554764 - RNA, 19 nt, Artificial Sequence
  Description of Artificial Sequence: Synthetic oligonucleotide
  Sense strand starting at position 3065 of SEQ ID NO: 1245332
aguguuacccaacguuaau

SEQ ID NO: 1554765 - RNA, 19 nt, Artificial Sequence
  Description of Artificial Sequence: Synthetic oligonucleotide
  Antisense strand to SEQ ID NO: 1554764
auuaacguuggguaacacu

SEQ ID NO: 1554766 - RNA, 19 nt, Artificial Sequence
  Description of Artificial Sequence: Synthetic oligonucleotide
  Sense strand starting at position 3433 of SEQ ID NO: 1245332
ucaagaaugucauugauua

SEQ ID NO: 1554767 - RNA, 19 nt, Artificial Sequence
  Description of Artificial Sequence: Synthetic oligonucleotide
  Antisense strand to SEQ ID NO: 1554766
uaaucaaugacauucuuga

SEQ ID NO: 1554768 - RNA, 19 nt, Artificial Sequence
  Description of Artificial Sequence: Synthetic oligonucleotide
  Sense strand starting at position 3437 of SEQ ID NO: 1245332
gaaugucauugauuaaaug

SEQ ID NO: 1554769 - RNA, 19 nt, Artificial Sequence
  Description of Artificial Sequence: Synthetic oligonucleotide
  Antisense strand to SEQ ID NO: 1554768
cauuuaaucaaugacauuc

SEQ ID NO: 1554770 - RNA, 19 nt, Artificial Sequence
  Description of Artificial Sequence: Synthetic oligonucleotide
  Sense strand starting at position 3447 of SEQ ID NO: 1245332
gauuaaaugcauuguuugu

SEQ ID NO: 1554771 - RNA, 19 nt, Artificial Sequence
  Description of Artificial Sequence: Synthetic oligonucleotide
  Antisense strand to SEQ ID NO: 1554770
acaaacaaugcauuuaauc

SEQ ID NO: 1554772 - RNA, 19 nt, Artificial Sequence
  Description of Artificial Sequence: Synthetic oligonucleotide
  Sense strand starting at position 3457 of SEQ ID NO: 1245332
auuguuuguuaggcuuuau

SEQ ID NO: 1554773 - RNA, 19 nt, Artificial Sequence
  Description of Artificial Sequence: Synthetic oligonucleotide
  Antisense strand to SEQ ID NO: 1554772
auaaagccuaacaaacaau

SEQ ID NO: 1554774 - RNA, 19 nt, Artificial Sequence
  Description of Artificial Sequence: Synthetic oligonucleotide
  Sense strand starting at position 3468 of SEQ ID NO: 1245332
ggcuuuauacuggaaaccu

SEQ ID NO: 1554775 - RNA, 19 nt, Artificial Sequence
  Description of Artificial Sequence: Synthetic oligonucleotide
  Antisense strand to SEQ ID NO: 1554774
agguuuccaguauaaagcc

SEQ ID NO: 1554776 - RNA, 19 nt, Artificial Sequence
  Description of Artificial Sequence: Synthetic oligonucleotide
  Sense strand starting at position 3496 of SEQ ID NO: 1245332
uugugaauaagcuggacau

SEQ ID NO: 1554777 - RNA, 19 nt, Artificial Sequence
  Description of Artificial Sequence: Synthetic oligonucleotide
  Antisense strand to SEQ ID NO: 1554776
auguccagcuuauucacaa

SEQ ID NO: 1554778 - RNA, 19 nt, Artificial Sequence
  Description of Artificial Sequence: Synthetic oligonucleotide
  Sense strand starting at position 3648 of SEQ ID NO: 1245332
uuacaugaguuagugugaa

SEQ ID NO: 1554779 - RNA, 19 nt, Artificial Sequence
  Description of Artificial Sequence: Synthetic oligonucleotide
  Antisense strand to SEQ ID NO: 1554778
uucacacuaacucauguaa

SEQ ID NO: 1554780 - RNA, 19 nt, Artificial Sequence
  Description of Artificial Sequence: Synthetic oligonucleotide
  Sense strand starting at position 3736 of SEQ ID NO: 1245332
aagaaaguuuaugcugcua

SEQ ID NO: 1554781 - RNA, 19 nt, Artificial Sequence
  Description of Artificial Sequence: Synthetic oligonucleotide
  Antisense strand to SEQ ID NO: 1554780
uagcagcauaaacuuucuu

SEQ ID NO: 1554782 - RNA, 19 nt, Artificial Sequence
  Description of Artificial Sequence: Synthetic oligonucleotide
  Sense strand starting at position 3821 of SEQ ID NO: 1245332
ucugguauagcuggacuua

SEQ ID NO: 1554783 - RNA, 19 nt, Artificial Sequence
  Description of Artificial Sequence: Synthetic oligonucleotide
  Antisense strand to SEQ ID NO: 1554782
uaaguccagcuauaccaga

SEQ ID NO: 1554784 - RNA, 19 nt, Artificial Sequence
  Description of Artificial Sequence: Synthetic oligonucleotide
  Sense strand starting at position 3822 of SEQ ID NO: 1245332
cugguauagcuggacuuaa

SEQ ID NO: 1554785 - RNA, 19 nt, Artificial Sequence
  Description of Artificial Sequence: Synthetic oligonucleotide
  Antisense strand to SEQ ID NO: 1554784
uuaaguccagcuauaccag

SEQ ID NO: 1554786 - RNA, 19 nt, Artificial Sequence
  Description of Artificial Sequence: Synthetic oligonucleotide
  Sense strand starting at position 3864 of SEQ ID NO: 1245332
cugucaaauuuggaaacca

SEQ ID NO: 1554787 - RNA, 19 nt, Artificial Sequence
  Description of Artificial Sequence: Synthetic oligonucleotide
  Antisense strand to SEQ ID NO: 1554786
ugguuuccaaauuugacag

SEQ ID NO: 1554788 - RNA, 19 nt, Artificial Sequence
  Description of Artificial Sequence: Synthetic oligonucleotide
  Sense strand starting at position 3963 of SEQ ID NO: 1245332
aguacuuaguagcuaagaa

SEQ ID NO: 1554789 - RNA, 19 nt, Artificial Sequence
  Description of Artificial Sequence: Synthetic oligonucleotide
  Antisense strand to SEQ ID NO: 1554788
uucuuagcuacuaaguacu

SEQ ID NO: 1554790 - RNA, 19 nt, Artificial Sequence
  Description of Artificial Sequence: Synthetic oligonucleotide
  Sense strand starting at position 139 of SEQ ID NO: 1245333
agccgagguagccauuaaa

SEQ ID NO: 1554791 - RNA, 19 nt, Artificial Sequence
  Description of Artificial Sequence: Synthetic oligonucleotide
  Antisense strand to SEQ ID NO: 1554790
uuuaauggcuaccucggcu

SEQ ID NO: 1554792 - RNA, 19 nt, Artificial Sequence
  Description of Artificial Sequence: Synthetic oligonucleotide
  Sense strand starting at position 142 of SEQ ID NO: 1245333
cgagguagccauuaaagug

SEQ ID NO: 1554793 - RNA, 19 nt, Artificial Sequence
  Description of Artificial Sequence: Synthetic oligonucleotide
  Antisense strand to SEQ ID NO: 1554792
cacuuuaauggcuaccucg

SEQ ID NO: 1554794 - RNA, 19 nt, Artificial Sequence
  Description of Artificial Sequence: Synthetic oligonucleotide
  Sense strand starting at position 879 of SEQ ID NO: 1245333
gcagaaaucccggaaagcu

SEQ ID NO: 1554795 - RNA, 19 nt, Artificial Sequence
  Description of Artificial Sequence: Synthetic oligonucleotide
  Antisense strand to SEQ ID NO: 1554794
agcuuuccgggauuucugc

SEQ ID NO: 1554796 - RNA, 19 nt, Artificial Sequence
  Description of Artificial Sequence: Synthetic oligonucleotide
  Sense strand starting at position 1225 of SEQ ID NO: 1245333
gaggaagaauacgagaaau

SEQ ID NO: 1554797 - RNA, 19 nt, Artificial Sequence
  Description of Artificial Sequence: Synthetic oligonucleotide
  Antisense strand to SEQ ID NO: 1554796
auuucucguauucuuccuc

SEQ ID NO: 1554798 - RNA, 19 nt, Artificial Sequence
  Description of Artificial Sequence: Synthetic oligonucleotide
  Sense strand starting at position 1346 of SEQ ID NO: 1245333
gcaguuaucuggcccaaag

SEQ ID NO: 1554799 - RNA, 19 nt, Artificial Sequence
  Description of Artificial Sequence: Synthetic oligonucleotide
  Antisense strand to SEQ ID NO: 1554798
cuuugggccagauaacugc

SEQ ID NO: 1554800 - RNA, 19 nt, Artificial Sequence
  Description of Artificial Sequence: Synthetic oligonucleotide
  Sense strand starting at position 1348 of SEQ ID NO: 1245333
aguuaucuggcccaaagag

SEQ ID NO: 1554801 - RNA, 19 nt, Artificial Sequence
  Description of Artificial Sequence: Synthetic oligonucleotide
  Antisense strand to SEQ ID NO: 1554800
cucuuugggccagauaacu

SEQ ID NO: 1554802 - RNA, 19 nt, Artificial Sequence
  Description of Artificial Sequence: Synthetic oligonucleotide
  Sense strand starting at position 2040 of SEQ ID NO: 1245333
aauguuacaguucgaucua

SEQ ID NO: 1554803 - RNA, 19 nt, Artificial Sequence
  Description of Artificial Sequence: Synthetic oligonucleotide
  Antisense strand to SEQ ID NO: 1554802
uagaucgaacuguaacauu

SEQ ID NO: 1554804 - RNA, 19 nt, Artificial Sequence
  Description of Artificial Sequence: Synthetic oligonucleotide
  Sense strand starting at position 2065 of SEQ ID NO: 1245333
ggauuuaauuaaugaacuc

SEQ ID NO: 1554805 - RNA, 19 nt, Artificial Sequence
  Description of Artificial Sequence: Synthetic oligonucleotide
  Antisense strand to SEQ ID NO: 1554804
gaguucauuaauuaaaucc

SEQ ID NO: 1554806 - RNA, 19 nt, Artificial Sequence
  Description of Artificial Sequence: Synthetic oligonucleotide
  Sense strand starting at position 2309 of SEQ ID NO: 1245333
uuugcuguccuggagggua

SEQ ID NO: 1554807 - RNA, 19 nt, Artificial Sequence
  Description of Artificial Sequence: Synthetic oligonucleotide
  Antisense strand to SEQ ID NO: 1554806
uacccuccaggacagcaaa

SEQ ID NO: 1554808 - RNA, 19 nt, Artificial Sequence
  Description of Artificial Sequence: Synthetic oligonucleotide
  Sense strand starting at position 2311 of SEQ ID NO: 1245333
ugcuguccuggaggguaaa

SEQ ID NO: 1554809 - RNA, 19 nt, Artificial Sequence
  Description of Artificial Sequence: Synthetic oligonucleotide
  Antisense strand to SEQ ID NO: 1554808
uuuacccuccaggacagca

SEQ ID NO: 1554810 - RNA, 19 nt, Artificial Sequence
  Description of Artificial Sequence: Synthetic oligonucleotide
  Sense strand starting at position 2506 of SEQ ID NO: 1245333
cuuggaauuugccagaaug

SEQ ID NO: 1554811 - RNA, 19 nt, Artificial Sequence
  Description of Artificial Sequence: Synthetic oligonucleotide
  Antisense strand to SEQ ID NO: 1554810
cauucuggcaaauuccaag

SEQ ID NO: 1554812 - RNA, 19 nt, Artificial Sequence
  Description of Artificial Sequence: Synthetic oligonucleotide
  Sense strand starting at position 2577 of SEQ ID NO: 1245333
guggguagugccuagcaaa

SEQ ID NO: 1554813 - RNA, 19 nt, Artificial Sequence
  Description of Artificial Sequence: Synthetic oligonucleotide
  Antisense strand to SEQ ID NO: 1554812
uuugcuaggcacuacccac

SEQ ID NO: 1554814 - RNA, 19 nt, Artificial Sequence
  Description of Artificial Sequence: Synthetic oligonucleotide
  Sense strand starting at position 2645 of SEQ ID NO: 1245333
ccgucuuccaguggaugga

SEQ ID NO: 1554815 - RNA, 19 nt, Artificial Sequence
  Description of Artificial Sequence: Synthetic oligonucleotide
  Antisense strand to SEQ ID NO: 1554814
uccauccacuggaagacgg

SEQ ID NO: 1554816 - RNA, 19 nt, Artificial Sequence
  Description of Artificial Sequence: Synthetic oligonucleotide
  Sense strand starting at position 2682 of SEQ ID NO: 1245333
cuugacugggccuguugaa

SEQ ID NO: 1554817 - RNA, 19 nt, Artificial Sequence
  Description of Artificial Sequence: Synthetic oligonucleotide
  Antisense strand to SEQ ID NO: 1554816
uucaacaggcccagucaag

SEQ ID NO: 1554818 - RNA, 19 nt, Artificial Sequence
  Description of Artificial Sequence: Synthetic oligonucleotide
  Sense strand starting at position 2697 of SEQ ID NO: 1245333
ugaagucagcccugguuua

SEQ ID NO: 1554819 - RNA, 19 nt, Artificial Sequence
  Description of Artificial Sequence: Synthetic oligonucleotide
  Antisense strand to SEQ ID NO: 1554818
uaaaccagggcugacuuca

SEQ ID NO: 1554820 - RNA, 19 nt, Artificial Sequence
  Description of Artificial Sequence: Synthetic oligonucleotide
  Sense strand starting at position 2698 of SEQ ID NO: 1245333
gaagucagcccugguuuaa

SEQ ID NO: 1554821 - RNA, 19 nt, Artificial Sequence
  Description of Artificial Sequence: Synthetic oligonucleotide
  Antisense strand to SEQ ID NO: 1554820
uuaaaccagggcugacuuc

SEQ ID NO: 1554822 - RNA, 19 nt, Artificial Sequence
  Description of Artificial Sequence: Synthetic oligonucleotide
  Sense strand starting at position 2851 of SEQ ID NO: 1245333
agaggcugccucugagagu

SEQ ID NO: 1554823 - RNA, 19 nt, Artificial Sequence
  Description of Artificial Sequence: Synthetic oligonucleotide
  Antisense strand to SEQ ID NO: 1554822
acucucagaggcagccucu

SEQ ID NO: 1554824 - RNA, 19 nt, Artificial Sequence
  Description of Artificial Sequence: Synthetic oligonucleotide
  Sense strand starting at position 2891 of SEQ ID NO: 1245333
uuugcauugcuugaccuua

SEQ ID NO: 1554825 - RNA, 19 nt, Artificial Sequence
  Description of Artificial Sequence: Synthetic oligonucleotide
  Antisense strand to SEQ ID NO: 1554824
uaaggucaagcaaugcaaa

SEQ ID NO: 1554826 - RNA, 19 nt, Artificial Sequence
  Description of Artificial Sequence: Synthetic oligonucleotide
  Sense strand starting at position 2893 of SEQ ID NO: 1245333
ugcauugcuugaccuuaaa

SEQ ID NO: 1554827 - RNA, 19 nt, Artificial Sequence
  Description of Artificial Sequence: Synthetic oligonucleotide
  Antisense strand to SEQ ID NO: 1554826
uuuaaggucaagcaaugca

SEQ ID NO: 1554828 - RNA, 19 nt, Artificial Sequence
  Description of Artificial Sequence: Synthetic oligonucleotide
  Sense strand starting at position 2931 of SEQ ID NO: 1245333
guguuucuuguauauccau

SEQ ID NO: 1554829 - RNA, 19 nt, Artificial Sequence
  Description of Artificial Sequence: Synthetic oligonucleotide
  Antisense strand to SEQ ID NO: 1554828
auggauauacaagaaacac

SEQ ID NO: 1554830 - RNA, 19 nt, Artificial Sequence
  Description of Artificial Sequence: Synthetic oligonucleotide
  Sense strand starting at position 2997 of SEQ ID NO: 1245333
gggaaacuagcauguuucu

SEQ ID NO: 1554831 - RNA, 19 nt, Artificial Sequence
  Description of Artificial Sequence: Synthetic oligonucleotide
  Antisense strand to SEQ ID NO: 1554830
agaaacaugcuaguuuccc

SEQ ID NO: 1554832 - RNA, 19 nt, Artificial Sequence
  Description of Artificial Sequence: Synthetic oligonucleotide
  Sense strand starting at position 3120 of SEQ ID NO: 1245333
gggugagaaauuggcguuu

SEQ ID NO: 1554833 - RNA, 19 nt, Artificial Sequence
  Description of Artificial Sequence: Synthetic oligonucleotide
  Antisense strand to SEQ ID NO: 1554832
aaacgccaauuucucaccc

SEQ ID NO: 1554834 - RNA, 19 nt, Artificial Sequence
  Description of Artificial Sequence: Synthetic oligonucleotide
  Sense strand starting at position 3155 of SEQ ID NO: 1245333
aguugagauucuuccaaga

SEQ ID NO: 1554835 - RNA, 19 nt, Artificial Sequence
  Description of Artificial Sequence: Synthetic oligonucleotide
  Antisense strand to SEQ ID NO: 1554834
ucuuggaagaaucucaacu

SEQ ID NO: 1554836 - RNA, 19 nt, Artificial Sequence
  Description of Artificial Sequence: Synthetic oligonucleotide
  Sense strand starting at position 3175 of SEQ ID NO: 1245333
gguuaugacuucuuucucu

SEQ ID NO: 1554837 - RNA, 19 nt, Artificial Sequence
  Description of Artificial Sequence: Synthetic oligonucleotide
  Antisense strand to SEQ ID NO: 1554836
agagaaagaagucauaacc

SEQ ID NO: 1554838 - RNA, 19 nt, Artificial Sequence
  Description of Artificial Sequence: Synthetic oligonucleotide
  Sense strand starting at position 3195 of SEQ ID NO: 1245333
cugaacuucuugccuugua

SEQ ID NO: 1554839 - RNA, 19 nt, Artificial Sequence
  Description of Artificial Sequence: Synthetic oligonucleotide
  Antisense strand to SEQ ID NO: 1554838
uacaaggcaagaaguucag

SEQ ID NO: 1554840 - RNA, 19 nt, Artificial Sequence
  Description of Artificial Sequence: Synthetic oligonucleotide
  Sense strand starting at position 3230 of SEQ ID NO: 1245333
auguuauuaucugucugga

SEQ ID NO: 1554841 - RNA, 19 nt, Artificial Sequence
  Description of Artificial Sequence: Synthetic oligonucleotide
  Antisense strand to SEQ ID NO: 1554840
uccagacagauaauaacau

SEQ ID NO: 1554842 - RNA, 19 nt, Artificial Sequence
  Description of Artificial Sequence: Synthetic oligonucleotide
  Sense strand starting at position 3249 of SEQ ID NO: 1245333
ggcuguaaauuccuugaag

SEQ ID NO: 1554843 - RNA, 19 nt, Artificial Sequence
  Description of Artificial Sequence: Synthetic oligonucleotide
  Antisense strand to SEQ ID NO: 1554842
cuucaaggaauuuacagcc

SEQ ID NO: 1554844 - RNA, 19 nt, Artificial Sequence
  Description of Artificial Sequence: Synthetic oligonucleotide
  Sense strand starting at position 3250 of SEQ ID NO: 1245333
gcuguaaauuccuugaagg

SEQ ID NO: 1554845 - RNA, 19 nt, Artificial Sequence
  Description of Artificial Sequence: Synthetic oligonucleotide
  Antisense strand to SEQ ID NO: 1554844
ccuucaaggaauuuacagc

SEQ ID NO: 1554846 - RNA, 19 nt, Artificial Sequence
  Description of Artificial Sequence: Synthetic oligonucleotide
  Sense strand starting at position 3268 of SEQ ID NO: 1245333
gggugagcuccuggauugu

SEQ ID NO: 1554847 - RNA, 19 nt, Artificial Sequence
  Description of Artificial Sequence: Synthetic oligonucleotide
  Antisense strand to SEQ ID NO: 1554846
acaauccaggagcucaccc

SEQ ID NO: 1554848 - RNA, 19 nt, Artificial Sequence
  Description of Artificial Sequence: Synthetic oligonucleotide
  Sense strand starting at position 3337 of SEQ ID NO: 1245333
acaugucaugcuugcuaaa

SEQ ID NO: 1554849 - RNA, 19 nt, Artificial Sequence
  Description of Artificial Sequence: Synthetic oligonucleotide
  Antisense strand to SEQ ID NO: 1554848
uuuagcaagcaugacaugu

SEQ ID NO: 1554850 - RNA, 19 nt, Artificial Sequence
  Description of Artificial Sequence: Synthetic oligonucleotide
  Sense strand starting at position 3347 of SEQ ID NO: 1245333
cuugcuaaauguuugaaga

SEQ ID NO: 1554851 - RNA, 19 nt, Artificial Sequence
  Description of Artificial Sequence: Synthetic oligonucleotide
  Antisense strand to SEQ ID NO: 1554850
ucuucaaacauuuagcaag

SEQ ID NO: 1554852 - RNA, 19 nt, Artificial Sequence
  Description of Artificial Sequence: Synthetic oligonucleotide
  Sense strand starting at position 3348 of SEQ ID NO: 1245333
uugcuaaauguuugaagac

SEQ ID NO: 1554853 - RNA, 19 nt, Artificial Sequence
  Description of Artificial Sequence: Synthetic oligonucleotide
  Antisense strand to SEQ ID NO: 1554852
gucuucaaacauuuagcaa

SEQ ID NO: 1554854 - RNA, 19 nt, Artificial Sequence
  Description of Artificial Sequence: Synthetic oligonucleotide
  Sense strand starting at position 3384 of SEQ ID NO: 1245333
gaaacauaucugugugguu

SEQ ID NO: 1554855 - RNA, 19 nt, Artificial Sequence
  Description of Artificial Sequence: Synthetic oligonucleotide
  Antisense strand to SEQ ID NO: 1554854
aaccacacagauauguuuc

SEQ ID NO: 1554856 - RNA, 19 nt, Artificial Sequence
  Description of Artificial Sequence: Synthetic oligonucleotide
  Sense strand starting at position 3426 of SEQ ID NO: 1245333
uccuauuuguuuccaguga

SEQ ID NO: 1554857 - RNA, 19 nt, Artificial Sequence
  Description of Artificial Sequence: Synthetic oligonucleotide
  Antisense strand to SEQ ID NO: 1554856
ucacuggaaacaaauagga

SEQ ID NO: 1554858 - RNA, 19 nt, Artificial Sequence
  Description of Artificial Sequence: Synthetic oligonucleotide
  Sense strand starting at position 3572 of SEQ ID NO: 1245333
cuugcaugccuggauauga

SEQ ID NO: 1554859 - RNA, 19 nt, Artificial Sequence
  Description of Artificial Sequence: Synthetic oligonucleotide
  Antisense strand to SEQ ID NO: 1554858
ucauauccaggcaugcaag

SEQ ID NO: 1554860 - RNA, 19 nt, Artificial Sequence
  Description of Artificial Sequence: Synthetic oligonucleotide
  Sense strand starting at position 3634 of SEQ ID NO: 1245333
augauuguaugaguaaggu

SEQ ID NO: 1554861 - RNA, 19 nt, Artificial Sequence
  Description of Artificial Sequence: Synthetic oligonucleotide
  Antisense strand to SEQ ID NO: 1554860
accuuacucauacaaucau

SEQ ID NO: 1554862 - RNA, 19 nt, Artificial Sequence
  Description of Artificial Sequence: Synthetic oligonucleotide
  Sense strand starting at position 3667 of SEQ ID NO: 1245333
ggaguaagaucuuaagaga

SEQ ID NO: 1554863 - RNA, 19 nt, Artificial Sequence
  Description of Artificial Sequence: Synthetic oligonucleotide
  Antisense strand to SEQ ID NO: 1554862
ucucuuaagaucuuacucc

SEQ ID NO: 1554864 - RNA, 19 nt, Artificial Sequence
  Description of Artificial Sequence: Synthetic oligonucleotide
  Sense strand starting at position 3813 of SEQ ID NO: 1245333
aagcauacucuggguauua

SEQ ID NO: 1554865 - RNA, 19 nt, Artificial Sequence
  Description of Artificial Sequence: Synthetic oligonucleotide
  Antisense strand to SEQ ID NO: 1554864
uaauacccagaguaugcuu

SEQ ID NO: 1554866 - RNA, 19 nt, Artificial Sequence
  Description of Artificial Sequence: Synthetic oligonucleotide
  Sense strand starting at position 3814 of SEQ ID NO: 1245333
agcauacucuggguauuau

SEQ ID NO: 1554867 - RNA, 19 nt, Artificial Sequence
  Description of Artificial Sequence: Synthetic oligonucleotide
  Antisense strand to SEQ ID NO: 1554866
auaauacccagaguaugcu

SEQ ID NO: 1554868 - RNA, 19 nt, Artificial Sequence
  Description of Artificial Sequence: Synthetic oligonucleotide
  Sense strand starting at position 3815 of SEQ ID NO: 1245333
gcauacucuggguauuauc

SEQ ID NO: 1554869 - RNA, 19 nt, Artificial Sequence
  Description of Artificial Sequence: Synthetic oligonucleotide
  Antisense strand to SEQ ID NO: 1554868
gauaauacccagaguaugc

SEQ ID NO: 1554870 - RNA, 19 nt, Artificial Sequence
  Description of Artificial Sequence: Synthetic oligonucleotide
  Sense strand starting at position 40 of SEQ ID NO: 1245334
agaacaaggugccucauua

SEQ ID NO: 1554871 - RNA, 19 nt, Artificial Sequence
  Description of Artificial Sequence: Synthetic oligonucleotide
  Antisense strand to SEQ ID NO: 1554870
uaaugaggcaccuuguucu

SEQ ID NO: 1554872 - RNA, 19 nt, Artificial Sequence
  Description of Artificial Sequence: Synthetic oligonucleotide
  Sense strand starting at position 181 of SEQ ID NO: 1245334
gcacccauaccugauguau

SEQ ID NO: 1554873 - RNA, 19 nt, Artificial Sequence
  Description of Artificial Sequence: Synthetic oligonucleotide
  Antisense strand to SEQ ID NO: 1554872
auacaucagguaugggugc

SEQ ID NO: 1554874 - RNA, 19 nt, Artificial Sequence
  Description of Artificial Sequence: Synthetic oligonucleotide
  Sense strand starting at position 260 of SEQ ID NO: 1245334
gugggaugcuuacuuagcu

SEQ ID NO: 1554875 - RNA, 19 nt, Artificial Sequence
  Description of Artificial Sequence: Synthetic oligonucleotide
  Antisense strand to SEQ ID NO: 1554874
agcuaaguaagcaucccac

SEQ ID NO: 1554876 - RNA, 19 nt, Artificial Sequence
  Description of Artificial Sequence: Synthetic oligonucleotide
  Sense strand starting at position 261 of SEQ ID NO: 1245334
ugggaugcuuacuuagcua

SEQ ID NO: 1554877 - RNA, 19 nt, Artificial Sequence
  Description of Artificial Sequence: Synthetic oligonucleotide
  Antisense strand to SEQ ID NO: 1554876
uagcuaaguaagcauccca

SEQ ID NO: 1554878 - RNA, 19 nt, Artificial Sequence
  Description of Artificial Sequence: Synthetic oligonucleotide
  Sense strand starting at position 265 of SEQ ID NO: 1245334
augcuuacuuagcuagaga

SEQ ID NO: 1554879 - RNA, 19 nt, Artificial Sequence
  Description of Artificial Sequence: Synthetic oligonucleotide
  Antisense strand to SEQ ID NO: 1554878
ucucuagcuaaguaagcau

SEQ ID NO: 1554880 - RNA, 19 nt, Artificial Sequence
  Description of Artificial Sequence: Synthetic oligonucleotide
  Sense strand starting at position 266 of SEQ ID NO: 1245334
ugcuuacuuagcuagagag

SEQ ID NO: 1554881 - RNA, 19 nt, Artificial Sequence
  Description of Artificial Sequence: Synthetic oligonucleotide
  Antisense strand to SEQ ID NO: 1554880
cucucuagcuaaguaagca

SEQ ID NO: 1554882 - RNA, 19 nt, Artificial Sequence
  Description of Artificial Sequence: Synthetic oligonucleotide
  Sense strand starting at position 393 of SEQ ID NO: 1245334
ggcucugauauggguguau

SEQ ID NO: 1554883 - RNA, 19 nt, Artificial Sequence
  Description of Artificial Sequence: Synthetic oligonucleotide
  Antisense strand to SEQ ID NO: 1554882
auacacccauaucagagcc

SEQ ID NO: 1554884 - RNA, 19 nt, Artificial Sequence
  Description of Artificial Sequence: Synthetic oligonucleotide
  Sense strand starting at position 397 of SEQ ID NO: 1245334
cugauauggguguauccua

SEQ ID NO: 1554885 - RNA, 19 nt, Artificial Sequence
  Description of Artificial Sequence: Synthetic oligonucleotide
  Antisense strand to SEQ ID NO: 1554884
uaggauacacccauaucag

SEQ ID NO: 1554886 - RNA, 19 nt, Artificial Sequence
  Description of Artificial Sequence: Synthetic oligonucleotide
  Sense strand starting at position 404 of SEQ ID NO: 1245334
ggguguauccuagagcaag

SEQ ID NO: 1554887 - RNA, 19 nt, Artificial Sequence
  Description of Artificial Sequence: Synthetic oligonucleotide
  Antisense strand to SEQ ID NO: 1554886
cuugcucuaggauacaccc

SEQ ID NO: 1554888 - RNA, 19 nt, Artificial Sequence
  Description of Artificial Sequence: Synthetic oligonucleotide
  Sense strand starting at position 512 of SEQ ID NO: 1245334
aguguaucuucugcaaaua

SEQ ID NO: 1554889 - RNA, 19 nt, Artificial Sequence
  Description of Artificial Sequence: Synthetic oligonucleotide
  Antisense strand to SEQ ID NO: 1554888
uauuugcagaagauacacu

SEQ ID NO: 1554890 - RNA, 19 nt, Artificial Sequence
  Description of Artificial Sequence: Synthetic oligonucleotide
  Sense strand starting at position 513 of SEQ ID NO: 1245334
guguaucuucugcaaauag

SEQ ID NO: 1554891 - RNA, 19 nt, Artificial Sequence
  Description of Artificial Sequence: Synthetic oligonucleotide
  Antisense strand to SEQ ID NO: 1554890
cuauuugcagaagauacac

SEQ ID NO: 1554892 - RNA, 19 nt, Artificial Sequence
  Description of Artificial Sequence: Synthetic oligonucleotide
  Sense strand starting at position 539 of SEQ ID NO: 1245334
gaggcugugcccgaauuga

SEQ ID NO: 1554893 - RNA, 19 nt, Artificial Sequence
  Description of Artificial Sequence: Synthetic oligonucleotide
  Antisense strand to SEQ ID NO: 1554892
ucaauucgggcacagccuc

SEQ ID NO: 1554894 - RNA, 19 nt, Artificial Sequence
  Description of Artificial Sequence: Synthetic oligonucleotide
  Sense strand starting at position 552 of SEQ ID NO: 1245334
aauugaauuucugagugac

SEQ ID NO: 1554895 - RNA, 19 nt, Artificial Sequence
  Description of Artificial Sequence: Synthetic oligonucleotide
  Antisense strand to SEQ ID NO: 1554894
gucacucagaaauucaauu

SEQ ID NO: 1554896 - RNA, 19 nt, Artificial Sequence
  Description of Artificial Sequence: Synthetic oligonucleotide
  Sense strand starting at position 581 of SEQ ID NO: 1245334
gcucuuucucuuggaguuu

SEQ ID NO: 1554897 - RNA, 19 nt, Artificial Sequence
  Description of Artificial Sequence: Synthetic oligonucleotide
  Antisense strand to SEQ ID NO: 1554896
aaacuccaagagaaagagc

SEQ ID NO: 1554898 - RNA, 19 nt, Artificial Sequence
  Description of Artificial Sequence: Synthetic oligonucleotide
  Sense strand starting at position 593 of SEQ ID NO: 1245334
ggaguuuaaccguggauug

SEQ ID NO: 1554899 - RNA, 19 nt, Artificial Sequence
  Description of Artificial Sequence: Synthetic oligonucleotide
  Antisense strand to SEQ ID NO: 1554898
caauccacgguuaaacucc

SEQ ID NO: 1554900 - RNA, 19 nt, Artificial Sequence
  Description of Artificial Sequence: Synthetic oligonucleotide
  Sense strand starting at position 669 of SEQ ID NO: 1245334
uugcgcuaaggaugagaaa

SEQ ID NO: 1554901 - RNA, 19 nt, Artificial Sequence
  Description of Artificial Sequence: Synthetic oligonucleotide
  Antisense strand to SEQ ID NO: 1554900
uuucucauccuuagcgcaa

SEQ ID NO: 1554902 - RNA, 19 nt, Artificial Sequence
  Description of Artificial Sequence: Synthetic oligonucleotide
  Sense strand starting at position 849 of SEQ ID NO: 1245334
ucccaaggguccuuacgaa

SEQ ID NO: 1554903 - RNA, 19 nt, Artificial Sequence
  Description of Artificial Sequence: Synthetic oligonucleotide
  Antisense strand to SEQ ID NO: 1554902
uucguaaggacccuuggga

SEQ ID NO: 1554904 - RNA, 19 nt, Artificial Sequence
  Description of Artificial Sequence: Synthetic oligonucleotide
  Sense strand starting at position 871 of SEQ ID NO: 1245334
ucaggacucgcgagguuau

SEQ ID NO: 1554905 - RNA, 19 nt, Artificial Sequence
  Description of Artificial Sequence: Synthetic oligonucleotide
  Antisense strand to SEQ ID NO: 1554904
auaaccucgcgaguccuga

SEQ ID NO: 1554906 - RNA, 19 nt, Artificial Sequence
  Description of Artificial Sequence: Synthetic oligonucleotide
  Sense strand starting at position 872 of SEQ ID NO: 1245334
caggacucgcgagguuaua

SEQ ID NO: 1554907 - RNA, 19 nt, Artificial Sequence
  Description of Artificial Sequence: Synthetic oligonucleotide
  Antisense strand to SEQ ID NO: 1554906
uauaaccucgcgaguccug

SEQ ID NO: 1554908 - RNA, 19 nt, Artificial Sequence
  Description of Artificial Sequence: Synthetic oligonucleotide
  Sense strand starting at position 1003 of SEQ ID NO: 1245334
ggucucuccggguauuaaa

SEQ ID NO: 1554909 - RNA, 19 nt, Artificial Sequence
  Description of Artificial Sequence: Synthetic oligonucleotide
  Antisense strand to SEQ ID NO: 1554908
uuuaauacccggagagacc

SEQ ID NO: 1554910 - RNA, 19 nt, Artificial Sequence
  Description of Artificial Sequence: Synthetic oligonucleotide
  Sense strand starting at position 1021 of SEQ ID NO: 1245334
auggauuuaucgucagccu

SEQ ID NO: 1554911 - RNA, 19 nt, Artificial Sequence
  Description of Artificial Sequence: Synthetic oligonucleotide
  Antisense strand to SEQ ID NO: 1554910
aggcugacgauaaauccau

SEQ ID NO: 1554912 - RNA, 19 nt, Artificial Sequence
  Description of Artificial Sequence: Synthetic oligonucleotide
  Sense strand starting at position 1024 of SEQ ID NO: 1245334
gauuuaucgucagccuggu

SEQ ID NO: 1554913 - RNA, 19 nt, Artificial Sequence
  Description of Artificial Sequence: Synthetic oligonucleotide
  Antisense strand to SEQ ID NO: 1554912
accaggcugacgauaaauc

SEQ ID NO: 1554914 - RNA, 19 nt, Artificial Sequence
  Description of Artificial Sequence: Synthetic oligonucleotide
  Sense strand starting at position 1940 of SEQ ID NO: 1245334
gcaagggaucgcgaagguu

SEQ ID NO: 1554915 - RNA, 19 nt, Artificial Sequence
  Description of Artificial Sequence: Synthetic oligonucleotide
  Antisense strand to SEQ ID NO: 1554914
aaccuucgcgaucccuugc

SEQ ID NO: 1554916 - RNA, 19 nt, Artificial Sequence
  Description of Artificial Sequence: Synthetic oligonucleotide
  Sense strand starting at position 2733 of SEQ ID NO: 1245334
cccuguugucaccgagaca

SEQ ID NO: 1554917 - RNA, 19 nt, Artificial Sequence
  Description of Artificial Sequence: Synthetic oligonucleotide
  Antisense strand to SEQ ID NO: 1554916
ugucucggugacaacaggg

SEQ ID NO: 1554918 - RNA, 19 nt, Artificial Sequence
  Description of Artificial Sequence: Synthetic oligonucleotide
  Sense strand starting at position 2734 of SEQ ID NO: 1245334
ccuguugucaccgagacac

SEQ ID NO: 1554919 - RNA, 19 nt, Artificial Sequence
  Description of Artificial Sequence: Synthetic oligonucleotide
  Antisense strand to SEQ ID NO: 1554918
gugucucggugacaacagg

SEQ ID NO: 1554920 - RNA, 19 nt, Artificial Sequence
  Description of Artificial Sequence: Synthetic oligonucleotide
  Sense strand starting at position 2761 of SEQ ID NO: 1245334
ugucucauccuuggaacca

SEQ ID NO: 1554921 - RNA, 19 nt, Artificial Sequence
  Description of Artificial Sequence: Synthetic oligonucleotide
  Antisense strand to SEQ ID NO: 1554920
ugguuccaaggaugagaca

SEQ ID NO: 1554922 - RNA, 19 nt, Artificial Sequence
  Description of Artificial Sequence: Synthetic oligonucleotide
  Sense strand starting at position 2893 of SEQ ID NO: 1245334
ggagaauaaucacagaaac

SEQ ID NO: 1554923 - RNA, 19 nt, Artificial Sequence
  Description of Artificial Sequence: Synthetic oligonucleotide
  Antisense strand to SEQ ID NO: 1554922
guuucugugauuauucucc

SEQ ID NO: 1554924 - RNA, 19 nt, Artificial Sequence
  Description of Artificial Sequence: Synthetic oligonucleotide
  Sense strand starting at position 2935 of SEQ ID NO: 1245334
agaaauucuuagccugaaa

SEQ ID NO: 1554925 - RNA, 19 nt, Artificial Sequence
  Description of Artificial Sequence: Synthetic oligonucleotide
  Antisense strand to SEQ ID NO: 1554924
uuucaggcuaagaauuucu

SEQ ID NO: 1554926 - RNA, 19 nt, Artificial Sequence
  Description of Artificial Sequence: Synthetic oligonucleotide
  Sense strand starting at position 3227 of SEQ ID NO: 1245334
aguaguuucuucuuugaac

SEQ ID NO: 1554927 - RNA, 19 nt, Artificial Sequence
  Description of Artificial Sequence: Synthetic oligonucleotide
  Antisense strand to SEQ ID NO: 1554926
guucaaagaagaaacuacu

SEQ ID NO: 1554928 - RNA, 19 nt, Artificial Sequence
  Description of Artificial Sequence: Synthetic oligonucleotide
  Sense strand starting at position 3291 of SEQ ID NO: 1245334
caccaagaauucgggauuu

SEQ ID NO: 1554929 - RNA, 19 nt, Artificial Sequence
  Description of Artificial Sequence: Synthetic oligonucleotide
  Antisense strand to SEQ ID NO: 1554928
aaaucccgaauucuuggug

SEQ ID NO: 1554930 - RNA, 19 nt, Artificial Sequence
  Description of Artificial Sequence: Synthetic oligonucleotide
  Sense strand starting at position 3302 of SEQ ID NO: 1245334
cgggauuuguguuaauuca

SEQ ID NO: 1554931 - RNA, 19 nt, Artificial Sequence
  Description of Artificial Sequence: Synthetic oligonucleotide
  Antisense strand to SEQ ID NO: 1554930
ugaauuaacacaaaucccg

SEQ ID NO: 1554932 - RNA, 19 nt, Artificial Sequence
  Description of Artificial Sequence: Synthetic oligonucleotide
  Sense strand starting at position 3338 of SEQ ID NO: 1245334
cugugcuauccaugaagag

SEQ ID NO: 1554933 - RNA, 19 nt, Artificial Sequence
  Description of Artificial Sequence: Synthetic oligonucleotide
  Antisense strand to SEQ ID NO: 1554932
cucuucauggauagcacag

SEQ ID NO: 1554934 - RNA, 19 nt, Artificial Sequence
  Description of Artificial Sequence: Synthetic oligonucleotide
  Sense strand starting at position 3339 of SEQ ID NO: 1245334
ugugcuauccaugaagagu

SEQ ID NO: 1554935 - RNA, 19 nt, Artificial Sequence
  Description of Artificial Sequence: Synthetic oligonucleotide
  Antisense strand to SEQ ID NO: 1554934
acucuucauggauagcaca

SEQ ID NO: 1554936 - RNA, 19 nt, Artificial Sequence
  Description of Artificial Sequence: Synthetic oligonucleotide
  Sense strand starting at position 3348 of SEQ ID NO: 1245334
caugaagaguuucuguauu

SEQ ID NO: 1554937 - RNA, 19 nt, Artificial Sequence
  Description of Artificial Sequence: Synthetic oligonucleotide
  Antisense strand to SEQ ID NO: 1554936
aauacagaaacucuucaug

SEQ ID NO: 1554938 - RNA, 19 nt, Artificial Sequence
  Description of Artificial Sequence: Synthetic oligonucleotide
  Sense strand starting at position 3360 of SEQ ID NO: 1245334
cuguauuucucugcaaggu

SEQ ID NO: 1554939 - RNA, 19 nt, Artificial Sequence
  Description of Artificial Sequence: Synthetic oligonucleotide
  Antisense strand to SEQ ID NO: 1554938
accuugcagagaaauacag

SEQ ID NO: 1554940 - RNA, 19 nt, Artificial Sequence
  Description of Artificial Sequence: Synthetic oligonucleotide
  Sense strand starting at position 3894 of SEQ ID NO: 1245334
gcaacagaugcccaaagua

SEQ ID NO: 1554941 - RNA, 19 nt, Artificial Sequence
  Description of Artificial Sequence: Synthetic oligonucleotide
  Antisense strand to SEQ ID NO: 1554940
uacuuugggcaucuguugc

SEQ ID NO: 1554942 - RNA, 19 nt, Artificial Sequence
  Description of Artificial Sequence: Synthetic oligonucleotide
  Sense strand starting at position 3922 of SEQ ID NO: 1245334
gcaacaagucuugggauuc

SEQ ID NO: 1554943 - RNA, 19 nt, Artificial Sequence
  Description of Artificial Sequence: Synthetic oligonucleotide
  Antisense strand to SEQ ID NO: 1554942
gaaucccaagacuuguugc

SEQ ID NO: 1554944 - RNA, 19 nt, Artificial Sequence
  Description of Artificial Sequence: Synthetic oligonucleotide
  Sense strand starting at position 3932 of SEQ ID NO: 1245334
uugggauucugagaugagg

SEQ ID NO: 1554945 - RNA, 19 nt, Artificial Sequence
  Description of Artificial Sequence: Synthetic oligonucleotide
  Antisense strand to SEQ ID NO: 1554944
ccucaucucagaaucccaa

SEQ ID NO: 1554946 - RNA, 19 nt, Artificial Sequence
  Description of Artificial Sequence: Synthetic oligonucleotide
  Sense strand starting at position 3934 of SEQ ID NO: 1245334
gggauucugagaugagguu

SEQ ID NO: 1554947 - RNA, 19 nt, Artificial Sequence
  Description of Artificial Sequence: Synthetic oligonucleotide
  Antisense strand to SEQ ID NO: 1554946
aaccucaucucagaauccc

SEQ ID NO: 1554948 - RNA, 19 nt, Artificial Sequence
  Description of Artificial Sequence: Synthetic oligonucleotide
  Sense strand starting at position 3946 of SEQ ID NO: 1245334
ugagguucuuucucccaca

SEQ ID NO: 1554949 - RNA, 19 nt, Artificial Sequence
  Description of Artificial Sequence: Synthetic oligonucleotide
  Antisense strand to SEQ ID NO: 1554948
ugugggagaaagaaccuca

SEQ ID NO: 1554950 - RNA, 19 nt, Artificial Sequence
  Description of Artificial Sequence: Synthetic oligonucleotide
  Sense strand starting at position 27 of SEQ ID NO: 1245335
agcuaaguuaugggauaau

SEQ ID NO: 1554951 - RNA, 19 nt, Artificial Sequence
  Description of Artificial Sequence: Synthetic oligonucleotide
  Antisense strand to SEQ ID NO: 1554950
auuaucccauaacuuagcu

SEQ ID NO: 1554952 - RNA, 19 nt, Artificial Sequence
  Description of Artificial Sequence: Synthetic oligonucleotide
  Sense strand starting at position 45 of SEQ ID NO: 1245335
uuuguugugcaccaauaaa

SEQ ID NO: 1554953 - RNA, 19 nt, Artificial Sequence
  Description of Artificial Sequence: Synthetic oligonucleotide
  Antisense strand to SEQ ID NO: 1554952
uuuauuggugcacaacaaa

SEQ ID NO: 1554954 - RNA, 19 nt, Artificial Sequence
  Description of Artificial Sequence: Synthetic oligonucleotide
  Sense strand starting at position 167 of SEQ ID NO: 1245335
ccaguaaagcuuuagaaca

SEQ ID NO: 1554955 - RNA, 19 nt, Artificial Sequence
  Description of Artificial Sequence: Synthetic oligonucleotide
  Antisense strand to SEQ ID NO: 1554954
uguucuaaagcuuuacugg

SEQ ID NO: 1554956 - RNA, 19 nt, Artificial Sequence
  Description of Artificial Sequence: Synthetic oligonucleotide
  Sense strand starting at position 208 of SEQ ID NO: 1245335
gcucuaggcauuuguauag

SEQ ID NO: 1554957 - RNA, 19 nt, Artificial Sequence
  Description of Artificial Sequence: Synthetic oligonucleotide
  Antisense strand to SEQ ID NO: 1554956
cuauacaaaugccuagagc

SEQ ID NO: 1554958 - RNA, 19 nt, Artificial Sequence
  Description of Artificial Sequence: Synthetic oligonucleotide
  Sense strand starting at position 313 of SEQ ID NO: 1245335
acuggucugaucuguaaga

SEQ ID NO: 1554959 - RNA, 19 nt, Artificial Sequence
  Description of Artificial Sequence: Synthetic oligonucleotide
  Antisense strand to SEQ ID NO: 1554958
ucuuacagaucagaccagu

SEQ ID NO: 1554960 - RNA, 19 nt, Artificial Sequence
  Description of Artificial Sequence: Synthetic oligonucleotide
  Sense strand starting at position 315 of SEQ ID NO: 1245335
uggucugaucuguaagaua

SEQ ID NO: 1554961 - RNA, 19 nt, Artificial Sequence
  Description of Artificial Sequence: Synthetic oligonucleotide
  Antisense strand to SEQ ID NO: 1554960
uaucuuacagaucagacca

SEQ ID NO: 1554962 - RNA, 19 nt, Artificial Sequence
  Description of Artificial Sequence: Synthetic oligonucleotide
  Sense strand starting at position 372 of SEQ ID NO: 1245335
guaccuaggcuugaccaua

SEQ ID NO: 1554963 - RNA, 19 nt, Artificial Sequence
  Description of Artificial Sequence: Synthetic oligonucleotide
  Antisense strand to SEQ ID NO: 1554962
uauggucaagccuagguac

SEQ ID NO: 1554964 - RNA, 19 nt, Artificial Sequence
  Description of Artificial Sequence: Synthetic oligonucleotide
  Sense strand starting at position 472 of SEQ ID NO: 1245335
uguuaaagugagugggaga

SEQ ID NO: 1554965 - RNA, 19 nt, Artificial Sequence
  Description of Artificial Sequence: Synthetic oligonucleotide
  Antisense strand to SEQ ID NO: 1554964
ucucccacucacuuuaaca

SEQ ID NO: 1554966 - RNA, 19 nt, Artificial Sequence
  Description of Artificial Sequence: Synthetic oligonucleotide
  Sense strand starting at position 473 of SEQ ID NO: 1245335
guuaaagugagugggagaa

SEQ ID NO: 1554967 - RNA, 19 nt, Artificial Sequence
  Description of Artificial Sequence: Synthetic oligonucleotide
  Antisense strand to SEQ ID NO: 1554966
uucucccacucacuuuaac

SEQ ID NO: 1554968 - RNA, 19 nt, Artificial Sequence
  Description of Artificial Sequence: Synthetic oligonucleotide
  Sense strand starting at position 657 of SEQ ID NO: 1245335
auguacuaucaugagcaau

SEQ ID NO: 1554969 - RNA, 19 nt, Artificial Sequence
  Description of Artificial Sequence: Synthetic oligonucleotide
  Antisense strand to SEQ ID NO: 1554968
auugcucaugauaguacau

SEQ ID NO: 1554970 - RNA, 19 nt, Artificial Sequence
  Description of Artificial Sequence: Synthetic oligonucleotide
  Sense strand starting at position 659 of SEQ ID NO: 1245335
guacuaucaugagcaauaa

SEQ ID NO: 1554971 - RNA, 19 nt, Artificial Sequence
  Description of Artificial Sequence: Synthetic oligonucleotide
  Antisense strand to SEQ ID NO: 1554970
uuauugcucaugauaguac

SEQ ID NO: 1554972 - RNA, 19 nt, Artificial Sequence
  Description of Artificial Sequence: Synthetic oligonucleotide
  Sense strand starting at position 1171 of SEQ ID NO: 1245335
auauuacuguuagcaagaa

SEQ ID NO: 1554973 - RNA, 19 nt, Artificial Sequence
  Description of Artificial Sequence: Synthetic oligonucleotide
  Antisense strand to SEQ ID NO: 1554972
uucuugcuaacaguaauau

SEQ ID NO: 1554974 - RNA, 19 nt, Artificial Sequence
  Description of Artificial Sequence: Synthetic oligonucleotide
  Sense strand starting at position 1244 of SEQ ID NO: 1245335
gugaauuaguaauuagaag

SEQ ID NO: 1554975 - RNA, 19 nt, Artificial Sequence
  Description of Artificial Sequence: Synthetic oligonucleotide
  Antisense strand to SEQ ID NO: 1554974
cuucuaauuacuaauucac

SEQ ID NO: 1554976 - RNA, 19 nt, Artificial Sequence
  Description of Artificial Sequence: Synthetic oligonucleotide
  Sense strand starting at position 1272 of SEQ ID NO: 1245335
aucugauugucaucagauu

SEQ ID NO: 1554977 - RNA, 19 nt, Artificial Sequence
  Description of Artificial Sequence: Synthetic oligonucleotide
  Antisense strand to SEQ ID NO: 1554976
aaucugaugacaaucagau

SEQ ID NO: 1554978 - RNA, 19 nt, Artificial Sequence
  Description of Artificial Sequence: Synthetic oligonucleotide
  Sense strand starting at position 1338 of SEQ ID NO: 1245335
ucacauuucugccuaguga

SEQ ID NO: 1554979 - RNA, 19 nt, Artificial Sequence
  Description of Artificial Sequence: Synthetic oligonucleotide
  Antisense strand to SEQ ID NO: 1554978
ucacuaggcagaaauguga

SEQ ID NO: 1554980 - RNA, 19 nt, Artificial Sequence
  Description of Artificial Sequence: Synthetic oligonucleotide
  Sense strand starting at position 1476 of SEQ ID NO: 1245335
cucacagauuuccauggaa

SEQ ID NO: 1554981 - RNA, 19 nt, Artificial Sequence
  Description of Artificial Sequence: Synthetic oligonucleotide
  Antisense strand to SEQ ID NO: 1554980
uuccauggaaaucugugag

SEQ ID NO: 1554982 - RNA, 19 nt, Artificial Sequence
  Description of Artificial Sequence: Synthetic oligonucleotide
  Sense strand starting at position 1499 of SEQ ID NO: 1245335
cuagaagccuuacuggaaa

SEQ ID NO: 1554983 - RNA, 19 nt, Artificial Sequence
  Description of Artificial Sequence: Synthetic oligonucleotide
  Antisense strand to SEQ ID NO: 1554982
uuuccaguaaggcuucuag

SEQ ID NO: 1554984 - RNA, 19 nt, Artificial Sequence
  Description of Artificial Sequence: Synthetic oligonucleotide
  Sense strand starting at position 1562 of SEQ ID NO: 1245335
agcugucaaaugcaggaaa

SEQ ID NO: 1554985 - RNA, 19 nt, Artificial Sequence
  Description of Artificial Sequence: Synthetic oligonucleotide
  Antisense strand to SEQ ID NO: 1554984
uuuccugcauuugacagcu

SEQ ID NO: 1554986 - RNA, 19 nt, Artificial Sequence
  Description of Artificial Sequence: Synthetic oligonucleotide
  Sense strand starting at position 1986 of SEQ ID NO: 1245335
ugccuugaaguccaucuau

SEQ ID NO: 1554987 - RNA, 19 nt, Artificial Sequence
  Description of Artificial Sequence: Synthetic oligonucleotide
  Antisense strand to SEQ ID NO: 1554986
auagauggacuucaaggca

SEQ ID NO: 1554988 - RNA, 19 nt, Artificial Sequence
  Description of Artificial Sequence: Synthetic oligonucleotide
  Sense strand starting at position 2178 of SEQ ID NO: 1245335
gaaacugugguauagugga

SEQ ID NO: 1554989 - RNA, 19 nt, Artificial Sequence
  Description of Artificial Sequence: Synthetic oligonucleotide
  Antisense strand to SEQ ID NO: 1554988
uccacuauaccacaguuuc

SEQ ID NO: 1554990 - RNA, 19 nt, Artificial Sequence
  Description of Artificial Sequence: Synthetic oligonucleotide
  Sense strand starting at position 2214 of SEQ ID NO: 1245335
aucagaaaccugggucaua

SEQ ID NO: 1554991 - RNA, 19 nt, Artificial Sequence
  Description of Artificial Sequence: Synthetic oligonucleotide
  Antisense strand to SEQ ID NO: 1554990
uaugacccagguuucugau

SEQ ID NO: 1554992 - RNA, 19 nt, Artificial Sequence
  Description of Artificial Sequence: Synthetic oligonucleotide
  Sense strand starting at position 2215 of SEQ ID NO: 1245335
ucagaaaccugggucauau

SEQ ID NO: 1554993 - RNA, 19 nt, Artificial Sequence
  Description of Artificial Sequence: Synthetic oligonucleotide
  Antisense strand to SEQ ID NO: 1554992
auaugacccagguuucuga

SEQ ID NO: 1554994 - RNA, 19 nt, Artificial Sequence
  Description of Artificial Sequence: Synthetic oligonucleotide
  Sense strand starting at position 2256 of SEQ ID NO: 1245335
ugaagcauguuacuuaaua

SEQ ID NO: 1554995 - RNA, 19 nt, Artificial Sequence
  Description of Artificial Sequence: Synthetic oligonucleotide
  Antisense strand to SEQ ID NO: 1554994
uauuaaguaacaugcuuca

SEQ ID NO: 1554996 - RNA, 19 nt, Artificial Sequence
  Description of Artificial Sequence: Synthetic oligonucleotide
  Sense strand starting at position 2308 of SEQ ID NO: 1245335
aggauaauauaugucuugu

SEQ ID NO: 1554997 - RNA, 19 nt, Artificial Sequence
  Description of Artificial Sequence: Synthetic oligonucleotide
  Antisense strand to SEQ ID NO: 1554996
acaagacauauauuauccu

SEQ ID NO: 1554998 - RNA, 19 nt, Artificial Sequence
  Description of Artificial Sequence: Synthetic oligonucleotide
  Sense strand starting at position 2310 of SEQ ID NO: 1245335
gauaauauaugucuuguag

SEQ ID NO: 1554999 - RNA, 19 nt, Artificial Sequence
  Description of Artificial Sequence: Synthetic oligonucleotide
  Antisense strand to SEQ ID NO: 1554998
cuacaagacauauauuauc

SEQ ID NO: 1555000 - RNA, 19 nt, Artificial Sequence
  Description of Artificial Sequence: Synthetic oligonucleotide
  Sense strand starting at position 2316 of SEQ ID NO: 1245335
auaugucuuguagaauuag

SEQ ID NO: 1555001 - RNA, 19 nt, Artificial Sequence
  Description of Artificial Sequence: Synthetic oligonucleotide
  Antisense strand to SEQ ID NO: 1555000
cuaauucuacaagacauau

SEQ ID NO: 1555002 - RNA, 19 nt, Artificial Sequence
  Description of Artificial Sequence: Synthetic oligonucleotide
  Sense strand starting at position 2326 of SEQ ID NO: 1245335
uagaauuagcgugaggauu

SEQ ID NO: 1555003 - RNA, 19 nt, Artificial Sequence
  Description of Artificial Sequence: Synthetic oligonucleotide
  Antisense strand to SEQ ID NO: 1555002
aauccucacgcuaauucua

SEQ ID NO: 1555004 - RNA, 19 nt, Artificial Sequence
  Description of Artificial Sequence: Synthetic oligonucleotide
  Sense strand starting at position 2332 of SEQ ID NO: 1245335
uagcgugaggauuagauga

SEQ ID NO: 1555005 - RNA, 19 nt, Artificial Sequence
  Description of Artificial Sequence: Synthetic oligonucleotide
  Antisense strand to SEQ ID NO: 1555004
ucaucuaauccucacgcua

SEQ ID NO: 1555006 - RNA, 19 nt, Artificial Sequence
  Description of Artificial Sequence: Synthetic oligonucleotide
  Sense strand starting at position 2347 of SEQ ID NO: 1245335
augagaugauaugcuuaag

SEQ ID NO: 1555007 - RNA, 19 nt, Artificial Sequence
  Description of Artificial Sequence: Synthetic oligonucleotide
  Antisense strand to SEQ ID NO: 1555006
cuuaagcauaucaucucau

SEQ ID NO: 1555008 - RNA, 19 nt, Artificial Sequence
  Description of Artificial Sequence: Synthetic oligonucleotide
  Sense strand starting at position 2350 of SEQ ID NO: 1245335
agaugauaugcuuaagguu

SEQ ID NO: 1555009 - RNA, 19 nt, Artificial Sequence
  Description of Artificial Sequence: Synthetic oligonucleotide
  Antisense strand to SEQ ID NO: 1555008
aaccuuaagcauaucaucu

SEQ ID NO: 1555010 - RNA, 19 nt, Artificial Sequence
  Description of Artificial Sequence: Synthetic oligonucleotide
  Sense strand starting at position 2470 of SEQ ID NO: 1245335
uuauguguucuugaggauu

SEQ ID NO: 1555011 - RNA, 19 nt, Artificial Sequence
  Description of Artificial Sequence: Synthetic oligonucleotide
  Antisense strand to SEQ ID NO: 1555010
aauccucaagaacacauaa

SEQ ID NO: 1555012 - RNA, 19 nt, Artificial Sequence
  Description of Artificial Sequence: Synthetic oligonucleotide
  Sense strand starting at position 2473 of SEQ ID NO: 1245335
uguguucuugaggauuauu

SEQ ID NO: 1555013 - RNA, 19 nt, Artificial Sequence
  Description of Artificial Sequence: Synthetic oligonucleotide
  Antisense strand to SEQ ID NO: 1555012
aauaauccucaagaacaca

SEQ ID NO: 1555014 - RNA, 19 nt, Artificial Sequence
  Description of Artificial Sequence: Synthetic oligonucleotide
  Sense strand starting at position 2588 of SEQ ID NO: 1245335
auuugaucuccuggcuguu

SEQ ID NO: 1555015 - RNA, 19 nt, Artificial Sequence
  Description of Artificial Sequence: Synthetic oligonucleotide
  Antisense strand to SEQ ID NO: 1555014
aacagccaggagaucaaau

SEQ ID NO: 1555016 - RNA, 19 nt, Artificial Sequence
  Description of Artificial Sequence: Synthetic oligonucleotide
  Sense strand starting at position 3210 of SEQ ID NO: 1245335
gaaugaguuccggaagcug

SEQ ID NO: 1555017 - RNA, 19 nt, Artificial Sequence
  Description of Artificial Sequence: Synthetic oligonucleotide
  Antisense strand to SEQ ID NO: 1555016
cagcuuccggaacucauuc

SEQ ID NO: 1555018 - RNA, 19 nt, Artificial Sequence
  Description of Artificial Sequence: Synthetic oligonucleotide
  Sense strand starting at position 3426 of SEQ ID NO: 1245335
uuauaaggauuaguugagu

SEQ ID NO: 1555019 - RNA, 19 nt, Artificial Sequence
  Description of Artificial Sequence: Synthetic oligonucleotide
  Antisense strand to SEQ ID NO: 1555018
acucaacuaauccuuauaa

SEQ ID NO: 1555020 - RNA, 19 nt, Artificial Sequence
  Description of Artificial Sequence: Synthetic oligonucleotide
  Sense strand starting at position 3431 of SEQ ID NO: 1245335
aggauuaguugaguuaaua

SEQ ID NO: 1555021 - RNA, 19 nt, Artificial Sequence
  Description of Artificial Sequence: Synthetic oligonucleotide
  Antisense strand to SEQ ID NO: 1555020
uauuaacucaacuaauccu

SEQ ID NO: 1555022 - RNA, 19 nt, Artificial Sequence
  Description of Artificial Sequence: Synthetic oligonucleotide
  Sense strand starting at position 3678 of SEQ ID NO: 1245335
uuaauucuccagcaaggca

SEQ ID NO: 1555023 - RNA, 19 nt, Artificial Sequence
  Description of Artificial Sequence: Synthetic oligonucleotide
  Antisense strand to SEQ ID NO: 1555022
ugccuugcuggagaauuaa

SEQ ID NO: 1555024 - RNA, 19 nt, Artificial Sequence
  Description of Artificial Sequence: Synthetic oligonucleotide
  Sense strand starting at position 3835 of SEQ ID NO: 1245335
ucuccaaauccuuguggaa

SEQ ID NO: 1555025 - RNA, 19 nt, Artificial Sequence
  Description of Artificial Sequence: Synthetic oligonucleotide
  Antisense strand to SEQ ID NO: 1555024
uuccacaaggauuuggaga

SEQ ID NO: 1555026 - RNA, 19 nt, Artificial Sequence
  Description of Artificial Sequence: Synthetic oligonucleotide
  Sense strand starting at position 3847 of SEQ ID NO: 1245335
uguggaaaucuccauaucu

SEQ ID NO: 1555027 - RNA, 19 nt, Artificial Sequence
  Description of Artificial Sequence: Synthetic oligonucleotide
  Antisense strand to SEQ ID NO: 1555026
agauauggagauuuccaca

SEQ ID NO: 1555028 - RNA, 19 nt, Artificial Sequence
  Description of Artificial Sequence: Synthetic oligonucleotide
  Sense strand starting at position 3863 of SEQ ID NO: 1245335
ucucuuaaccugugaggaa

SEQ ID NO: 1555029 - RNA, 19 nt, Artificial Sequence
  Description of Artificial Sequence: Synthetic oligonucleotide
  Antisense strand to SEQ ID NO: 1555028
uuccucacagguuaagaga

SEQ ID NO: 1555030 - RNA, 19 nt, Artificial Sequence
  Description of Artificial Sequence: Synthetic oligonucleotide
  Sense strand starting at position 124 of SEQ ID NO: 1245336
uugacuucuccagguggaa

SEQ ID NO: 1555031 - RNA, 19 nt, Artificial Sequence
  Description of Artificial Sequence: Synthetic oligonucleotide
  Antisense strand to SEQ ID NO: 1555030
uuccaccuggagaagucaa

SEQ ID NO: 1555032 - RNA, 19 nt, Artificial Sequence
  Description of Artificial Sequence: Synthetic oligonucleotide
  Sense strand starting at position 164 of SEQ ID NO: 1245336
aguauaaagcaagagcuaa

SEQ ID NO: 1555033 - RNA, 19 nt, Artificial Sequence
  Description of Artificial Sequence: Synthetic oligonucleotide
  Antisense strand to SEQ ID NO: 1555032
uuagcucuugcuuuauacu

SEQ ID NO: 1555034 - RNA, 19 nt, Artificial Sequence
  Description of Artificial Sequence: Synthetic oligonucleotide
  Sense strand starting at position 177 of SEQ ID NO: 1245336
agcuaaagauaaucagcua

SEQ ID NO: 1555035 - RNA, 19 nt, Artificial Sequence
  Description of Artificial Sequence: Synthetic oligonucleotide
  Antisense strand to SEQ ID NO: 1555034
uagcugauuaucuuuagcu

SEQ ID NO: 1555036 - RNA, 19 nt, Artificial Sequence
  Description of Artificial Sequence: Synthetic oligonucleotide
  Sense strand starting at position 314 of SEQ ID NO: 1245336
gagagaguucuuuagccaa

SEQ ID NO: 1555037 - RNA, 19 nt, Artificial Sequence
  Description of Artificial Sequence: Synthetic oligonucleotide
  Antisense strand to SEQ ID NO: 1555036
uuggcuaaagaacucucuc

SEQ ID NO: 1555038 - RNA, 19 nt, Artificial Sequence
  Description of Artificial Sequence: Synthetic oligonucleotide
  Sense strand starting at position 316 of SEQ ID NO: 1245336
gagaguucuuuagccaaug

SEQ ID NO: 1555039 - RNA, 19 nt, Artificial Sequence
  Description of Artificial Sequence: Synthetic oligonucleotide
  Antisense strand to SEQ ID NO: 1555038
cauuggcuaaagaacucuc

SEQ ID NO: 1555040 - RNA, 19 nt, Artificial Sequence
  Description of Artificial Sequence: Synthetic oligonucleotide
  Sense strand starting at position 377 of SEQ ID NO: 1245336
acugauaguccaugcuaga

SEQ ID NO: 1555041 - RNA, 19 nt, Artificial Sequence
  Description of Artificial Sequence: Synthetic oligonucleotide
  Antisense strand to SEQ ID NO: 1555040
ucuagcauggacuaucagu

SEQ ID NO: 1555042 - RNA, 19 nt, Artificial Sequence
  Description of Artificial Sequence: Synthetic oligonucleotide
  Sense strand starting at position 556 of SEQ ID NO: 1245336
gucccuauugaauaguuau

SEQ ID NO: 1555043 - RNA, 19 nt, Artificial Sequence
  Description of Artificial Sequence: Synthetic oligonucleotide
  Antisense strand to SEQ ID NO: 1555042
auaacuauucaauagggac

SEQ ID NO: 1555044 - RNA, 19 nt, Artificial Sequence
  Description of Artificial Sequence: Synthetic oligonucleotide
  Sense strand starting at position 591 of SEQ ID NO: 1245336
uuucuauaacguggaaaca

SEQ ID NO: 1555045 - RNA, 19 nt, Artificial Sequence
  Description of Artificial Sequence: Synthetic oligonucleotide
  Antisense strand to SEQ ID NO: 1555044
uguuuccacguuauagaaa

SEQ ID NO: 1555046 - RNA, 19 nt, Artificial Sequence
  Description of Artificial Sequence: Synthetic oligonucleotide
  Sense strand starting at position 622 of SEQ ID NO: 1245336
cuauguauucucuacugau

SEQ ID NO: 1555047 - RNA, 19 nt, Artificial Sequence
  Description of Artificial Sequence: Synthetic oligonucleotide
  Antisense strand to SEQ ID NO: 1555046
aucaguagagaauacauag

SEQ ID NO: 1555048 - RNA, 19 nt, Artificial Sequence
  Description of Artificial Sequence: Synthetic oligonucleotide
  Sense strand starting at position 1372 of SEQ ID NO: 1245336
gguaaauucucccuaacag

SEQ ID NO: 1555049 - RNA, 19 nt, Artificial Sequence
  Description of Artificial Sequence: Synthetic oligonucleotide
  Antisense strand to SEQ ID NO: 1555048
cuguuagggagaauuuacc

SEQ ID NO: 1555050 - RNA, 19 nt, Artificial Sequence
  Description of Artificial Sequence: Synthetic oligonucleotide
  Sense strand starting at position 1559 of SEQ ID NO: 1245336
aaggaauaaccgcagucau

SEQ ID NO: 1555051 - RNA, 19 nt, Artificial Sequence
  Description of Artificial Sequence: Synthetic oligonucleotide
  Antisense strand to SEQ ID NO: 1555050
augacugcgguuauuccuu

SEQ ID NO: 1555052 - RNA, 19 nt, Artificial Sequence
  Description of Artificial Sequence: Synthetic oligonucleotide
  Sense strand starting at position 1614 of SEQ ID NO: 1245336
gguggugaucggagccauu

SEQ ID NO: 1555053 - RNA, 19 nt, Artificial Sequence
  Description of Artificial Sequence: Synthetic oligonucleotide
  Antisense strand to SEQ ID NO: 1555052
aauggcuccgaucaccacc

SEQ ID NO: 1555054 - RNA, 19 nt, Artificial Sequence
  Description of Artificial Sequence: Synthetic oligonucleotide
  Sense strand starting at position 1967 of SEQ ID NO: 1245336
cccuccucucuugaggauu

SEQ ID NO: 1555055 - RNA, 19 nt, Artificial Sequence
  Description of Artificial Sequence: Synthetic oligonucleotide
  Antisense strand to SEQ ID NO: 1555054
aauccucaagagaggaggg

SEQ ID NO: 1555056 - RNA, 19 nt, Artificial Sequence
  Description of Artificial Sequence: Synthetic oligonucleotide
  Sense strand starting at position 2079 of SEQ ID NO: 1245336
gaaacugaucccugucagu

SEQ ID NO: 1555057 - RNA, 19 nt, Artificial Sequence
  Description of Artificial Sequence: Synthetic oligonucleotide
  Antisense strand to SEQ ID NO: 1555056
acugacagggaucaguuuc

SEQ ID NO: 1555058 - RNA, 19 nt, Artificial Sequence
  Description of Artificial Sequence: Synthetic oligonucleotide
  Sense strand starting at position 2252 of SEQ ID NO: 1245336
auguuauaccuaugauacu

SEQ ID NO: 1555059 - RNA, 19 nt, Artificial Sequence
  Description of Artificial Sequence: Synthetic oligonucleotide
  Antisense strand to SEQ ID NO: 1555058
aguaucauagguauaacau

SEQ ID NO: 1555060 - RNA, 19 nt, Artificial Sequence
  Description of Artificial Sequence: Synthetic oligonucleotide
  Sense strand starting at position 2301 of SEQ ID NO: 1245336
ugaugcauuugauauaaga

SEQ ID NO: 1555061 - RNA, 19 nt, Artificial Sequence
  Description of Artificial Sequence: Synthetic oligonucleotide
  Antisense strand to SEQ ID NO: 1555060
ucuuauaucaaaugcauca

SEQ ID NO: 1555062 - RNA, 19 nt, Artificial Sequence
  Description of Artificial Sequence: Synthetic oligonucleotide
  Sense strand starting at position 2330 of SEQ ID NO: 1245336
aguauaauccuuuauguuc

SEQ ID NO: 1555063 - RNA, 19 nt, Artificial Sequence
  Description of Artificial Sequence: Synthetic oligonucleotide
  Antisense strand to SEQ ID NO: 1555062
gaacauaaaggauuauacu

SEQ ID NO: 1555064 - RNA, 19 nt, Artificial Sequence
  Description of Artificial Sequence: Synthetic oligonucleotide
  Sense strand starting at position 2375 of SEQ ID NO: 1245336
gcuggaacaguugaucuuu

SEQ ID NO: 1555065 - RNA, 19 nt, Artificial Sequence
  Description of Artificial Sequence: Synthetic oligonucleotide
  Antisense strand to SEQ ID NO: 1555064
aaagaucaacuguuccagc

SEQ ID NO: 1555066 - RNA, 19 nt, Artificial Sequence
  Description of Artificial Sequence: Synthetic oligonucleotide
  Sense strand starting at position 2463 of SEQ ID NO: 1245336
ggauaauuccuuggauauu

SEQ ID NO: 1555067 - RNA, 19 nt, Artificial Sequence
  Description of Artificial Sequence: Synthetic oligonucleotide
  Antisense strand to SEQ ID NO: 1555066
aauauccaaggaauuaucc

SEQ ID NO: 1555068 - RNA, 19 nt, Artificial Sequence
  Description of Artificial Sequence: Synthetic oligonucleotide
  Sense strand starting at position 2484 of SEQ ID NO: 1245336
gagucacucucaguuauga

SEQ ID NO: 1555069 - RNA, 19 nt, Artificial Sequence
  Description of Artificial Sequence: Synthetic oligonucleotide
  Antisense strand to SEQ ID NO: 1555068
ucauaacugagagugacuc

SEQ ID NO: 1555070 - RNA, 19 nt, Artificial Sequence
  Description of Artificial Sequence: Synthetic oligonucleotide
  Sense strand starting at position 2657 of SEQ ID NO: 1245336
aacugaugauauucucgga

SEQ ID NO: 1555071 - RNA, 19 nt, Artificial Sequence
  Description of Artificial Sequence: Synthetic oligonucleotide
  Antisense strand to SEQ ID NO: 1555070
uccgagaauaucaucaguu

SEQ ID NO: 1555072 - RNA, 19 nt, Artificial Sequence
  Description of Artificial Sequence: Synthetic oligonucleotide
  Sense strand starting at position 2661 of SEQ ID NO: 1245336
gaugauauucucggaggug

SEQ ID NO: 1555073 - RNA, 19 nt, Artificial Sequence
  Description of Artificial Sequence: Synthetic oligonucleotide
  Antisense strand to SEQ ID NO: 1555072
caccuccgagaauaucauc

SEQ ID NO: 1555074 - RNA, 19 nt, Artificial Sequence
  Description of Artificial Sequence: Synthetic oligonucleotide
  Sense strand starting at position 2664 of SEQ ID NO: 1245336
gauauucucggaggugaaa

SEQ ID NO: 1555075 - RNA, 19 nt, Artificial Sequence
  Description of Artificial Sequence: Synthetic oligonucleotide
  Antisense strand to SEQ ID NO: 1555074
uuucaccuccgagaauauc

SEQ ID NO: 1555076 - RNA, 19 nt, Artificial Sequence
  Description of Artificial Sequence: Synthetic oligonucleotide
  Sense strand starting at position 2802 of SEQ ID NO: 1245336
auuauugcucugcaaagaa

SEQ ID NO: 1555077 - RNA, 19 nt, Artificial Sequence
  Description of Artificial Sequence: Synthetic oligonucleotide
  Antisense strand to SEQ ID NO: 1555076
uucuuugcagagcaauaau

SEQ ID NO: 1555078 - RNA, 19 nt, Artificial Sequence
  Description of Artificial Sequence: Synthetic oligonucleotide
  Sense strand starting at position 2820 of SEQ ID NO: 1245336
auuucuuugcucuggaguu

SEQ ID NO: 1555079 - RNA, 19 nt, Artificial Sequence
  Description of Artificial Sequence: Synthetic oligonucleotide
  Antisense strand to SEQ ID NO: 1555078
aacuccagagcaaagaaau

SEQ ID NO: 1555080 - RNA, 19 nt, Artificial Sequence
  Description of Artificial Sequence: Synthetic oligonucleotide
  Sense strand starting at position 2973 of SEQ ID NO: 1245336
gggagaaauuggcuucagu

SEQ ID NO: 1555081 - RNA, 19 nt, Artificial Sequence
  Description of Artificial Sequence: Synthetic oligonucleotide
  Antisense strand to SEQ ID NO: 1555080
acugaagccaauuucuccc

SEQ ID NO: 1555082 - RNA, 19 nt, Artificial Sequence
  Description of Artificial Sequence: Synthetic oligonucleotide
  Sense strand starting at position 2989 of SEQ ID NO: 1245336
aguucuuugcaucauggaa

SEQ ID NO: 1555083 - RNA, 19 nt, Artificial Sequence
  Description of Artificial Sequence: Synthetic oligonucleotide
  Antisense strand to SEQ ID NO: 1555082
uuccaugaugcaaagaacu

SEQ ID NO: 1555084 - RNA, 19 nt, Artificial Sequence
  Description of Artificial Sequence: Synthetic oligonucleotide
  Sense strand starting at position 3236 of SEQ ID NO: 1245336
uaggguugucccuagaaac

SEQ ID NO: 1555085 - RNA, 19 nt, Artificial Sequence
  Description of Artificial Sequence: Synthetic oligonucleotide
  Antisense strand to SEQ ID NO: 1555084
guuucuagggacaacccua

SEQ ID NO: 1555086 - RNA, 19 nt, Artificial Sequence
  Description of Artificial Sequence: Synthetic oligonucleotide
  Sense strand starting at position 3312 of SEQ ID NO: 1245336
gaccaaauacaugguguga

SEQ ID NO: 1555087 - RNA, 19 nt, Artificial Sequence
  Description of Artificial Sequence: Synthetic oligonucleotide
  Antisense strand to SEQ ID NO: 1555086
ucacaccauguauuugguc

SEQ ID NO: 1555088 - RNA, 19 nt, Artificial Sequence
  Description of Artificial Sequence: Synthetic oligonucleotide
  Sense strand starting at position 3323 of SEQ ID NO: 1245336
uggugugauguuuacuaaa

SEQ ID NO: 1555089 - RNA, 19 nt, Artificial Sequence
  Description of Artificial Sequence: Synthetic oligonucleotide
  Antisense strand to SEQ ID NO: 1555088
uuuaguaaacaucacacca

SEQ ID NO: 1555090 - RNA, 19 nt, Artificial Sequence
  Description of Artificial Sequence: Synthetic oligonucleotide
  Sense strand starting at position 3376 of SEQ ID NO: 1245336
uguuuaagcucauuuguug

SEQ ID NO: 1555091 - RNA, 19 nt, Artificial Sequence
  Description of Artificial Sequence: Synthetic oligonucleotide
  Antisense strand to SEQ ID NO: 1555090
caacaaaugagcuuaaaca

SEQ ID NO: 1555092 - RNA, 19 nt, Artificial Sequence
  Description of Artificial Sequence: Synthetic oligonucleotide
  Sense strand starting at position 3379 of SEQ ID NO: 1245336
uuaagcucauuuguuguaa

SEQ ID NO: 1555093 - RNA, 19 nt, Artificial Sequence
  Description of Artificial Sequence: Synthetic oligonucleotide
  Antisense strand to SEQ ID NO: 1555092
uuacaacaaaugagcuuaa

SEQ ID NO: 1555094 - RNA, 19 nt, Artificial Sequence
  Description of Artificial Sequence: Synthetic oligonucleotide
  Sense strand starting at position 3398 of SEQ ID NO: 1245336
acauaaauaccuuaugugu

SEQ ID NO: 1555095 - RNA, 19 nt, Artificial Sequence
  Description of Artificial Sequence: Synthetic oligonucleotide
  Antisense strand to SEQ ID NO: 1555094
acacauaagguauuuaugu

SEQ ID NO: 1555096 - RNA, 19 nt, Artificial Sequence
  Description of Artificial Sequence: Synthetic oligonucleotide
  Sense strand starting at position 3472 of SEQ ID NO: 1245336
aucuguaaacuguacagau

SEQ ID NO: 1555097 - RNA, 19 nt, Artificial Sequence
  Description of Artificial Sequence: Synthetic oligonucleotide
  Antisense strand to SEQ ID NO: 1555096
aucuguacaguuuacagau

SEQ ID NO: 1555098 - RNA, 19 nt, Artificial Sequence
  Description of Artificial Sequence: Synthetic oligonucleotide
  Sense strand starting at position 3476 of SEQ ID NO: 1245336
guaaacuguacagauuguu

SEQ ID NO: 1555099 - RNA, 19 nt, Artificial Sequence
  Description of Artificial Sequence: Synthetic oligonucleotide
  Antisense strand to SEQ ID NO: 1555098
aacaaucuguacaguuuac

SEQ ID NO: 1555100 - RNA, 19 nt, Artificial Sequence
  Description of Artificial Sequence: Synthetic oligonucleotide
  Sense strand starting at position 3481 of SEQ ID NO: 1245336
cuguacagauuguuuaaac

SEQ ID NO: 1555101 - RNA, 19 nt, Artificial Sequence
  Description of Artificial Sequence: Synthetic oligonucleotide
  Antisense strand to SEQ ID NO: 1555100
guuuaaacaaucuguacag

SEQ ID NO: 1555102 - RNA, 19 nt, Artificial Sequence
  Description of Artificial Sequence: Synthetic oligonucleotide
  Sense strand starting at position 3482 of SEQ ID NO: 1245336
uguacagauuguuuaaacu

SEQ ID NO: 1555103 - RNA, 19 nt, Artificial Sequence
  Description of Artificial Sequence: Synthetic oligonucleotide
  Antisense strand to SEQ ID NO: 1555102
aguuuaaacaaucuguaca

SEQ ID NO: 1555104 - RNA, 19 nt, Artificial Sequence
  Description of Artificial Sequence: Synthetic oligonucleotide
  Sense strand starting at position 3531 of SEQ ID NO: 1245336
cugucugacaucugaggaa

SEQ ID NO: 1555105 - RNA, 19 nt, Artificial Sequence
  Description of Artificial Sequence: Synthetic oligonucleotide
  Antisense strand to SEQ ID NO: 1555104
uuccucagaugucagacag

SEQ ID NO: 1555106 - RNA, 19 nt, Artificial Sequence
  Description of Artificial Sequence: Synthetic oligonucleotide
  Sense strand starting at position 3566 of SEQ ID NO: 1245336
accucuugcccagagcuaa

SEQ ID NO: 1555107 - RNA, 19 nt, Artificial Sequence
  Description of Artificial Sequence: Synthetic oligonucleotide
  Antisense strand to SEQ ID NO: 1555106
uuagcucugggcaagaggu

SEQ ID NO: 1555108 - RNA, 19 nt, Artificial Sequence
  Description of Artificial Sequence: Synthetic oligonucleotide
  Sense strand starting at position 3586 of SEQ ID NO: 1245336
gcuauuguggacuaaguaa

SEQ ID NO: 1555109 - RNA, 19 nt, Artificial Sequence
  Description of Artificial Sequence: Synthetic oligonucleotide
  Antisense strand to SEQ ID NO: 1555108
uuacuuaguccacaauagc

SEQ ID NO: 1555110 - RNA, 19 nt, Artificial Sequence
  Description of Artificial Sequence: Synthetic oligonucleotide
  Sense strand starting at position 8 of SEQ ID NO: 1245337
aagugcuuagcaugauaag

SEQ ID NO: 1555111 - RNA, 19 nt, Artificial Sequence
  Description of Artificial Sequence: Synthetic oligonucleotide
  Antisense strand to SEQ ID NO: 1555110
cuuaucaugcuaagcacuu

SEQ ID NO: 1555112 - RNA, 19 nt, Artificial Sequence
  Description of Artificial Sequence: Synthetic oligonucleotide
  Sense strand starting at position 30 of SEQ ID NO: 1245337
ccaauccuccaguaaguga

SEQ ID NO: 1555113 - RNA, 19 nt, Artificial Sequence
  Description of Artificial Sequence: Synthetic oligonucleotide
  Antisense strand to SEQ ID NO: 1555112
ucacuuacuggaggauugg

SEQ ID NO: 1555114 - RNA, 19 nt, Artificial Sequence
  Description of Artificial Sequence: Synthetic oligonucleotide
  Sense strand starting at position 161 of SEQ ID NO: 1245337
gcaagauaucuuggcuuac

SEQ ID NO: 1555115 - RNA, 19 nt, Artificial Sequence
  Description of Artificial Sequence: Synthetic oligonucleotide
  Antisense strand to SEQ ID NO: 1555114
guaagccaagauaucuugc

SEQ ID NO: 1555116 - RNA, 19 nt, Artificial Sequence
  Description of Artificial Sequence: Synthetic oligonucleotide
  Sense strand starting at position 226 of SEQ ID NO: 1245337
cucagacaguucuuucuua

SEQ ID NO: 1555117 - RNA, 19 nt, Artificial Sequence
  Description of Artificial Sequence: Synthetic oligonucleotide
  Antisense strand to SEQ ID NO: 1555116
uaagaaagaacugucugag

SEQ ID NO: 1555118 - RNA, 19 nt, Artificial Sequence
  Description of Artificial Sequence: Synthetic oligonucleotide
  Sense strand starting at position 430 of SEQ ID NO: 1245337
guaacagugccuuaacaau

SEQ ID NO: 1555119 - RNA, 19 nt, Artificial Sequence
  Description of Artificial Sequence: Synthetic oligonucleotide
  Antisense strand to SEQ ID NO: 1555118
auuguuaaggcacuguuac

SEQ ID NO: 1555120 - RNA, 19 nt, Artificial Sequence
  Description of Artificial Sequence: Synthetic oligonucleotide
  Sense strand starting at position 509 of SEQ ID NO: 1245337
ccacaacguguaugacuaa

SEQ ID NO: 1555121 - RNA, 19 nt, Artificial Sequence
  Description of Artificial Sequence: Synthetic oligonucleotide
  Antisense strand to SEQ ID NO: 1555120
uuagucauacacguugugg

SEQ ID NO: 1555122 - RNA, 19 nt, Artificial Sequence
  Description of Artificial Sequence: Synthetic oligonucleotide
  Sense strand starting at position 512 of SEQ ID NO: 1245337
caacguguaugacuaacua

SEQ ID NO: 1555123 - RNA, 19 nt, Artificial Sequence
  Description of Artificial Sequence: Synthetic oligonucleotide
  Antisense strand to SEQ ID NO: 1555122
uaguuagucauacacguug

SEQ ID NO: 1555124 - RNA, 19 nt, Artificial Sequence
  Description of Artificial Sequence: Synthetic oligonucleotide
  Sense strand starting at position 824 of SEQ ID NO: 1245337
aacaguagcguugacacau

SEQ ID NO: 1555125 - RNA, 19 nt, Artificial Sequence
  Description of Artificial Sequence: Synthetic oligonucleotide
  Antisense strand to SEQ ID NO: 1555124
augugucaacgcuacuguu

SEQ ID NO: 1555126 - RNA, 19 nt, Artificial Sequence
  Description of Artificial Sequence: Synthetic oligonucleotide
  Sense strand starting at position 859 of SEQ ID NO: 1245337
guaacaauugcaugacuga

SEQ ID NO: 1555127 - RNA, 19 nt, Artificial Sequence
  Description of Artificial Sequence: Synthetic oligonucleotide
  Antisense strand to SEQ ID NO: 1555126
ucagucaugcaauuguuac

SEQ ID NO: 1555128 - RNA, 19 nt, Artificial Sequence
  Description of Artificial Sequence: Synthetic oligonucleotide
  Sense strand starting at position 872 of SEQ ID NO: 1245337
gacugaucuguuugucaac

SEQ ID NO: 1555129 - RNA, 19 nt, Artificial Sequence
  Description of Artificial Sequence: Synthetic oligonucleotide
  Antisense strand to SEQ ID NO: 1555128
guugacaaacagaucaguc

SEQ ID NO: 1555130 - RNA, 19 nt, Artificial Sequence
  Description of Artificial Sequence: Synthetic oligonucleotide
  Sense strand starting at position 873 of SEQ ID NO: 1245337
acugaucuguuugucaacu

SEQ ID NO: 1555131 - RNA, 19 nt, Artificial Sequence
  Description of Artificial Sequence: Synthetic oligonucleotide
  Antisense strand to SEQ ID NO: 1555130
aguugacaaacagaucagu

SEQ ID NO: 1555132 - RNA, 19 nt, Artificial Sequence
  Description of Artificial Sequence: Synthetic oligonucleotide
  Sense strand starting at position 913 of SEQ ID NO: 1245337
ggguucugcuaauugaaag

SEQ ID NO: 1555133 - RNA, 19 nt, Artificial Sequence
  Description of Artificial Sequence: Synthetic oligonucleotide
  Antisense strand to SEQ ID NO: 1555132
cuuucaauuagcagaaccc

SEQ ID NO: 1555134 - RNA, 19 nt, Artificial Sequence
  Description of Artificial Sequence: Synthetic oligonucleotide
  Sense strand starting at position 914 of SEQ ID NO: 1245337
gguucugcuaauugaaagu

SEQ ID NO: 1555135 - RNA, 19 nt, Artificial Sequence
  Description of Artificial Sequence: Synthetic oligonucleotide
  Antisense strand to SEQ ID NO: 1555134
acuuucaauuagcagaacc

SEQ ID NO: 1555136 - RNA, 19 nt, Artificial Sequence
  Description of Artificial Sequence: Synthetic oligonucleotide
  Sense strand starting at position 948 of SEQ ID NO: 1245337
uuuaaagauugugcaggaa

SEQ ID NO: 1555137 - RNA, 19 nt, Artificial Sequence
  Description of Artificial Sequence: Synthetic oligonucleotide
  Antisense strand to SEQ ID NO: 1555136
uuccugcacaaucuuuaaa

SEQ ID NO: 1555138 - RNA, 19 nt, Artificial Sequence
  Description of Artificial Sequence: Synthetic oligonucleotide
  Sense strand starting at position 1001 of SEQ ID NO: 1245337
aaccgauucugacuugguu

SEQ ID NO: 1555139 - RNA, 19 nt, Artificial Sequence
  Description of Artificial Sequence: Synthetic oligonucleotide
  Antisense strand to SEQ ID NO: 1555138
aaccaagucagaaucgguu

SEQ ID NO: 1555140 - RNA, 19 nt, Artificial Sequence
  Description of Artificial Sequence: Synthetic oligonucleotide
  Sense strand starting at position 1003 of SEQ ID NO: 1245337
ccgauucugacuugguuaa

SEQ ID NO: 1555141 - RNA, 19 nt, Artificial Sequence
  Description of Artificial Sequence: Synthetic oligonucleotide
  Antisense strand to SEQ ID NO: 1555140
uuaaccaagucagaaucgg

SEQ ID NO: 1555142 - RNA, 19 nt, Artificial Sequence
  Description of Artificial Sequence: Synthetic oligonucleotide
  Sense strand starting at position 1004 of SEQ ID NO: 1245337
cgauucugacuugguuaaa

SEQ ID NO: 1555143 - RNA, 19 nt, Artificial Sequence
  Description of Artificial Sequence: Synthetic oligonucleotide
  Antisense strand to SEQ ID NO: 1555142
uuuaaccaagucagaaucg

SEQ ID NO: 1555144 - RNA, 19 nt, Artificial Sequence
  Description of Artificial Sequence: Synthetic oligonucleotide
  Sense strand starting at position 1005 of SEQ ID NO: 1245337
gauucugacuugguuaaau

SEQ ID NO: 1555145 - RNA, 19 nt, Artificial Sequence
  Description of Artificial Sequence: Synthetic oligonucleotide
  Antisense strand to SEQ ID NO: 1555144
auuuaaccaagucagaauc

SEQ ID NO: 1555146 - RNA, 19 nt, Artificial Sequence
  Description of Artificial Sequence: Synthetic oligonucleotide
  Sense strand starting at position 1266 of SEQ ID NO: 1245337
auaaucuaagcguauggaa

SEQ ID NO: 1555147 - RNA, 19 nt, Artificial Sequence
  Description of Artificial Sequence: Synthetic oligonucleotide
  Antisense strand to SEQ ID NO: 1555146
uuccauacgcuuagauuau

SEQ ID NO: 1555148 - RNA, 19 nt, Artificial Sequence
  Description of Artificial Sequence: Synthetic oligonucleotide
  Sense strand starting at position 1268 of SEQ ID NO: 1245337
aaucuaagcguauggaaau

SEQ ID NO: 1555149 - RNA, 19 nt, Artificial Sequence
  Description of Artificial Sequence: Synthetic oligonucleotide
  Antisense strand to SEQ ID NO: 1555148
auuuccauacgcuuagauu

SEQ ID NO: 1555150 - RNA, 19 nt, Artificial Sequence
  Description of Artificial Sequence: Synthetic oligonucleotide
  Sense strand starting at position 1278 of SEQ ID NO: 1245337
uauggaaauccacgguaua

SEQ ID NO: 1555151 - RNA, 19 nt, Artificial Sequence
  Description of Artificial Sequence: Synthetic oligonucleotide
  Antisense strand to SEQ ID NO: 1555150
uauaccguggauuuccaua

SEQ ID NO: 1555152 - RNA, 19 nt, Artificial Sequence
  Description of Artificial Sequence: Synthetic oligonucleotide
  Sense strand starting at position 1279 of SEQ ID NO: 1245337
auggaaauccacgguauaa

SEQ ID NO: 1555153 - RNA, 19 nt, Artificial Sequence
  Description of Artificial Sequence: Synthetic oligonucleotide
  Antisense strand to SEQ ID NO: 1555152
uuauaccguggauuuccau

SEQ ID NO: 1555154 - RNA, 19 nt, Artificial Sequence
  Description of Artificial Sequence: Synthetic oligonucleotide
  Sense strand starting at position 1317 of SEQ ID NO: 1245337
ggaaauuaacuucggcuau

SEQ ID NO: 1555155 - RNA, 19 nt, Artificial Sequence
  Description of Artificial Sequence: Synthetic oligonucleotide
  Antisense strand to SEQ ID NO: 1555154
auagccgaaguuaauuucc

SEQ ID NO: 1555156 - RNA, 19 nt, Artificial Sequence
  Description of Artificial Sequence: Synthetic oligonucleotide
  Sense strand starting at position 1321 of SEQ ID NO: 1245337
auuaacuucggcuauauua

SEQ ID NO: 1555157 - RNA, 19 nt, Artificial Sequence
  Description of Artificial Sequence: Synthetic oligonucleotide
  Antisense strand to SEQ ID NO: 1555156
uaauauagccgaaguuaau

SEQ ID NO: 1555158 - RNA, 19 nt, Artificial Sequence
  Description of Artificial Sequence: Synthetic oligonucleotide
  Sense strand starting at position 1474 of SEQ ID NO: 1245337
auauguuaacuguaaaguc

SEQ ID NO: 1555159 - RNA, 19 nt, Artificial Sequence
  Description of Artificial Sequence: Synthetic oligonucleotide
  Antisense strand to SEQ ID NO: 1555158
gacuuuacaguuaacauau

SEQ ID NO: 1555160 - RNA, 19 nt, Artificial Sequence
  Description of Artificial Sequence: Synthetic oligonucleotide
  Sense strand starting at position 2710 of SEQ ID NO: 1245337
agacuaucuccaggauucu

SEQ ID NO: 1555161 - RNA, 19 nt, Artificial Sequence
  Description of Artificial Sequence: Synthetic oligonucleotide
  Antisense strand to SEQ ID NO: 1555160
agaauccuggagauagucu

SEQ ID NO: 1555162 - RNA, 19 nt, Artificial Sequence
  Description of Artificial Sequence: Synthetic oligonucleotide
  Sense strand starting at position 2751 of SEQ ID NO: 1245337
aggacugauuuccgagaag

SEQ ID NO: 1555163 - RNA, 19 nt, Artificial Sequence
  Description of Artificial Sequence: Synthetic oligonucleotide
  Antisense strand to SEQ ID NO: 1555162
cuucucggaaaucaguccu

SEQ ID NO: 1555164 - RNA, 19 nt, Artificial Sequence
  Description of Artificial Sequence: Synthetic oligonucleotide
  Sense strand starting at position 2763 of SEQ ID NO: 1245337
cgagaagagugacucaaua

SEQ ID NO: 1555165 - RNA, 19 nt, Artificial Sequence
  Description of Artificial Sequence: Synthetic oligonucleotide
  Antisense strand to SEQ ID NO: 1555164
uauugagucacucuucucg

SEQ ID NO: 1555166 - RNA, 19 nt, Artificial Sequence
  Description of Artificial Sequence: Synthetic oligonucleotide
  Sense strand starting at position 2847 of SEQ ID NO: 1245337
cgcaguuagaauugacauu

SEQ ID NO: 1555167 - RNA, 19 nt, Artificial Sequence
  Description of Artificial Sequence: Synthetic oligonucleotide
  Antisense strand to SEQ ID NO: 1555166
aaugucaauucuaacugcg

SEQ ID NO: 1555168 - RNA, 19 nt, Artificial Sequence
  Description of Artificial Sequence: Synthetic oligonucleotide
  Sense strand starting at position 2985 of SEQ ID NO: 1245337
gugucucuaucaccucuaa

SEQ ID NO: 1555169 - RNA, 19 nt, Artificial Sequence
  Description of Artificial Sequence: Synthetic oligonucleotide
  Antisense strand to SEQ ID NO: 1555168
uuagaggugauagagacac

SEQ ID NO: 1555170 - RNA, 19 nt, Artificial Sequence
  Description of Artificial Sequence: Synthetic oligonucleotide
  Sense strand starting at position 3075 of SEQ ID NO: 1245337
cuuagauauuaagcgugau

SEQ ID NO: 1555171 - RNA, 19 nt, Artificial Sequence
  Description of Artificial Sequence: Synthetic oligonucleotide
  Antisense strand to SEQ ID NO: 1555170
aucacgcuuaauaucuaag

SEQ ID NO: 1555172 - RNA, 19 nt, Artificial Sequence
  Description of Artificial Sequence: Synthetic oligonucleotide
  Sense strand starting at position 3076 of SEQ ID NO: 1245337
uuagauauuaagcgugauc

SEQ ID NO: 1555173 - RNA, 19 nt, Artificial Sequence
  Description of Artificial Sequence: Synthetic oligonucleotide
  Antisense strand to SEQ ID NO: 1555172
gaucacgcuuaauaucuaa

SEQ ID NO: 1555174 - RNA, 19 nt, Artificial Sequence
  Description of Artificial Sequence: Synthetic oligonucleotide
  Sense strand starting at position 3078 of SEQ ID NO: 1245337
agauauuaagcgugauccu

SEQ ID NO: 1555175 - RNA, 19 nt, Artificial Sequence
  Description of Artificial Sequence: Synthetic oligonucleotide
  Antisense strand to SEQ ID NO: 1555174
aggaucacgcuuaauaucu

SEQ ID NO: 1555176 - RNA, 19 nt, Artificial Sequence
  Description of Artificial Sequence: Synthetic oligonucleotide
  Sense strand starting at position 3079 of SEQ ID NO: 1245337
gauauuaagcgugauccua

SEQ ID NO: 1555177 - RNA, 19 nt, Artificial Sequence
  Description of Artificial Sequence: Synthetic oligonucleotide
  Antisense strand to SEQ ID NO: 1555176
uaggaucacgcuuaauauc

SEQ ID NO: 1555178 - RNA, 19 nt, Artificial Sequence
  Description of Artificial Sequence: Synthetic oligonucleotide
  Sense strand starting at position 3081 of SEQ ID NO: 1245337
uauuaagcgugauccuaga

SEQ ID NO: 1555179 - RNA, 19 nt, Artificial Sequence
  Description of Artificial Sequence: Synthetic oligonucleotide
  Antisense strand to SEQ ID NO: 1555178
ucuaggaucacgcuuaaua

SEQ ID NO: 1555180 - RNA, 19 nt, Artificial Sequence
  Description of Artificial Sequence: Synthetic oligonucleotide
  Sense strand starting at position 3122 of SEQ ID NO: 1245337
uguugagugaaucgauaug

SEQ ID NO: 1555181 - RNA, 19 nt, Artificial Sequence
  Description of Artificial Sequence: Synthetic oligonucleotide
  Antisense strand to SEQ ID NO: 1555180
cauaucgauucacucaaca

SEQ ID NO: 1555182 - RNA, 19 nt, Artificial Sequence
  Description of Artificial Sequence: Synthetic oligonucleotide
  Sense strand starting at position 3156 of SEQ ID NO: 1245337
uuguaaugcagucagagaa

SEQ ID NO: 1555183 - RNA, 19 nt, Artificial Sequence
  Description of Artificial Sequence: Synthetic oligonucleotide
  Antisense strand to SEQ ID NO: 1555182
uucucugacugcauuacaa

SEQ ID NO: 1555184 - RNA, 19 nt, Artificial Sequence
  Description of Artificial Sequence: Synthetic oligonucleotide
  Sense strand starting at position 3862 of SEQ ID NO: 1245337
aaagacugcugucuagaaa

SEQ ID NO: 1555185 - RNA, 19 nt, Artificial Sequence
  Description of Artificial Sequence: Synthetic oligonucleotide
  Antisense strand to SEQ ID NO: 1555184
uuucuagacagcagucuuu

SEQ ID NO: 1555186 - RNA, 19 nt, Artificial Sequence
  Description of Artificial Sequence: Synthetic oligonucleotide
  Sense strand starting at position 3865 of SEQ ID NO: 1245337
gacugcugucuagaaagua

SEQ ID NO: 1555187 - RNA, 19 nt, Artificial Sequence
  Description of Artificial Sequence: Synthetic oligonucleotide
  Antisense strand to SEQ ID NO: 1555186
uacuuucuagacagcaguc

SEQ ID NO: 1555188 - RNA, 19 nt, Artificial Sequence
  Description of Artificial Sequence: Synthetic oligonucleotide
  Sense strand starting at position 3880 of SEQ ID NO: 1245337
aguagacucucaucagaua

SEQ ID NO: 1555189 - RNA, 19 nt, Artificial Sequence
  Description of Artificial Sequence: Synthetic oligonucleotide
  Antisense strand to SEQ ID NO: 1555188
uaucugaugagagucuacu

SEQ ID NO: 1555190 - RNA, 19 nt, Artificial Sequence
  Description of Artificial Sequence: Synthetic oligonucleotide
  Sense strand starting at position 23 of SEQ ID NO: 1245338
uccggauuguuucuaagca

SEQ ID NO: 1555191 - RNA, 19 nt, Artificial Sequence
  Description of Artificial Sequence: Synthetic oligonucleotide
  Antisense strand to SEQ ID NO: 1555190
ugcuuagaaacaauccgga

SEQ ID NO: 1555192 - RNA, 19 nt, Artificial Sequence
  Description of Artificial Sequence: Synthetic oligonucleotide
  Sense strand starting at position 153 of SEQ ID NO: 1245338
cccggaacuuuggugaaga

SEQ ID NO: 1555193 - RNA, 19 nt, Artificial Sequence
  Description of Artificial Sequence: Synthetic oligonucleotide
  Antisense strand to SEQ ID NO: 1555192
ucuucaccaaaguuccggg

SEQ ID NO: 1555194 - RNA, 19 nt, Artificial Sequence
  Description of Artificial Sequence: Synthetic oligonucleotide
  Sense strand starting at position 256 of SEQ ID NO: 1245338
gucccagagcucugagaag

SEQ ID NO: 1555195 - RNA, 19 nt, Artificial Sequence
  Description of Artificial Sequence: Synthetic oligonucleotide
  Antisense strand to SEQ ID NO: 1555194
cuucucagagcucugggac

SEQ ID NO: 1555196 - RNA, 19 nt, Artificial Sequence
  Description of Artificial Sequence: Synthetic oligonucleotide
  Sense strand starting at position 356 of SEQ ID NO: 1245338
ggcaauuucuuagccgaau

SEQ ID NO: 1555197 - RNA, 19 nt, Artificial Sequence
  Description of Artificial Sequence: Synthetic oligonucleotide
  Antisense strand to SEQ ID NO: 1555196
auucggcuaagaaauugcc

SEQ ID NO: 1555198 - RNA, 19 nt, Artificial Sequence
  Description of Artificial Sequence: Synthetic oligonucleotide
  Sense strand starting at position 357 of SEQ ID NO: 1245338
gcaauuucuuagccgaauc

SEQ ID NO: 1555199 - RNA, 19 nt, Artificial Sequence
  Description of Artificial Sequence: Synthetic oligonucleotide
  Antisense strand to SEQ ID NO: 1555198
gauucggcuaagaaauugc

SEQ ID NO: 1555200 - RNA, 19 nt, Artificial Sequence
  Description of Artificial Sequence: Synthetic oligonucleotide
  Sense strand starting at position 474 of SEQ ID NO: 1245338
acugaucguaggugaggua

SEQ ID NO: 1555201 - RNA, 19 nt, Artificial Sequence
  Description of Artificial Sequence: Synthetic oligonucleotide
  Antisense strand to SEQ ID NO: 1555200
uaccucaccuacgaucagu

SEQ ID NO: 1555202 - RNA, 19 nt, Artificial Sequence
  Description of Artificial Sequence: Synthetic oligonucleotide
  Sense strand starting at position 516 of SEQ ID NO: 1245338
gcucgaauuccucagccau

SEQ ID NO: 1555203 - RNA, 19 nt, Artificial Sequence
  Description of Artificial Sequence: Synthetic oligonucleotide
  Antisense strand to SEQ ID NO: 1555202
auggcugaggaauucgagc

SEQ ID NO: 1555204 - RNA, 19 nt, Artificial Sequence
  Description of Artificial Sequence: Synthetic oligonucleotide
  Sense strand starting at position 518 of SEQ ID NO: 1245338
ucgaauuccucagccauau

SEQ ID NO: 1555205 - RNA, 19 nt, Artificial Sequence
  Description of Artificial Sequence: Synthetic oligonucleotide
  Antisense strand to SEQ ID NO: 1555204
auauggcugaggaauucga

SEQ ID NO: 1555206 - RNA, 19 nt, Artificial Sequence
  Description of Artificial Sequence: Synthetic oligonucleotide
  Sense strand starting at position 565 of SEQ ID NO: 1245338
cacggacguucuguccaaa

SEQ ID NO: 1555207 - RNA, 19 nt, Artificial Sequence
  Description of Artificial Sequence: Synthetic oligonucleotide
  Antisense strand to SEQ ID NO: 1555206
uuuggacagaacguccgug

SEQ ID NO: 1555208 - RNA, 19 nt, Artificial Sequence
  Description of Artificial Sequence: Synthetic oligonucleotide
  Sense strand starting at position 568 of SEQ ID NO: 1245338
ggacguucuguccaaauga

SEQ ID NO: 1555209 - RNA, 19 nt, Artificial Sequence
  Description of Artificial Sequence: Synthetic oligonucleotide
  Antisense strand to SEQ ID NO: 1555208
ucauuuggacagaacgucc

SEQ ID NO: 1555210 - RNA, 19 nt, Artificial Sequence
  Description of Artificial Sequence: Synthetic oligonucleotide
  Sense strand starting at position 884 of SEQ ID NO: 1245338
ccgcaugauuucucccuga

SEQ ID NO: 1555211 - RNA, 19 nt, Artificial Sequence
  Description of Artificial Sequence: Synthetic oligonucleotide
  Antisense strand to SEQ ID NO: 1555210
ucagggagaaaucaugcgg

SEQ ID NO: 1555212 - RNA, 19 nt, Artificial Sequence
  Description of Artificial Sequence: Synthetic oligonucleotide
  Sense strand starting at position 1119 of SEQ ID NO: 1245338
gagcugugcgcguuggaga

SEQ ID NO: 1555213 - RNA, 19 nt, Artificial Sequence
  Description of Artificial Sequence: Synthetic oligonucleotide
  Antisense strand to SEQ ID NO: 1555212
ucuccaacgcgcacagcuc

SEQ ID NO: 1555214 - RNA, 19 nt, Artificial Sequence
  Description of Artificial Sequence: Synthetic oligonucleotide
  Sense strand starting at position 1397 of SEQ ID NO: 1245338
cggguguuucgguccacga

SEQ ID NO: 1555215 - RNA, 19 nt, Artificial Sequence
  Description of Artificial Sequence: Synthetic oligonucleotide
  Antisense strand to SEQ ID NO: 1555214
ucguggaccgaaacacccg

SEQ ID NO: 1555216 - RNA, 19 nt, Artificial Sequence
  Description of Artificial Sequence: Synthetic oligonucleotide
  Sense strand starting at position 1892 of SEQ ID NO: 1245338
uggagugaccucugcaguu

SEQ ID NO: 1555217 - RNA, 19 nt, Artificial Sequence
  Description of Artificial Sequence: Synthetic oligonucleotide
  Antisense strand to SEQ ID NO: 1555216
aacugcagaggucacucca

SEQ ID NO: 1555218 - RNA, 19 nt, Artificial Sequence
  Description of Artificial Sequence: Synthetic oligonucleotide
  Sense strand starting at position 1906 of SEQ ID NO: 1245338
caguuugcugugcaacaaa

SEQ ID NO: 1555219 - RNA, 19 nt, Artificial Sequence
  Description of Artificial Sequence: Synthetic oligonucleotide
  Antisense strand to SEQ ID NO: 1555218
uuuguugcacagcaaacug

SEQ ID NO: 1555220 - RNA, 19 nt, Artificial Sequence
  Description of Artificial Sequence: Synthetic oligonucleotide
  Sense strand starting at position 2095 of SEQ ID NO: 1245338
cccagagguugauuagguu

SEQ ID NO: 1555221 - RNA, 19 nt, Artificial Sequence
  Description of Artificial Sequence: Synthetic oligonucleotide
  Antisense strand to SEQ ID NO: 1555220
aaccuaaucaaccucuggg

SEQ ID NO: 1555222 - RNA, 19 nt, Artificial Sequence
  Description of Artificial Sequence: Synthetic oligonucleotide
  Sense strand starting at position 2099 of SEQ ID NO: 1245338
gagguugauuagguuaauu

SEQ ID NO: 1555223 - RNA, 19 nt, Artificial Sequence
  Description of Artificial Sequence: Synthetic oligonucleotide
  Antisense strand to SEQ ID NO: 1555222
aauuaaccuaaucaaccuc

SEQ ID NO: 1555224 - RNA, 19 nt, Artificial Sequence
  Description of Artificial Sequence: Synthetic oligonucleotide
  Sense strand starting at position 2202 of SEQ ID NO: 1245338
cugaaucuucuugggagua

SEQ ID NO: 1555225 - RNA, 19 nt, Artificial Sequence
  Description of Artificial Sequence: Synthetic oligonucleotide
  Antisense strand to SEQ ID NO: 1555224
uacucccaagaagauucag

SEQ ID NO: 1555226 - RNA, 19 nt, Artificial Sequence
  Description of Artificial Sequence: Synthetic oligonucleotide
  Sense strand starting at position 2280 of SEQ ID NO: 1245338
acucuuugccuaggacuga

SEQ ID NO: 1555227 - RNA, 19 nt, Artificial Sequence
  Description of Artificial Sequence: Synthetic oligonucleotide
  Antisense strand to SEQ ID NO: 1555226
ucaguccuaggcaaagagu

SEQ ID NO: 1555228 - RNA, 19 nt, Artificial Sequence
  Description of Artificial Sequence: Synthetic oligonucleotide
  Sense strand starting at position 2385 of SEQ ID NO: 1245338
cuccaucaauuucgagaca

SEQ ID NO: 1555229 - RNA, 19 nt, Artificial Sequence
  Description of Artificial Sequence: Synthetic oligonucleotide
  Antisense strand to SEQ ID NO: 1555228
ugucucgaaauugauggag

SEQ ID NO: 1555230 - RNA, 19 nt, Artificial Sequence
  Description of Artificial Sequence: Synthetic oligonucleotide
  Sense strand starting at position 2436 of SEQ ID NO: 1245338
cccucaagcccugauguuu

SEQ ID NO: 1555231 - RNA, 19 nt, Artificial Sequence
  Description of Artificial Sequence: Synthetic oligonucleotide
  Antisense strand to SEQ ID NO: 1555230
aaacaucagggcuugaggg

SEQ ID NO: 1555232 - RNA, 19 nt, Artificial Sequence
  Description of Artificial Sequence: Synthetic oligonucleotide
  Sense strand starting at position 2447 of SEQ ID NO: 1245338
ugauguuucugggaauuua

SEQ ID NO: 1555233 - RNA, 19 nt, Artificial Sequence
  Description of Artificial Sequence: Synthetic oligonucleotide
  Antisense strand to SEQ ID NO: 1555232
uaaauucccagaaacauca

SEQ ID NO: 1555234 - RNA, 19 nt, Artificial Sequence
  Description of Artificial Sequence: Synthetic oligonucleotide
  Sense strand starting at position 2670 of SEQ ID NO: 1245338
gguagaacucucugguaau

SEQ ID NO: 1555235 - RNA, 19 nt, Artificial Sequence
  Description of Artificial Sequence: Synthetic oligonucleotide
  Antisense strand to SEQ ID NO: 1555234
auuaccagagaguucuacc

SEQ ID NO: 1555236 - RNA, 19 nt, Artificial Sequence
  Description of Artificial Sequence: Synthetic oligonucleotide
  Sense strand starting at position 2727 of SEQ ID NO: 1245338
cucuguuaguaagcauauu

SEQ ID NO: 1555237 - RNA, 19 nt, Artificial Sequence
  Description of Artificial Sequence: Synthetic oligonucleotide
  Antisense strand to SEQ ID NO: 1555236
aauaugcuuacuaacagag

SEQ ID NO: 1555238 - RNA, 19 nt, Artificial Sequence
  Description of Artificial Sequence: Synthetic oligonucleotide
  Sense strand starting at position 3013 of SEQ ID NO: 1245338
gcuauuauuguugaaacag

SEQ ID NO: 1555239 - RNA, 19 nt, Artificial Sequence
  Description of Artificial Sequence: Synthetic oligonucleotide
  Antisense strand to SEQ ID NO: 1555238
cuguuucaacaauaauagc

SEQ ID NO: 1555240 - RNA, 19 nt, Artificial Sequence
  Description of Artificial Sequence: Synthetic oligonucleotide
  Sense strand starting at position 3078 of SEQ ID NO: 1245338
acaggaucauuugaaauau

SEQ ID NO: 1555241 - RNA, 19 nt, Artificial Sequence
  Description of Artificial Sequence: Synthetic oligonucleotide
  Antisense strand to SEQ ID NO: 1555240
auauuucaaaugauccugu

SEQ ID NO: 1555242 - RNA, 19 nt, Artificial Sequence
  Description of Artificial Sequence: Synthetic oligonucleotide
  Sense strand starting at position 3146 of SEQ ID NO: 1245338
uagggaacacuugguccua

SEQ ID NO: 1555243 - RNA, 19 nt, Artificial Sequence
  Description of Artificial Sequence: Synthetic oligonucleotide
  Antisense strand to SEQ ID NO: 1555242
uaggaccaaguguucccua

SEQ ID NO: 1555244 - RNA, 19 nt, Artificial Sequence
  Description of Artificial Sequence: Synthetic oligonucleotide
  Sense strand starting at position 3162 of SEQ ID NO: 1245338
cuauguuucugagcauagu

SEQ ID NO: 1555245 - RNA, 19 nt, Artificial Sequence
  Description of Artificial Sequence: Synthetic oligonucleotide
  Antisense strand to SEQ ID NO: 1555244
acuaugcucagaaacauag

SEQ ID NO: 1555246 - RNA, 19 nt, Artificial Sequence
  Description of Artificial Sequence: Synthetic oligonucleotide
  Sense strand starting at position 3163 of SEQ ID NO: 1245338
uauguuucugagcauaguu

SEQ ID NO: 1555247 - RNA, 19 nt, Artificial Sequence
  Description of Artificial Sequence: Synthetic oligonucleotide
  Antisense strand to SEQ ID NO: 1555246
aacuaugcucagaaacaua

SEQ ID NO: 1555248 - RNA, 19 nt, Artificial Sequence
  Description of Artificial Sequence: Synthetic oligonucleotide
  Sense strand starting at position 3165 of SEQ ID NO: 1245338
uguuucugagcauaguuga

SEQ ID NO: 1555249 - RNA, 19 nt, Artificial Sequence
  Description of Artificial Sequence: Synthetic oligonucleotide
  Antisense strand to SEQ ID NO: 1555248
ucaacuaugcucagaaaca

SEQ ID NO: 1555250 - RNA, 19 nt, Artificial Sequence
  Description of Artificial Sequence: Synthetic oligonucleotide
  Sense strand starting at position 3222 of SEQ ID NO: 1245338
ucuggaucuguagacacuu

SEQ ID NO: 1555251 - RNA, 19 nt, Artificial Sequence
  Description of Artificial Sequence: Synthetic oligonucleotide
  Antisense strand to SEQ ID NO: 1555250
aagugucuacagauccaga

SEQ ID NO: 1555252 - RNA, 19 nt, Artificial Sequence
  Description of Artificial Sequence: Synthetic oligonucleotide
  Sense strand starting at position 3278 of SEQ ID NO: 1245338
auuugaaaguuaggaaguu

SEQ ID NO: 1555253 - RNA, 19 nt, Artificial Sequence
  Description of Artificial Sequence: Synthetic oligonucleotide
  Antisense strand to SEQ ID NO: 1555252
aacuuccuaacuuucaaau

SEQ ID NO: 1555254 - RNA, 19 nt, Artificial Sequence
  Description of Artificial Sequence: Synthetic oligonucleotide
  Sense strand starting at position 3581 of SEQ ID NO: 1245338
guguauauacaguaacauu

SEQ ID NO: 1555255 - RNA, 19 nt, Artificial Sequence
  Description of Artificial Sequence: Synthetic oligonucleotide
  Antisense strand to SEQ ID NO: 1555254
aauguuacuguauauacac

SEQ ID NO: 1555256 - RNA, 19 nt, Artificial Sequence
  Description of Artificial Sequence: Synthetic oligonucleotide
  Sense strand starting at position 3684 of SEQ ID NO: 1245338
ugaauuugauaauggaggu

SEQ ID NO: 1555257 - RNA, 19 nt, Artificial Sequence
  Description of Artificial Sequence: Synthetic oligonucleotide
  Antisense strand to SEQ ID NO: 1555256
accuccauuaucaaauuca

SEQ ID NO: 1555258 - RNA, 19 nt, Artificial Sequence
  Description of Artificial Sequence: Synthetic oligonucleotide
  Sense strand starting at position 3688 of SEQ ID NO: 1245338
uuugauaauggagguauau

SEQ ID NO: 1555259 - RNA, 19 nt, Artificial Sequence
  Description of Artificial Sequence: Synthetic oligonucleotide
  Antisense strand to SEQ ID NO: 1555258
auauaccuccauuaucaaa

SEQ ID NO: 1555260 - RNA, 19 nt, Artificial Sequence
  Description of Artificial Sequence: Synthetic oligonucleotide
  Sense strand starting at position 3825 of SEQ ID NO: 1245338
agaaauuaaugagcaugua

SEQ ID NO: 1555261 - RNA, 19 nt, Artificial Sequence
  Description of Artificial Sequence: Synthetic oligonucleotide
  Antisense strand to SEQ ID NO: 1555260
uacaugcucauuaauuucu

SEQ ID NO: 1555262 - RNA, 19 nt, Artificial Sequence
  Description of Artificial Sequence: Synthetic oligonucleotide
  Sense strand starting at position 3839 of SEQ ID NO: 1245338
auguaauuguguccauuuc

SEQ ID NO: 1555263 - RNA, 19 nt, Artificial Sequence
  Description of Artificial Sequence: Synthetic oligonucleotide
  Antisense strand to SEQ ID NO: 1555262
gaaauggacacaauuacau

SEQ ID NO: 1555264 - RNA, 19 nt, Artificial Sequence
  Description of Artificial Sequence: Synthetic oligonucleotide
  Sense strand starting at position 3901 of SEQ ID NO: 1245338
gggaauggcucauucuuag

SEQ ID NO: 1555265 - RNA, 19 nt, Artificial Sequence
  Description of Artificial Sequence: Synthetic oligonucleotide
  Antisense strand to SEQ ID NO: 1555264
cuaagaaugagccauuccc

SEQ ID NO: 1555266 - RNA, 19 nt, Artificial Sequence
  Description of Artificial Sequence: Synthetic oligonucleotide
  Sense strand starting at position 3966 of SEQ ID NO: 1245338
ugggcagaaagauguagau

SEQ ID NO: 1555267 - RNA, 19 nt, Artificial Sequence
  Description of Artificial Sequence: Synthetic oligonucleotide
  Antisense strand to SEQ ID NO: 1555266
aucuacaucuuucugccca

SEQ ID NO: 1555268 - RNA, 19 nt, Artificial Sequence
  Description of Artificial Sequence: Synthetic oligonucleotide
  Sense strand starting at position 3978 of SEQ ID NO: 1245338
uguagaucuggccaacuuu

SEQ ID NO: 1555269 - RNA, 19 nt, Artificial Sequence
  Description of Artificial Sequence: Synthetic oligonucleotide
  Antisense strand to SEQ ID NO: 1555268
aaaguuggccagaucuaca

SEQ ID NO: 1555270 - RNA, 19 nt, Artificial Sequence
  Description of Artificial Sequence: Synthetic oligonucleotide
  Sense strand starting at position 861 of SEQ ID NO: 1245339
cgcagagugcuucuggguu

SEQ ID NO: 1555271 - RNA, 19 nt, Artificial Sequence
  Description of Artificial Sequence: Synthetic oligonucleotide
  Antisense strand to SEQ ID NO: 1555270
aacccagaagcacucugcg

SEQ ID NO: 1555272 - RNA, 19 nt, Artificial Sequence
  Description of Artificial Sequence: Synthetic oligonucleotide
  Sense strand starting at position 3159 of SEQ ID NO: 1245339
cuggccugcagcugauauu

SEQ ID NO: 1555273 - RNA, 19 nt, Artificial Sequence
  Description of Artificial Sequence: Synthetic oligonucleotide
  Antisense strand to SEQ ID NO: 1555272
aauaucagcugcaggccag

SEQ ID NO: 1555274 - RNA, 19 nt, Artificial Sequence
  Description of Artificial Sequence: Synthetic oligonucleotide
  Sense strand starting at position 3589 of SEQ ID NO: 1245339
guaaauaggugggaagaga

SEQ ID NO: 1555275 - RNA, 19 nt, Artificial Sequence
  Description of Artificial Sequence: Synthetic oligonucleotide
  Antisense strand to SEQ ID NO: 1555274
ucucuucccaccuauuuac

SEQ ID NO: 1555276 - RNA, 19 nt, Artificial Sequence
  Description of Artificial Sequence: Synthetic oligonucleotide
  Sense strand starting at position 3160 of SEQ ID NO: 1245340
cuggucugcagcugauauu

SEQ ID NO: 1555277 - RNA, 19 nt, Artificial Sequence
  Description of Artificial Sequence: Synthetic oligonucleotide
  Antisense strand to SEQ ID NO: 1555276
aauaucagcugcagaccag

SEQ ID NO: 1555278 - RNA, 19 nt, Artificial Sequence
  Description of Artificial Sequence: Synthetic oligonucleotide
  Sense strand starting at position 3284 of SEQ ID NO: 1245340
guuggcaguuucgcguaau

SEQ ID NO: 1555279 - RNA, 19 nt, Artificial Sequence
  Description of Artificial Sequence: Synthetic oligonucleotide
  Antisense strand to SEQ ID NO: 1555278
auuacgcgaaacugccaac

SEQ ID NO: 1555280 - RNA, 19 nt, Artificial Sequence
  Description of Artificial Sequence: Synthetic oligonucleotide
  Sense strand starting at position 3285 of SEQ ID NO: 1245340
uuggcaguuucgcguaauu

SEQ ID NO: 1555281 - RNA, 19 nt, Artificial Sequence
  Description of Artificial Sequence: Synthetic oligonucleotide
  Antisense strand to SEQ ID NO: 1555280
aauuacgcgaaacugccaa

SEQ ID NO: 1555282 - RNA, 19 nt, Artificial Sequence
  Description of Artificial Sequence: Synthetic oligonucleotide
  Sense strand starting at position 3304 of SEQ ID NO: 1245340
uuuaauuucucgugugacu

SEQ ID NO: 1555283 - RNA, 19 nt, Artificial Sequence
  Description of Artificial Sequence: Synthetic oligonucleotide
  Antisense strand to SEQ ID NO: 1555282
agucacacgagaaauuaaa

SEQ ID NO: 1555284 - RNA, 19 nt, Artificial Sequence
  Description of Artificial Sequence: Synthetic oligonucleotide
  Sense strand starting at position 3306 of SEQ ID NO: 1245340
uaauuucucgugugacuuu

SEQ ID NO: 1555285 - RNA, 19 nt, Artificial Sequence
  Description of Artificial Sequence: Synthetic oligonucleotide
  Antisense strand to SEQ ID NO: 1555284
aaagucacacgagaaauua

SEQ ID NO: 1555286 - RNA, 19 nt, Artificial Sequence
  Description of Artificial Sequence: Synthetic oligonucleotide
  Sense strand starting at position 3372 of SEQ ID NO: 1245340
ggguguguuucuucugcag

SEQ ID NO: 1555287 - RNA, 19 nt, Artificial Sequence
  Description of Artificial Sequence: Synthetic oligonucleotide
  Antisense strand to SEQ ID NO: 1555286
cugcagaagaaacacaccc

SEQ ID NO: 1555288 - RNA, 19 nt, Artificial Sequence
  Description of Artificial Sequence: Synthetic oligonucleotide
  Sense strand starting at position 3375 of SEQ ID NO: 1245340
uguguuucuucugcagaaa

SEQ ID NO: 1555289 - RNA, 19 nt, Artificial Sequence
  Description of Artificial Sequence: Synthetic oligonucleotide
  Antisense strand to SEQ ID NO: 1555288
uuucugcagaagaaacaca

SEQ ID NO: 1555290 - RNA, 19 nt, Artificial Sequence
  Description of Artificial Sequence: Synthetic oligonucleotide
  Sense strand starting at position 3376 of SEQ ID NO: 1245340
guguuucuucugcagaaag

SEQ ID NO: 1555291 - RNA, 19 nt, Artificial Sequence
  Description of Artificial Sequence: Synthetic oligonucleotide
  Antisense strand to SEQ ID NO: 1555290
cuuucugcagaagaaacac

SEQ ID NO: 1555292 - RNA, 19 nt, Artificial Sequence
  Description of Artificial Sequence: Synthetic oligonucleotide
  Sense strand starting at position 3378 of SEQ ID NO: 1245340
guuucuucugcagaaagaa

SEQ ID NO: 1555293 - RNA, 19 nt, Artificial Sequence
  Description of Artificial Sequence: Synthetic oligonucleotide
  Antisense strand to SEQ ID NO: 1555292
uucuuucugcagaagaaac

SEQ ID NO: 1555294 - RNA, 19 nt, Artificial Sequence
  Description of Artificial Sequence: Synthetic oligonucleotide
  Sense strand starting at position 3398 of SEQ ID NO: 1245340
aucauuaugcccugagaau

SEQ ID NO: 1555295 - RNA, 19 nt, Artificial Sequence
  Description of Artificial Sequence: Synthetic oligonucleotide
  Antisense strand to SEQ ID NO: 1555294
auucucagggcauaaugau

SEQ ID NO: 1555296 - RNA, 19 nt, Artificial Sequence
  Description of Artificial Sequence: Synthetic oligonucleotide
  Sense strand starting at position 3399 of SEQ ID NO: 1245340
ucauuaugcccugagaauc

SEQ ID NO: 1555297 - RNA, 19 nt, Artificial Sequence
  Description of Artificial Sequence: Synthetic oligonucleotide
  Antisense strand to SEQ ID NO: 1555296
gauucucagggcauaauga

SEQ ID NO: 1555298 - RNA, 19 nt, Artificial Sequence
  Description of Artificial Sequence: Synthetic oligonucleotide
  Sense strand starting at position 3460 of SEQ ID NO: 1245340
ccuuccacaguuuguagaa

SEQ ID NO: 1555299 - RNA, 19 nt, Artificial Sequence
  Description of Artificial Sequence: Synthetic oligonucleotide
  Antisense strand to SEQ ID NO: 1555298
uucuacaaacuguggaagg

SEQ ID NO: 1555300 - RNA, 19 nt, Artificial Sequence
  Description of Artificial Sequence: Synthetic oligonucleotide
  Sense strand starting at position 3482 of SEQ ID NO: 1245340
uagguaaauuugcuguguu

SEQ ID NO: 1555301 - RNA, 19 nt, Artificial Sequence
  Description of Artificial Sequence: Synthetic oligonucleotide
  Antisense strand to SEQ ID NO: 1555300
aacacagcaaauuuaccua

SEQ ID NO: 1555302 - RNA, 19 nt, Artificial Sequence
  Description of Artificial Sequence: Synthetic oligonucleotide
  Sense strand starting at position 3483 of SEQ ID NO: 1245340
agguaaauuugcuguguuu

SEQ ID NO: 1555303 - RNA, 19 nt, Artificial Sequence
  Description of Artificial Sequence: Synthetic oligonucleotide
  Antisense strand to SEQ ID NO: 1555302
aaacacagcaaauuuaccu

SEQ ID NO: 1555304 - RNA, 19 nt, Artificial Sequence
  Description of Artificial Sequence: Synthetic oligonucleotide
  Sense strand starting at position 3511 of SEQ ID NO: 1245340
cagcuacuucuccaggaga

SEQ ID NO: 1555305 - RNA, 19 nt, Artificial Sequence
  Description of Artificial Sequence: Synthetic oligonucleotide
  Antisense strand to SEQ ID NO: 1555304
ucuccuggagaaguagcug

SEQ ID NO: 1555306 - RNA, 19 nt, Artificial Sequence
  Description of Artificial Sequence: Synthetic oligonucleotide
  Sense strand starting at position 3522 of SEQ ID NO: 1245340
ccaggagaaucguagugua

SEQ ID NO: 1555307 - RNA, 19 nt, Artificial Sequence
  Description of Artificial Sequence: Synthetic oligonucleotide
  Antisense strand to SEQ ID NO: 1555306
uacacuacgauucuccugg

SEQ ID NO: 1555308 - RNA, 19 nt, Artificial Sequence
  Description of Artificial Sequence: Synthetic oligonucleotide
  Sense strand starting at position 3525 of SEQ ID NO: 1245340
ggagaaucguaguguaaua

SEQ ID NO: 1555309 - RNA, 19 nt, Artificial Sequence
  Description of Artificial Sequence: Synthetic oligonucleotide
  Antisense strand to SEQ ID NO: 1555308
uauuacacuacgauucucc

SEQ ID NO: 1555310 - RNA, 19 nt, Artificial Sequence
  Description of Artificial Sequence: Synthetic oligonucleotide
  Sense strand starting at position 3527 of SEQ ID NO: 1245340
agaaucguaguguaauacu

SEQ ID NO: 1555311 - RNA, 19 nt, Artificial Sequence
  Description of Artificial Sequence: Synthetic oligonucleotide
  Antisense strand to SEQ ID NO: 1555310
aguauuacacuacgauucu

SEQ ID NO: 1555312 - RNA, 19 nt, Artificial Sequence
  Description of Artificial Sequence: Synthetic oligonucleotide
  Sense strand starting at position 3536 of SEQ ID NO: 1245340
guguaauacuggcaauucu

SEQ ID NO: 1555313 - RNA, 19 nt, Artificial Sequence
  Description of Artificial Sequence: Synthetic oligonucleotide
  Antisense strand to SEQ ID NO: 1555312
agaauugccaguauuacac

SEQ ID NO: 1555314 - RNA, 19 nt, Artificial Sequence
  Description of Artificial Sequence: Synthetic oligonucleotide
  Sense strand starting at position 3558 of SEQ ID NO: 1245340
gagcuagaaugaggauuau

SEQ ID NO: 1555315 - RNA, 19 nt, Artificial Sequence
  Description of Artificial Sequence: Synthetic oligonucleotide
  Antisense strand to SEQ ID NO: 1555314
auaauccucauucuagcuc

SEQ ID NO: 1555316 - RNA, 19 nt, Artificial Sequence
  Description of Artificial Sequence: Synthetic oligonucleotide
  Sense strand starting at position 3624 of SEQ ID NO: 1245340
cuccuuaccuuaugugauc

SEQ ID NO: 1555317 - RNA, 19 nt, Artificial Sequence
  Description of Artificial Sequence: Synthetic oligonucleotide
  Antisense strand to SEQ ID NO: 1555316
gaucacauaagguaaggag

SEQ ID NO: 1555318 - RNA, 19 nt, Artificial Sequence
  Description of Artificial Sequence: Synthetic oligonucleotide
  Sense strand starting at position 3756 of SEQ ID NO: 1245340
gcuuucuugucuuccugaa

SEQ ID NO: 1555319 - RNA, 19 nt, Artificial Sequence
  Description of Artificial Sequence: Synthetic oligonucleotide
  Antisense strand to SEQ ID NO: 1555318
uucaggaagacaagaaagc

SEQ ID NO: 1555320 - RNA, 19 nt, Artificial Sequence
  Description of Artificial Sequence: Synthetic oligonucleotide
  Sense strand starting at position 3820 of SEQ ID NO: 1245340
uguguaucauaucuggcau

SEQ ID NO: 1555321 - RNA, 19 nt, Artificial Sequence
  Description of Artificial Sequence: Synthetic oligonucleotide
  Antisense strand to SEQ ID NO: 1555320
augccagauaugauacaca

SEQ ID NO: 1555322 - RNA, 19 nt, Artificial Sequence
  Description of Artificial Sequence: Synthetic oligonucleotide
  Sense strand starting at position 3824 of SEQ ID NO: 1245340
uaucauaucuggcauacgu

SEQ ID NO: 1555323 - RNA, 19 nt, Artificial Sequence
  Description of Artificial Sequence: Synthetic oligonucleotide
  Antisense strand to SEQ ID NO: 1555322
acguaugccagauaugaua

SEQ ID NO: 1555324 - RNA, 19 nt, Artificial Sequence
  Description of Artificial Sequence: Synthetic oligonucleotide
  Sense strand starting at position 3833 of SEQ ID NO: 1245340
uggcauacguuccuuugau

SEQ ID NO: 1555325 - RNA, 19 nt, Artificial Sequence
  Description of Artificial Sequence: Synthetic oligonucleotide
  Antisense strand to SEQ ID NO: 1555324
aucaaaggaacguaugcca

SEQ ID NO: 1555326 - RNA, 19 nt, Artificial Sequence
  Description of Artificial Sequence: Synthetic oligonucleotide
  Sense strand starting at position 3834 of SEQ ID NO: 1245340
ggcauacguuccuuugauu

SEQ ID NO: 1555327 - RNA, 19 nt, Artificial Sequence
  Description of Artificial Sequence: Synthetic oligonucleotide
  Antisense strand to SEQ ID NO: 1555326
aaucaaaggaacguaugcc

SEQ ID NO: 1555328 - RNA, 19 nt, Artificial Sequence
  Description of Artificial Sequence: Synthetic oligonucleotide
  Sense strand starting at position 3912 of SEQ ID NO: 1245340
agcagacguccgugugauc

SEQ ID NO: 1555329 - RNA, 19 nt, Artificial Sequence
  Description of Artificial Sequence: Synthetic oligonucleotide
  Antisense strand to SEQ ID NO: 1555328
gaucacacggacgucugcu

SEQ ID NO: 1555330 - RNA, 19 nt, Artificial Sequence
  Description of Artificial Sequence: Synthetic oligonucleotide
  Sense strand starting at position 3919 of SEQ ID NO: 1245340
guccgugugaucugaacuc

SEQ ID NO: 1555331 - RNA, 19 nt, Artificial Sequence
  Description of Artificial Sequence: Synthetic oligonucleotide
  Antisense strand to SEQ ID NO: 1555330
gaguucagaucacacggac

SEQ ID NO: 1555332 - RNA, 19 nt, Artificial Sequence
  Description of Artificial Sequence: Synthetic oligonucleotide
  Sense strand starting at position 3928 of SEQ ID NO: 1245340
aucugaacucaagguaguu

SEQ ID NO: 1555333 - RNA, 19 nt, Artificial Sequence
  Description of Artificial Sequence: Synthetic oligonucleotide
  Antisense strand to SEQ ID NO: 1555332
aacuaccuugaguucagau

SEQ ID NO: 1555334 - RNA, 19 nt, Artificial Sequence
  Description of Artificial Sequence: Synthetic oligonucleotide
  Sense strand starting at position 2641 of SEQ ID NO: 1245341
acucuuuaccugggauuga

SEQ ID NO: 1555335 - RNA, 19 nt, Artificial Sequence
  Description of Artificial Sequence: Synthetic oligonucleotide
  Antisense strand to SEQ ID NO: 1555334
ucaaucccagguaaagagu

SEQ ID NO: 1555336 - RNA, 19 nt, Artificial Sequence
  Description of Artificial Sequence: Synthetic oligonucleotide
  Sense strand starting at position 2651 of SEQ ID NO: 1245341
ugggauugacguuguguga

SEQ ID NO: 1555337 - RNA, 19 nt, Artificial Sequence
  Description of Artificial Sequence: Synthetic oligonucleotide
  Antisense strand to SEQ ID NO: 1555336
ucacacaacgucaauccca

SEQ ID NO: 1555338 - RNA, 19 nt, Artificial Sequence
  Description of Artificial Sequence: Synthetic oligonucleotide
  Sense strand starting at position 3843 of SEQ ID NO: 1245341
ggagaauugagcuguccug

SEQ ID NO: 1555339 - RNA, 19 nt, Artificial Sequence
  Description of Artificial Sequence: Synthetic oligonucleotide
  Antisense strand to SEQ ID NO: 1555338
caggacagcucaauucucc

SEQ ID NO: 1555340 - RNA, 19 nt, Artificial Sequence
  Description of Artificial Sequence: Synthetic oligonucleotide
  Sense strand starting at position 1097 of SEQ ID NO: 1245342
cgcagagugcuucuggguu

SEQ ID NO: 1555341 - RNA, 19 nt, Artificial Sequence
  Description of Artificial Sequence: Synthetic oligonucleotide
  Antisense strand to SEQ ID NO: 1555340
aacccagaagcacucugcg

SEQ ID NO: 1555342 - RNA, 19 nt, Artificial Sequence
  Description of Artificial Sequence: Synthetic oligonucleotide
  Sense strand starting at position 3395 of SEQ ID NO: 1245342
cuggccugcagcugauauu

SEQ ID NO: 1555343 - RNA, 19 nt, Artificial Sequence
  Description of Artificial Sequence: Synthetic oligonucleotide
  Antisense strand to SEQ ID NO: 1555342
aauaucagcugcaggccag

SEQ ID NO: 1555344 - RNA, 19 nt, Artificial Sequence
  Description of Artificial Sequence: Synthetic oligonucleotide
  Sense strand starting at position 3825 of SEQ ID NO: 1245342
guaaauaggugggaagaga

SEQ ID NO: 1555345 - RNA, 19 nt, Artificial Sequence
  Description of Artificial Sequence: Synthetic oligonucleotide
  Antisense strand to SEQ ID NO: 1555344
ucucuucccaccuauuuac

SEQ ID NO: 1555346 - RNA, 19 nt, Artificial Sequence
  Description of Artificial Sequence: Synthetic oligonucleotide
  Sense strand starting at position 3396 of SEQ ID NO: 1245343
cuggucugcagcugauauu

SEQ ID NO: 1555347 - RNA, 19 nt, Artificial Sequence
  Description of Artificial Sequence: Synthetic oligonucleotide
  Antisense strand to SEQ ID NO: 1555346
aauaucagcugcagaccag

SEQ ID NO: 1555348 - RNA, 19 nt, Artificial Sequence
  Description of Artificial Sequence: Synthetic oligonucleotide
  Sense strand starting at position 3520 of SEQ ID NO: 1245343
guuggcaguuucgcguaau

SEQ ID NO: 1555349 - RNA, 19 nt, Artificial Sequence
  Description of Artificial Sequence: Synthetic oligonucleotide
  Antisense strand to SEQ ID NO: 1555348
auuacgcgaaacugccaac

SEQ ID NO: 1555350 - RNA, 19 nt, Artificial Sequence
  Description of Artificial Sequence: Synthetic oligonucleotide
  Sense strand starting at position 3521 of SEQ ID NO: 1245343
uuggcaguuucgcguaauu

SEQ ID NO: 1555351 - RNA, 19 nt, Artificial Sequence
  Description of Artificial Sequence: Synthetic oligonucleotide
  Antisense strand to SEQ ID NO: 1555350
aauuacgcgaaacugccaa

SEQ ID NO: 1555352 - RNA, 19 nt, Artificial Sequence
  Description of Artificial Sequence: Synthetic oligonucleotide
  Sense strand starting at position 3540 of SEQ ID NO: 1245343
uuuaauuucucgugugacu

SEQ ID NO: 1555353 - RNA, 19 nt, Artificial Sequence
  Description of Artificial Sequence: Synthetic oligonucleotide
  Antisense strand to SEQ ID NO: 1555352
agucacacgagaaauuaaa

SEQ ID NO: 1555354 - RNA, 19 nt, Artificial Sequence
  Description of Artificial Sequence: Synthetic oligonucleotide
  Sense strand starting at position 3542 of SEQ ID NO: 1245343
uaauuucucgugugacuuu

SEQ ID NO: 1555355 - RNA, 19 nt, Artificial Sequence
  Description of Artificial Sequence: Synthetic oligonucleotide
  Antisense strand to SEQ ID NO: 1555354
aaagucacacgagaaauua

SEQ ID NO: 1555356 - RNA, 19 nt, Artificial Sequence
  Description of Artificial Sequence: Synthetic oligonucleotide
  Sense strand starting at position 3608 of SEQ ID NO: 1245343
ggguguguuucuucugcag

SEQ ID NO: 1555357 - RNA, 19 nt, Artificial Sequence
  Description of Artificial Sequence: Synthetic oligonucleotide
  Antisense strand to SEQ ID NO: 1555356
cugcagaagaaacacaccc

SEQ ID NO: 1555358 - RNA, 19 nt, Artificial Sequence
  Description of Artificial Sequence: Synthetic oligonucleotide
  Sense strand starting at position 3611 of SEQ ID NO: 1245343
uguguuucuucugcagaaa

SEQ ID NO: 1555359 - RNA, 19 nt, Artificial Sequence
  Description of Artificial Sequence: Synthetic oligonucleotide
  Antisense strand to SEQ ID NO: 1555358
uuucugcagaagaaacaca

SEQ ID NO: 1555360 - RNA, 19 nt, Artificial Sequence
  Description of Artificial Sequence: Synthetic oligonucleotide
  Sense strand starting at position 3612 of SEQ ID NO: 1245343
guguuucuucugcagaaag

SEQ ID NO: 1555361 - RNA, 19 nt, Artificial Sequence
  Description of Artificial Sequence: Synthetic oligonucleotide
  Antisense strand to SEQ ID NO: 1555360
cuuucugcagaagaaacac

SEQ ID NO: 1555362 - RNA, 19 nt, Artificial Sequence
  Description of Artificial Sequence: Synthetic oligonucleotide
  Sense strand starting at position 3614 of SEQ ID NO: 1245343
guuucuucugcagaaagaa

SEQ ID NO: 1555363 - RNA, 19 nt, Artificial Sequence
  Description of Artificial Sequence: Synthetic oligonucleotide
  Antisense strand to SEQ ID NO: 1555362
uucuuucugcagaagaaac

SEQ ID NO: 1555364 - RNA, 19 nt, Artificial Sequence
  Description of Artificial Sequence: Synthetic oligonucleotide
  Sense strand starting at position 3634 of SEQ ID NO: 1245343
aucauuaugcccugagaau

SEQ ID NO: 1555365 - RNA, 19 nt, Artificial Sequence
  Description of Artificial Sequence: Synthetic oligonucleotide
  Antisense strand to SEQ ID NO: 1555364
auucucagggcauaaugau

SEQ ID NO: 1555366 - RNA, 19 nt, Artificial Sequence
  Description of Artificial Sequence: Synthetic oligonucleotide
  Sense strand starting at position 3635 of SEQ ID NO: 1245343
ucauuaugcccugagaauc

SEQ ID NO: 1555367 - RNA, 19 nt, Artificial Sequence
  Description of Artificial Sequence: Synthetic oligonucleotide
  Antisense strand to SEQ ID NO: 1555366
gauucucagggcauaauga

SEQ ID NO: 1555368 - RNA, 19 nt, Artificial Sequence
  Description of Artificial Sequence: Synthetic oligonucleotide
  Sense strand starting at position 3696 of SEQ ID NO: 1245343
ccuuccacaguuuguagaa

SEQ ID NO: 1555369 - RNA, 19 nt, Artificial Sequence
  Description of Artificial Sequence: Synthetic oligonucleotide
  Antisense strand to SEQ ID NO: 1555368
uucuacaaacuguggaagg

SEQ ID NO: 1555370 - RNA, 19 nt, Artificial Sequence
  Description of Artificial Sequence: Synthetic oligonucleotide
  Sense strand starting at position 3718 of SEQ ID NO: 1245343
uagguaaauuugcuguguu

SEQ ID NO: 1555371 - RNA, 19 nt, Artificial Sequence
  Description of Artificial Sequence: Synthetic oligonucleotide
  Antisense strand to SEQ ID NO: 1555370
aacacagcaaauuuaccua

SEQ ID NO: 1555372 - RNA, 19 nt, Artificial Sequence
  Description of Artificial Sequence: Synthetic oligonucleotide
  Sense strand starting at position 3719 of SEQ ID NO: 1245343
agguaaauuugcuguguuu

SEQ ID NO: 1555373 - RNA, 19 nt, Artificial Sequence
  Description of Artificial Sequence: Synthetic oligonucleotide
  Antisense strand to SEQ ID NO: 1555372
aaacacagcaaauuuaccu

SEQ ID NO: 1555374 - RNA, 19 nt, Artificial Sequence
  Description of Artificial Sequence: Synthetic oligonucleotide
  Sense strand starting at position 3747 of SEQ ID NO: 1245343
cagcuacuucuccaggaga

SEQ ID NO: 1555375 - RNA, 19 nt, Artificial Sequence
  Description of Artificial Sequence: Synthetic oligonucleotide
  Antisense strand to SEQ ID NO: 1555374
ucuccuggagaaguagcug

SEQ ID NO: 1555376 - RNA, 19 nt, Artificial Sequence
  Description of Artificial Sequence: Synthetic oligonucleotide
  Sense strand starting at position 3758 of SEQ ID NO: 1245343
ccaggagaaucguagugua

SEQ ID NO: 1555377 - RNA, 19 nt, Artificial Sequence
  Description of Artificial Sequence: Synthetic oligonucleotide
  Antisense strand to SEQ ID NO: 1555376
uacacuacgauucuccugg

SEQ ID NO: 1555378 - RNA, 19 nt, Artificial Sequence
  Description of Artificial Sequence: Synthetic oligonucleotide
  Sense strand starting at position 3761 of SEQ ID NO: 1245343
ggagaaucguaguguaaua

SEQ ID NO: 1555379 - RNA, 19 nt, Artificial Sequence
  Description of Artificial Sequence: Synthetic oligonucleotide
  Antisense strand to SEQ ID NO: 1555378
uauuacacuacgauucucc

SEQ ID NO: 1555380 - RNA, 19 nt, Artificial Sequence
  Description of Artificial Sequence: Synthetic oligonucleotide
  Sense strand starting at position 3763 of SEQ ID NO: 1245343
agaaucguaguguaauacu

SEQ ID NO: 1555381 - RNA, 19 nt, Artificial Sequence
  Description of Artificial Sequence: Synthetic oligonucleotide
  Antisense strand to SEQ ID NO: 1555380
aguauuacacuacgauucu

SEQ ID NO: 1555382 - RNA, 19 nt, Artificial Sequence
  Description of Artificial Sequence: Synthetic oligonucleotide
  Sense strand starting at position 3772 of SEQ ID NO: 1245343
guguaauacuggcaauucu

SEQ ID NO: 1555383 - RNA, 19 nt, Artificial Sequence
  Description of Artificial Sequence: Synthetic oligonucleotide
  Antisense strand to SEQ ID NO: 1555382
agaauugccaguauuacac

SEQ ID NO: 1555384 - RNA, 19 nt, Artificial Sequence
  Description of Artificial Sequence: Synthetic oligonucleotide
  Sense strand starting at position 3794 of SEQ ID NO: 1245343
gagcuagaaugaggauuau

SEQ ID NO: 1555385 - RNA, 19 nt, Artificial Sequence
  Description of Artificial Sequence: Synthetic oligonucleotide
  Antisense strand to SEQ ID NO: 1555384
auaauccucauucuagcuc

SEQ ID NO: 1555386 - RNA, 19 nt, Artificial Sequence
  Description of Artificial Sequence: Synthetic oligonucleotide
  Sense strand starting at position 3860 of SEQ ID NO: 1245343
cuccuuaccuuaugugauc

SEQ ID NO: 1555387 - RNA, 19 nt, Artificial Sequence
  Description of Artificial Sequence: Synthetic oligonucleotide
  Antisense strand to SEQ ID NO: 1555386
gaucacauaagguaaggag

SEQ ID NO: 1555388 - RNA, 19 nt, Artificial Sequence
  Description of Artificial Sequence: Synthetic oligonucleotide
  Sense strand starting at position 2405 of SEQ ID NO: 1245344
acucuuuaccugggauuga

SEQ ID NO: 1555389 - RNA, 19 nt, Artificial Sequence
  Description of Artificial Sequence: Synthetic oligonucleotide
  Antisense strand to SEQ ID NO: 1555388
ucaaucccagguaaagagu

SEQ ID NO: 1555390 - RNA, 19 nt, Artificial Sequence
  Description of Artificial Sequence: Synthetic oligonucleotide
  Sense strand starting at position 2415 of SEQ ID NO: 1245344
ugggauugacguuguguga

SEQ ID NO: 1555391 - RNA, 19 nt, Artificial Sequence
  Description of Artificial Sequence: Synthetic oligonucleotide
  Antisense strand to SEQ ID NO: 1555390
ucacacaacgucaauccca

SEQ ID NO: 1555392 - RNA, 19 nt, Artificial Sequence
  Description of Artificial Sequence: Synthetic oligonucleotide
  Sense strand starting at position 3607 of SEQ ID NO: 1245344
ggagaauugagcuguccug

SEQ ID NO: 1555393 - RNA, 19 nt, Artificial Sequence
  Description of Artificial Sequence: Synthetic oligonucleotide
  Antisense strand to SEQ ID NO: 1555392
caggacagcucaauucucc

SEQ ID NO: 1555394 - RNA, 19 nt, Artificial Sequence
  Description of Artificial Sequence: Synthetic oligonucleotide
  Sense strand starting at position 49 of SEQ ID NO: 1245345
cgaagaguagugugcaaag

SEQ ID NO: 1555395 - RNA, 19 nt, Artificial Sequence
  Description of Artificial Sequence: Synthetic oligonucleotide
  Antisense strand to SEQ ID NO: 1555394
cuuugcacacuacucuucg

SEQ ID NO: 1555396 - RNA, 19 nt, Artificial Sequence
  Description of Artificial Sequence: Synthetic oligonucleotide
  Sense strand starting at position 51 of SEQ ID NO: 1245345
aagaguagugugcaaagua

SEQ ID NO: 1555397 - RNA, 19 nt, Artificial Sequence
  Description of Artificial Sequence: Synthetic oligonucleotide
  Antisense strand to SEQ ID NO: 1555396
uacuuugcacacuacucuu

SEQ ID NO: 1555398 - RNA, 19 nt, Artificial Sequence
  Description of Artificial Sequence: Synthetic oligonucleotide
  Sense strand starting at position 65 of SEQ ID NO: 1245345
aaguauuaguagucucagu

SEQ ID NO: 1555399 - RNA, 19 nt, Artificial Sequence
  Description of Artificial Sequence: Synthetic oligonucleotide
  Antisense strand to SEQ ID NO: 1555398
acugagacuacuaauacuu

SEQ ID NO: 1555400 - RNA, 19 nt, Artificial Sequence
  Description of Artificial Sequence: Synthetic oligonucleotide
  Sense strand starting at position 314 of SEQ ID NO: 1245345
uuauuacuguccuuuagau

SEQ ID NO: 1555401 - RNA, 19 nt, Artificial Sequence
  Description of Artificial Sequence: Synthetic oligonucleotide
  Antisense strand to SEQ ID NO: 1555400
aucuaaaggacaguaauaa

SEQ ID NO: 1555402 - RNA, 19 nt, Artificial Sequence
  Description of Artificial Sequence: Synthetic oligonucleotide
  Sense strand starting at position 316 of SEQ ID NO: 1245345
auuacuguccuuuagauuc

SEQ ID NO: 1555403 - RNA, 19 nt, Artificial Sequence
  Description of Artificial Sequence: Synthetic oligonucleotide
  Antisense strand to SEQ ID NO: 1555402
gaaucuaaaggacaguaau

SEQ ID NO: 1555404 - RNA, 19 nt, Artificial Sequence
  Description of Artificial Sequence: Synthetic oligonucleotide
  Sense strand starting at position 409 of SEQ ID NO: 1245345
uucuuaccgcacugaaauc

SEQ ID NO: 1555405 - RNA, 19 nt, Artificial Sequence
  Description of Artificial Sequence: Synthetic oligonucleotide
  Antisense strand to SEQ ID NO: 1555404
gauuucagugcgguaagaa

SEQ ID NO: 1555406 - RNA, 19 nt, Artificial Sequence
  Description of Artificial Sequence: Synthetic oligonucleotide
  Sense strand starting at position 442 of SEQ ID NO: 1245345
gcucuuuguccgucccuaa

SEQ ID NO: 1555407 - RNA, 19 nt, Artificial Sequence
  Description of Artificial Sequence: Synthetic oligonucleotide
  Antisense strand to SEQ ID NO: 1555406
uuagggacggacaaagagc

SEQ ID NO: 1555408 - RNA, 19 nt, Artificial Sequence
  Description of Artificial Sequence: Synthetic oligonucleotide
  Sense strand starting at position 543 of SEQ ID NO: 1245345
agucccaauccuuggagaa

SEQ ID NO: 1555409 - RNA, 19 nt, Artificial Sequence
  Description of Artificial Sequence: Synthetic oligonucleotide
  Antisense strand to SEQ ID NO: 1555408
uucuccaaggauugggacu

SEQ ID NO: 1555410 - RNA, 19 nt, Artificial Sequence
  Description of Artificial Sequence: Synthetic oligonucleotide
  Sense strand starting at position 544 of SEQ ID NO: 1245345
gucccaauccuuggagaaa

SEQ ID NO: 1555411 - RNA, 19 nt, Artificial Sequence
  Description of Artificial Sequence: Synthetic oligonucleotide
  Antisense strand to SEQ ID NO: 1555410
uuucuccaaggauugggac

SEQ ID NO: 1555412 - RNA, 19 nt, Artificial Sequence
  Description of Artificial Sequence: Synthetic oligonucleotide
  Sense strand starting at position 647 of SEQ ID NO: 1245345
ggagacuuguuguuggguu

SEQ ID NO: 1555413 - RNA, 19 nt, Artificial Sequence
  Description of Artificial Sequence: Synthetic oligonucleotide
  Antisense strand to SEQ ID NO: 1555412
aacccaacaacaagucucc

SEQ ID NO: 1555414 - RNA, 19 nt, Artificial Sequence
  Description of Artificial Sequence: Synthetic oligonucleotide
  Sense strand starting at position 864 of SEQ ID NO: 1245345
gcgagaaaugaauggauca

SEQ ID NO: 1555415 - RNA, 19 nt, Artificial Sequence
  Description of Artificial Sequence: Synthetic oligonucleotide
  Antisense strand to SEQ ID NO: 1555414
ugauccauucauuucucgc

SEQ ID NO: 1555416 - RNA, 19 nt, Artificial Sequence
  Description of Artificial Sequence: Synthetic oligonucleotide
  Sense strand starting at position 871 of SEQ ID NO: 1245345
augaauggaucacagagaa

SEQ ID NO: 1555417 - RNA, 19 nt, Artificial Sequence
  Description of Artificial Sequence: Synthetic oligonucleotide
  Antisense strand to SEQ ID NO: 1555416
uucucugugauccauucau

SEQ ID NO: 1555418 - RNA, 19 nt, Artificial Sequence
  Description of Artificial Sequence: Synthetic oligonucleotide
  Sense strand starting at position 893 of SEQ ID NO: 1245345
agaaacuacugagaacgau

SEQ ID NO: 1555419 - RNA, 19 nt, Artificial Sequence
  Description of Artificial Sequence: Synthetic oligonucleotide
  Antisense strand to SEQ ID NO: 1555418
aucguucucaguaguuucu

SEQ ID NO: 1555420 - RNA, 19 nt, Artificial Sequence
  Description of Artificial Sequence: Synthetic oligonucleotide
  Sense strand starting at position 1108 of SEQ ID NO: 1245345
agggucggguccucuaauu

SEQ ID NO: 1555421 - RNA, 19 nt, Artificial Sequence
  Description of Artificial Sequence: Synthetic oligonucleotide
  Antisense strand to SEQ ID NO: 1555420
aauuagaggacccgacccu

SEQ ID NO: 1555422 - RNA, 19 nt, Artificial Sequence
  Description of Artificial Sequence: Synthetic oligonucleotide
  Sense strand starting at position 1134 of SEQ ID NO: 1245345
acccuaauuugugaaagaa

SEQ ID NO: 1555423 - RNA, 19 nt, Artificial Sequence
  Description of Artificial Sequence: Synthetic oligonucleotide
  Antisense strand to SEQ ID NO: 1555422
uucuuucacaaauuagggu

SEQ ID NO: 1555424 - RNA, 19 nt, Artificial Sequence
  Description of Artificial Sequence: Synthetic oligonucleotide
  Sense strand starting at position 1851 of SEQ ID NO: 1245345
cucagaucgucaguuacaa

SEQ ID NO: 1555425 - RNA, 19 nt, Artificial Sequence
  Description of Artificial Sequence: Synthetic oligonucleotide
  Antisense strand to SEQ ID NO: 1555424
uuguaacugacgaucugag

SEQ ID NO: 1555426 - RNA, 19 nt, Artificial Sequence
  Description of Artificial Sequence: Synthetic oligonucleotide
  Sense strand starting at position 2010 of SEQ ID NO: 1245345
aguuuauacuaggcugcaa

SEQ ID NO: 1555427 - RNA, 19 nt, Artificial Sequence
  Description of Artificial Sequence: Synthetic oligonucleotide
  Antisense strand to SEQ ID NO: 1555426
uugcagccuaguauaaacu

SEQ ID NO: 1555428 - RNA, 19 nt, Artificial Sequence
  Description of Artificial Sequence: Synthetic oligonucleotide
  Sense strand starting at position 2012 of SEQ ID NO: 1245345
uuuauacuaggcugcaaau

SEQ ID NO: 1555429 - RNA, 19 nt, Artificial Sequence
  Description of Artificial Sequence: Synthetic oligonucleotide
  Antisense strand to SEQ ID NO: 1555428
auuugcagccuaguauaaa

SEQ ID NO: 1555430 - RNA, 19 nt, Artificial Sequence
  Description of Artificial Sequence: Synthetic oligonucleotide
  Sense strand starting at position 2025 of SEQ ID NO: 1245345
gcaaauacacgugaugcaa

SEQ ID NO: 1555431 - RNA, 19 nt, Artificial Sequence
  Description of Artificial Sequence: Synthetic oligonucleotide
  Antisense strand to SEQ ID NO: 1555430
uugcaucacguguauuugc

SEQ ID NO: 1555432 - RNA, 19 nt, Artificial Sequence
  Description of Artificial Sequence: Synthetic oligonucleotide
  Sense strand starting at position 2188 of SEQ ID NO: 1245345
agaauaguauaacugcaaa

SEQ ID NO: 1555433 - RNA, 19 nt, Artificial Sequence
  Description of Artificial Sequence: Synthetic oligonucleotide
  Antisense strand to SEQ ID NO: 1555432
uuugcaguuauacuauucu

SEQ ID NO: 1555434 - RNA, 19 nt, Artificial Sequence
  Description of Artificial Sequence: Synthetic oligonucleotide
  Sense strand starting at position 2593 of SEQ ID NO: 1245345
aaacaucgggaucgacauu

SEQ ID NO: 1555435 - RNA, 19 nt, Artificial Sequence
  Description of Artificial Sequence: Synthetic oligonucleotide
  Antisense strand to SEQ ID NO: 1555434
aaugucgaucccgauguuu

SEQ ID NO: 1555436 - RNA, 19 nt, Artificial Sequence
  Description of Artificial Sequence: Synthetic oligonucleotide
  Sense strand starting at position 2655 of SEQ ID NO: 1245345
auugaaacguuaccuuaaa

SEQ ID NO: 1555437 - RNA, 19 nt, Artificial Sequence
  Description of Artificial Sequence: Synthetic oligonucleotide
  Antisense strand to SEQ ID NO: 1555436
uuuaagguaacguuucaau

SEQ ID NO: 1555438 - RNA, 19 nt, Artificial Sequence
  Description of Artificial Sequence: Synthetic oligonucleotide
  Sense strand starting at position 2656 of SEQ ID NO: 1245345
uugaaacguuaccuuaaau

SEQ ID NO: 1555439 - RNA, 19 nt, Artificial Sequence
  Description of Artificial Sequence: Synthetic oligonucleotide
  Antisense strand to SEQ ID NO: 1555438
auuuaagguaacguuucaa

SEQ ID NO: 1555440 - RNA, 19 nt, Artificial Sequence
  Description of Artificial Sequence: Synthetic oligonucleotide
  Sense strand starting at position 2742 of SEQ ID NO: 1245345
aguacuuaguaucucacau

SEQ ID NO: 1555441 - RNA, 19 nt, Artificial Sequence
  Description of Artificial Sequence: Synthetic oligonucleotide
  Antisense strand to SEQ ID NO: 1555440
augugagauacuaaguacu

SEQ ID NO: 1555442 - RNA, 19 nt, Artificial Sequence
  Description of Artificial Sequence: Synthetic oligonucleotide
  Sense strand starting at position 2794 of SEQ ID NO: 1245345
aguccugcuccagggauau

SEQ ID NO: 1555443 - RNA, 19 nt, Artificial Sequence
  Description of Artificial Sequence: Synthetic oligonucleotide
  Antisense strand to SEQ ID NO: 1555442
auaucccuggagcaggacu

SEQ ID NO: 1555444 - RNA, 19 nt, Artificial Sequence
  Description of Artificial Sequence: Synthetic oligonucleotide
  Sense strand starting at position 2981 of SEQ ID NO: 1245345
aaacaauucuuguugguga

SEQ ID NO: 1555445 - RNA, 19 nt, Artificial Sequence
  Description of Artificial Sequence: Synthetic oligonucleotide
  Antisense strand to SEQ ID NO: 1555444
ucaccaacaagaauuguuu

SEQ ID NO: 1555446 - RNA, 19 nt, Artificial Sequence
  Description of Artificial Sequence: Synthetic oligonucleotide
  Sense strand starting at position 2983 of SEQ ID NO: 1245345
acaauucuuguuggugauu

SEQ ID NO: 1555447 - RNA, 19 nt, Artificial Sequence
  Description of Artificial Sequence: Synthetic oligonucleotide
  Antisense strand to SEQ ID NO: 1555446
aaucaccaacaagaauugu

SEQ ID NO: 1555448 - RNA, 19 nt, Artificial Sequence
  Description of Artificial Sequence: Synthetic oligonucleotide
  Sense strand starting at position 3021 of SEQ ID NO: 1245345
gucuuaaacuuguuccaag

SEQ ID NO: 1555449 - RNA, 19 nt, Artificial Sequence
  Description of Artificial Sequence: Synthetic oligonucleotide
  Antisense strand to SEQ ID NO: 1555448
cuuggaacaaguuuaagac

SEQ ID NO: 1555450 - RNA, 19 nt, Artificial Sequence
  Description of Artificial Sequence: Synthetic oligonucleotide
  Sense strand starting at position 3043 of SEQ ID NO: 1245345
agaggugucucaucaucau

SEQ ID NO: 1555451 - RNA, 19 nt, Artificial Sequence
  Description of Artificial Sequence: Synthetic oligonucleotide
  Antisense strand to SEQ ID NO: 1555450
augaugaugagacaccucu

SEQ ID NO: 1555452 - RNA, 19 nt, Artificial Sequence
  Description of Artificial Sequence: Synthetic oligonucleotide
  Sense strand starting at position 3116 of SEQ ID NO: 1245345
auaauagguuucccugaaa

SEQ ID NO: 1555453 - RNA, 19 nt, Artificial Sequence
  Description of Artificial Sequence: Synthetic oligonucleotide
  Antisense strand to SEQ ID NO: 1555452
uuucagggaaaccuauuau

SEQ ID NO: 1555454 - RNA, 19 nt, Artificial Sequence
  Description of Artificial Sequence: Synthetic oligonucleotide
  Sense strand starting at position 3245 of SEQ ID NO: 1245345
gcgaccauagagugguaaa

SEQ ID NO: 1555455 - RNA, 19 nt, Artificial Sequence
  Description of Artificial Sequence: Synthetic oligonucleotide
  Antisense strand to SEQ ID NO: 1555454
uuuaccacucuauggucgc

SEQ ID NO: 1555456 - RNA, 19 nt, Artificial Sequence
  Description of Artificial Sequence: Synthetic oligonucleotide
  Sense strand starting at position 3246 of SEQ ID NO: 1245345
cgaccauagagugguaaac

SEQ ID NO: 1555457 - RNA, 19 nt, Artificial Sequence
  Description of Artificial Sequence: Synthetic oligonucleotide
  Antisense strand to SEQ ID NO: 1555456
guuuaccacucuauggucg

SEQ ID NO: 1555458 - RNA, 19 nt, Artificial Sequence
  Description of Artificial Sequence: Synthetic oligonucleotide
  Sense strand starting at position 3505 of SEQ ID NO: 1245345
cacagacuuccgcagggaa

SEQ ID NO: 1555459 - RNA, 19 nt, Artificial Sequence
  Description of Artificial Sequence: Synthetic oligonucleotide
  Antisense strand to SEQ ID NO: 1555458
uucccugcggaagucugug

SEQ ID NO: 1555460 - RNA, 19 nt, Artificial Sequence
  Description of Artificial Sequence: Synthetic oligonucleotide
  Sense strand starting at position 3507 of SEQ ID NO: 1245345
cagacuuccgcagggaagu

SEQ ID NO: 1555461 - RNA, 19 nt, Artificial Sequence
  Description of Artificial Sequence: Synthetic oligonucleotide
  Antisense strand to SEQ ID NO: 1555460
acuucccugcggaagucug

SEQ ID NO: 1555462 - RNA, 19 nt, Artificial Sequence
  Description of Artificial Sequence: Synthetic oligonucleotide
  Sense strand starting at position 3618 of SEQ ID NO: 1245345
gagccagauuucucagcga

SEQ ID NO: 1555463 - RNA, 19 nt, Artificial Sequence
  Description of Artificial Sequence: Synthetic oligonucleotide
  Antisense strand to SEQ ID NO: 1555462
ucgcugagaaaucuggcuc

SEQ ID NO: 1555464 - RNA, 19 nt, Artificial Sequence
  Description of Artificial Sequence: Synthetic oligonucleotide
  Sense strand starting at position 3622 of SEQ ID NO: 1245345
cagauuucucagcgagccu

SEQ ID NO: 1555465 - RNA, 19 nt, Artificial Sequence
  Description of Artificial Sequence: Synthetic oligonucleotide
  Antisense strand to SEQ ID NO: 1555464
aggcucgcugagaaaucug

SEQ ID NO: 1555466 - RNA, 19 nt, Artificial Sequence
  Description of Artificial Sequence: Synthetic oligonucleotide
  Sense strand starting at position 3774 of SEQ ID NO: 1245345
agucuucacuuggcgaaga

SEQ ID NO: 1555467 - RNA, 19 nt, Artificial Sequence
  Description of Artificial Sequence: Synthetic oligonucleotide
  Antisense strand to SEQ ID NO: 1555466
ucuucgccaagugaagacu

SEQ ID NO: 1555468 - RNA, 19 nt, Artificial Sequence
  Description of Artificial Sequence: Synthetic oligonucleotide
  Sense strand starting at position 3798 of SEQ ID NO: 1245345
aucuauugcuuuguagacu

SEQ ID NO: 1555469 - RNA, 19 nt, Artificial Sequence
  Description of Artificial Sequence: Synthetic oligonucleotide
  Antisense strand to SEQ ID NO: 1555468
agucuacaaagcaauagau

SEQ ID NO: 1555470 - RNA, 19 nt, Artificial Sequence
  Description of Artificial Sequence: Synthetic oligonucleotide
  Sense strand starting at position 3809 of SEQ ID NO: 1245345
uguagacucaaauguaguu

SEQ ID NO: 1555471 - RNA, 19 nt, Artificial Sequence
  Description of Artificial Sequence: Synthetic oligonucleotide
  Antisense strand to SEQ ID NO: 1555470
aacuacauuugagucuaca

SEQ ID NO: 1555472 - RNA, 19 nt, Artificial Sequence
  Description of Artificial Sequence: Synthetic oligonucleotide
  Sense strand starting at position 3908 of SEQ ID NO: 1245345
gcaaauaacgcccacuuua

SEQ ID NO: 1555473 - RNA, 19 nt, Artificial Sequence
  Description of Artificial Sequence: Synthetic oligonucleotide
  Antisense strand to SEQ ID NO: 1555472
uaaagugggcguuauuugc

SEQ ID NO: 1555474 - RNA, 19 nt, Artificial Sequence
  Description of Artificial Sequence: Synthetic oligonucleotide
  Sense strand starting at position 325 of SEQ ID NO: 1245346
acaguucuauuagcuauua

SEQ ID NO: 1555475 - RNA, 19 nt, Artificial Sequence
  Description of Artificial Sequence: Synthetic oligonucleotide
  Antisense strand to SEQ ID NO: 1555474
uaauagcuaauagaacugu

SEQ ID NO: 1555476 - RNA, 19 nt, Artificial Sequence
  Description of Artificial Sequence: Synthetic oligonucleotide
  Sense strand starting at position 460 of SEQ ID NO: 1245346
uuagaaguagcagggaauu

SEQ ID NO: 1555477 - RNA, 19 nt, Artificial Sequence
  Description of Artificial Sequence: Synthetic oligonucleotide
  Antisense strand to SEQ ID NO: 1555476
aauucccugcuacuucuaa

SEQ ID NO: 1555478 - RNA, 19 nt, Artificial Sequence
  Description of Artificial Sequence: Synthetic oligonucleotide
  Sense strand starting at position 540 of SEQ ID NO: 1245346
ccaucuaguguggaggaau

SEQ ID NO: 1555479 - RNA, 19 nt, Artificial Sequence
  Description of Artificial Sequence: Synthetic oligonucleotide
  Antisense strand to SEQ ID NO: 1555478
auuccuccacacuagaugg

SEQ ID NO: 1555480 - RNA, 19 nt, Artificial Sequence
  Description of Artificial Sequence: Synthetic oligonucleotide
  Sense strand starting at position 552 of SEQ ID NO: 1245346
gaggaauaggugcaagcau

SEQ ID NO: 1555481 - RNA, 19 nt, Artificial Sequence
  Description of Artificial Sequence: Synthetic oligonucleotide
  Antisense strand to SEQ ID NO: 1555480
augcuugcaccuauuccuc

SEQ ID NO: 1555482 - RNA, 19 nt, Artificial Sequence
  Description of Artificial Sequence: Synthetic oligonucleotide
  Sense strand starting at position 582 of SEQ ID NO: 1245346
uaguuugggccauacugaa

SEQ ID NO: 1555483 - RNA, 19 nt, Artificial Sequence
  Description of Artificial Sequence: Synthetic oligonucleotide
  Antisense strand to SEQ ID NO: 1555482
uucaguauggcccaaacua

SEQ ID NO: 1555484 - RNA, 19 nt, Artificial Sequence
  Description of Artificial Sequence: Synthetic oligonucleotide
  Sense strand starting at position 657 of SEQ ID NO: 1245346
ugagucacaugauugcaau

SEQ ID NO: 1555485 - RNA, 19 nt, Artificial Sequence
  Description of Artificial Sequence: Synthetic oligonucleotide
  Antisense strand to SEQ ID NO: 1555484
auugcaaucaugugacuca

SEQ ID NO: 1555486 - RNA, 19 nt, Artificial Sequence
  Description of Artificial Sequence: Synthetic oligonucleotide
  Sense strand starting at position 711 of SEQ ID NO: 1245346
gaccuugugguagggagua

SEQ ID NO: 1555487 - RNA, 19 nt, Artificial Sequence
  Description of Artificial Sequence: Synthetic oligonucleotide
  Antisense strand to SEQ ID NO: 1555486
uacucccuaccacaagguc

SEQ ID NO: 1555488 - RNA, 19 nt, Artificial Sequence
  Description of Artificial Sequence: Synthetic oligonucleotide
  Sense strand starting at position 800 of SEQ ID NO: 1245346
gaaagauguuaauuacgua

SEQ ID NO: 1555489 - RNA, 19 nt, Artificial Sequence
  Description of Artificial Sequence: Synthetic oligonucleotide
  Antisense strand to SEQ ID NO: 1555488
uacguaauuaacaucuuuc

SEQ ID NO: 1555490 - RNA, 19 nt, Artificial Sequence
  Description of Artificial Sequence: Synthetic oligonucleotide
  Sense strand starting at position 805 of SEQ ID NO: 1245346
auguuaauuacguagaagu

SEQ ID NO: 1555491 - RNA, 19 nt, Artificial Sequence
  Description of Artificial Sequence: Synthetic oligonucleotide
  Antisense strand to SEQ ID NO: 1555490
acuucuacguaauuaacau

SEQ ID NO: 1555492 - RNA, 19 nt, Artificial Sequence
  Description of Artificial Sequence: Synthetic oligonucleotide
  Sense strand starting at position 807 of SEQ ID NO: 1245346
guuaauuacguagaaguga

SEQ ID NO: 1555493 - RNA, 19 nt, Artificial Sequence
  Description of Artificial Sequence: Synthetic oligonucleotide
  Antisense strand to SEQ ID NO: 1555492
ucacuucuacguaauuaac

SEQ ID NO: 1555494 - RNA, 19 nt, Artificial Sequence
  Description of Artificial Sequence: Synthetic oligonucleotide
  Sense strand starting at position 980 of SEQ ID NO: 1245346
uugagaugccagcaugaca

SEQ ID NO: 1555495 - RNA, 19 nt, Artificial Sequence
  Description of Artificial Sequence: Synthetic oligonucleotide
  Antisense strand to SEQ ID NO: 1555494
ugucaugcuggcaucucaa

SEQ ID NO: 1555496 - RNA, 19 nt, Artificial Sequence
  Description of Artificial Sequence: Synthetic oligonucleotide
  Sense strand starting at position 997 of SEQ ID NO: 1245346
cauccaaauggagguguau

SEQ ID NO: 1555497 - RNA, 19 nt, Artificial Sequence
  Description of Artificial Sequence: Synthetic oligonucleotide
  Antisense strand to SEQ ID NO: 1555496
auacaccuccauuuggaug

SEQ ID NO: 1555498 - RNA, 19 nt, Artificial Sequence
  Description of Artificial Sequence: Synthetic oligonucleotide
  Sense strand starting at position 999 of SEQ ID NO: 1245346
uccaaauggagguguauua

SEQ ID NO: 1555499 - RNA, 19 nt, Artificial Sequence
  Description of Artificial Sequence: Synthetic oligonucleotide
  Antisense strand to SEQ ID NO: 1555498
uaauacaccuccauuugga

SEQ ID NO: 1555500 - RNA, 19 nt, Artificial Sequence
  Description of Artificial Sequence: Synthetic oligonucleotide
  Sense strand starting at position 1035 of SEQ ID NO: 1245346
agugguuagggcuggagau

SEQ ID NO: 1555501 - RNA, 19 nt, Artificial Sequence
  Description of Artificial Sequence: Synthetic oligonucleotide
  Antisense strand to SEQ ID NO: 1555500
aucuccagcccuaaccacu

SEQ ID NO: 1555502 - RNA, 19 nt, Artificial Sequence
  Description of Artificial Sequence: Synthetic oligonucleotide
  Sense strand starting at position 1075 of SEQ ID NO: 1245346
cuggcagaguucuuggaga

SEQ ID NO: 1555503 - RNA, 19 nt, Artificial Sequence
  Description of Artificial Sequence: Synthetic oligonucleotide
  Antisense strand to SEQ ID NO: 1555502
ucuccaagaacucugccag

SEQ ID NO: 1555504 - RNA, 19 nt, Artificial Sequence
  Description of Artificial Sequence: Synthetic oligonucleotide
  Sense strand starting at position 1131 of SEQ ID NO: 1245346
ccaacuuuagaauguugau

SEQ ID NO: 1555505 - RNA, 19 nt, Artificial Sequence
  Description of Artificial Sequence: Synthetic oligonucleotide
  Antisense strand to SEQ ID NO: 1555504
aucaacauucuaaaguugg

SEQ ID NO: 1555506 - RNA, 19 nt, Artificial Sequence
  Description of Artificial Sequence: Synthetic oligonucleotide
  Sense strand starting at position 1201 of SEQ ID NO: 1245346
uguacagucucagcaagaa

SEQ ID NO: 1555507 - RNA, 19 nt, Artificial Sequence
  Description of Artificial Sequence: Synthetic oligonucleotide
  Antisense strand to SEQ ID NO: 1555506
uucuugcugagacuguaca

SEQ ID NO: 1555508 - RNA, 19 nt, Artificial Sequence
  Description of Artificial Sequence: Synthetic oligonucleotide
  Sense strand starting at position 1612 of SEQ ID NO: 1245346
agaaacuaccguuauguuu

SEQ ID NO: 1555509 - RNA, 19 nt, Artificial Sequence
  Description of Artificial Sequence: Synthetic oligonucleotide
  Antisense strand to SEQ ID NO: 1555508
aaacauaacgguaguuucu

SEQ ID NO: 1555510 - RNA, 19 nt, Artificial Sequence
  Description of Artificial Sequence: Synthetic oligonucleotide
  Sense strand starting at position 1638 of SEQ ID NO: 1245346
guggccaugggagaucauu

SEQ ID NO: 1555511 - RNA, 19 nt, Artificial Sequence
  Description of Artificial Sequence: Synthetic oligonucleotide
  Antisense strand to SEQ ID NO: 1555510
aaugaucucccauggccac

SEQ ID NO: 1555512 - RNA, 19 nt, Artificial Sequence
  Description of Artificial Sequence: Synthetic oligonucleotide
  Sense strand starting at position 1731 of SEQ ID NO: 1245346
gcucgaguagcaguucuca

SEQ ID NO: 1555513 - RNA, 19 nt, Artificial Sequence
  Description of Artificial Sequence: Synthetic oligonucleotide
  Antisense strand to SEQ ID NO: 1555512
ugagaacugcuacucgagc

SEQ ID NO: 1555514 - RNA, 19 nt, Artificial Sequence
  Description of Artificial Sequence: Synthetic oligonucleotide
  Sense strand starting at position 1760 of SEQ ID NO: 1245346
auguuacaauguccugaga

SEQ ID NO: 1555515 - RNA, 19 nt, Artificial Sequence
  Description of Artificial Sequence: Synthetic oligonucleotide
  Antisense strand to SEQ ID NO: 1555514
ucucaggacauuguaacau

SEQ ID NO: 1555516 - RNA, 19 nt, Artificial Sequence
  Description of Artificial Sequence: Synthetic oligonucleotide
  Sense strand starting at position 1763 of SEQ ID NO: 1245346
uuacaauguccugagaagu

SEQ ID NO: 1555517 - RNA, 19 nt, Artificial Sequence
  Description of Artificial Sequence: Synthetic oligonucleotide
  Antisense strand to SEQ ID NO: 1555516
acuucucaggacauuguaa

SEQ ID NO: 1555518 - RNA, 19 nt, Artificial Sequence
  Description of Artificial Sequence: Synthetic oligonucleotide
  Sense strand starting at position 1967 of SEQ ID NO: 1245346
gagaaugggcacuguucga

SEQ ID NO: 1555519 - RNA, 19 nt, Artificial Sequence
  Description of Artificial Sequence: Synthetic oligonucleotide
  Antisense strand to SEQ ID NO: 1555518
ucgaacagugcccauucuc

SEQ ID NO: 1555520 - RNA, 19 nt, Artificial Sequence
  Description of Artificial Sequence: Synthetic oligonucleotide
  Sense strand starting at position 1986 of SEQ ID NO: 1245346
aaaggaaugcugcacaagu

SEQ ID NO: 1555521 - RNA, 19 nt, Artificial Sequence
  Description of Artificial Sequence: Synthetic oligonucleotide
  Antisense strand to SEQ ID NO: 1555520
acuugugcagcauuccuuu

SEQ ID NO: 1555522 - RNA, 19 nt, Artificial Sequence
  Description of Artificial Sequence: Synthetic oligonucleotide
  Sense strand starting at position 2026 of SEQ ID NO: 1245346
gagucuacuguguaaccca

SEQ ID NO: 1555523 - RNA, 19 nt, Artificial Sequence
  Description of Artificial Sequence: Synthetic oligonucleotide
  Antisense strand to SEQ ID NO: 1555522
uggguuacacaguagacuc

SEQ ID NO: 1555524 - RNA, 19 nt, Artificial Sequence
  Description of Artificial Sequence: Synthetic oligonucleotide
  Sense strand starting at position 2108 of SEQ ID NO: 1245346
uguacauauugagcauauu

SEQ ID NO: 1555525 - RNA, 19 nt, Artificial Sequence
  Description of Artificial Sequence: Synthetic oligonucleotide
  Antisense strand to SEQ ID NO: 1555524
aauaugcucaauauguaca

SEQ ID NO: 1555526 - RNA, 19 nt, Artificial Sequence
  Description of Artificial Sequence: Synthetic oligonucleotide
  Sense strand starting at position 2109 of SEQ ID NO: 1245346
guacauauugagcauauua

SEQ ID NO: 1555527 - RNA, 19 nt, Artificial Sequence
  Description of Artificial Sequence: Synthetic oligonucleotide
  Antisense strand to SEQ ID NO: 1555526
uaauaugcucaauauguac

SEQ ID NO: 1555528 - RNA, 19 nt, Artificial Sequence
  Description of Artificial Sequence: Synthetic oligonucleotide
  Sense strand starting at position 2313 of SEQ ID NO: 1245346
auggcaugauaggcauaaa

SEQ ID NO: 1555529 - RNA, 19 nt, Artificial Sequence
  Description of Artificial Sequence: Synthetic oligonucleotide
  Antisense strand to SEQ ID NO: 1555528
uuuaugccuaucaugccau

SEQ ID NO: 1555530 - RNA, 19 nt, Artificial Sequence
  Description of Artificial Sequence: Synthetic oligonucleotide
  Sense strand starting at position 2316 of SEQ ID NO: 1245346
gcaugauaggcauaaacua

SEQ ID NO: 1555531 - RNA, 19 nt, Artificial Sequence
  Description of Artificial Sequence: Synthetic oligonucleotide
  Antisense strand to SEQ ID NO: 1555530
uaguuuaugccuaucaugc

SEQ ID NO: 1555532 - RNA, 19 nt, Artificial Sequence
  Description of Artificial Sequence: Synthetic oligonucleotide
  Sense strand starting at position 2403 of SEQ ID NO: 1245346
gucucagucucauccuaag

SEQ ID NO: 1555533 - RNA, 19 nt, Artificial Sequence
  Description of Artificial Sequence: Synthetic oligonucleotide
  Antisense strand to SEQ ID NO: 1555532
cuuaggaugagacugagac

SEQ ID NO: 1555534 - RNA, 19 nt, Artificial Sequence
  Description of Artificial Sequence: Synthetic oligonucleotide
  Sense strand starting at position 2428 of SEQ ID NO: 1245346
uaaauuaauuggucuagga

SEQ ID NO: 1555535 - RNA, 19 nt, Artificial Sequence
  Description of Artificial Sequence: Synthetic oligonucleotide
  Antisense strand to SEQ ID NO: 1555534
uccuagaccaauuaauuua

SEQ ID NO: 1555536 - RNA, 19 nt, Artificial Sequence
  Description of Artificial Sequence: Synthetic oligonucleotide
  Sense strand starting at position 2432 of SEQ ID NO: 1245346
uuaauuggucuaggagugu

SEQ ID NO: 1555537 - RNA, 19 nt, Artificial Sequence
  Description of Artificial Sequence: Synthetic oligonucleotide
  Antisense strand to SEQ ID NO: 1555536
acacuccuagaccaauuaa

SEQ ID NO: 1555538 - RNA, 19 nt, Artificial Sequence
  Description of Artificial Sequence: Synthetic oligonucleotide
  Sense strand starting at position 2450 of SEQ ID NO: 1245346
uggcuugggcauugagauu

SEQ ID NO: 1555539 - RNA, 19 nt, Artificial Sequence
  Description of Artificial Sequence: Synthetic oligonucleotide
  Antisense strand to SEQ ID NO: 1555538
aaucucaaugcccaagcca

SEQ ID NO: 1555540 - RNA, 19 nt, Artificial Sequence
  Description of Artificial Sequence: Synthetic oligonucleotide
  Sense strand starting at position 2510 of SEQ ID NO: 1245346
ugagacuuauggccauaga

SEQ ID NO: 1555541 - RNA, 19 nt, Artificial Sequence
  Description of Artificial Sequence: Synthetic oligonucleotide
  Antisense strand to SEQ ID NO: 1555540
ucuauggccauaagucuca

SEQ ID NO: 1555542 - RNA, 19 nt, Artificial Sequence
  Description of Artificial Sequence: Synthetic oligonucleotide
  Sense strand starting at position 2736 of SEQ ID NO: 1245346
auugcuuugggacgaauaa

SEQ ID NO: 1555543 - RNA, 19 nt, Artificial Sequence
  Description of Artificial Sequence: Synthetic oligonucleotide
  Antisense strand to SEQ ID NO: 1555542
uuauucgucccaaagcaau

SEQ ID NO: 1555544 - RNA, 19 nt, Artificial Sequence
  Description of Artificial Sequence: Synthetic oligonucleotide
  Sense strand starting at position 2737 of SEQ ID NO: 1245346
uugcuuugggacgaauaau

SEQ ID NO: 1555545 - RNA, 19 nt, Artificial Sequence
  Description of Artificial Sequence: Synthetic oligonucleotide
  Antisense strand to SEQ ID NO: 1555544
auuauucgucccaaagcaa

SEQ ID NO: 1555546 - RNA, 19 nt, Artificial Sequence
  Description of Artificial Sequence: Synthetic oligonucleotide
  Sense strand starting at position 3242 of SEQ ID NO: 1245346
uuaauaugguaucccaaga

SEQ ID NO: 1555547 - RNA, 19 nt, Artificial Sequence
  Description of Artificial Sequence: Synthetic oligonucleotide
  Antisense strand to SEQ ID NO: 1555546
ucuugggauaccauauuaa

SEQ ID NO: 1555548 - RNA, 19 nt, Artificial Sequence
  Description of Artificial Sequence: Synthetic oligonucleotide
  Sense strand starting at position 3394 of SEQ ID NO: 1245346
ucugaugagggcugaaauc

SEQ ID NO: 1555549 - RNA, 19 nt, Artificial Sequence
  Description of Artificial Sequence: Synthetic oligonucleotide
  Antisense strand to SEQ ID NO: 1555548
gauuucagcccucaucaga

SEQ ID NO: 1555550 - RNA, 19 nt, Artificial Sequence
  Description of Artificial Sequence: Synthetic oligonucleotide
  Sense strand starting at position 3478 of SEQ ID NO: 1245346
aggucuuaucaggagcaca

SEQ ID NO: 1555551 - RNA, 19 nt, Artificial Sequence
  Description of Artificial Sequence: Synthetic oligonucleotide
  Antisense strand to SEQ ID NO: 1555550
ugugcuccugauaagaccu

SEQ ID NO: 1555552 - RNA, 19 nt, Artificial Sequence
  Description of Artificial Sequence: Synthetic oligonucleotide
  Sense strand starting at position 3541 of SEQ ID NO: 1245346
gaagcagcauuguuagaaa

SEQ ID NO: 1555553 - RNA, 19 nt, Artificial Sequence
  Description of Artificial Sequence: Synthetic oligonucleotide
  Antisense strand to SEQ ID NO: 1555552
uuucuaacaaugcugcuuc

SEQ ID NO: 1555554 - RNA, 19 nt, Artificial Sequence
  Description of Artificial Sequence: Synthetic oligonucleotide
  Sense strand starting at position 666 of SEQ ID NO: 1245347
cucagaucgucaguuacaa

SEQ ID NO: 1555555 - RNA, 19 nt, Artificial Sequence
  Description of Artificial Sequence: Synthetic oligonucleotide
  Antisense strand to SEQ ID NO: 1555554
uuguaacugacgaucugag

SEQ ID NO: 1555556 - RNA, 19 nt, Artificial Sequence
  Description of Artificial Sequence: Synthetic oligonucleotide
  Sense strand starting at position 827 of SEQ ID NO: 1245347
uuuauacuaggcugcaaau

SEQ ID NO: 1555557 - RNA, 19 nt, Artificial Sequence
  Description of Artificial Sequence: Synthetic oligonucleotide
  Antisense strand to SEQ ID NO: 1555556
auuugcagccuaguauaaa

SEQ ID NO: 1555558 - RNA, 19 nt, Artificial Sequence
  Description of Artificial Sequence: Synthetic oligonucleotide
  Sense strand starting at position 840 of SEQ ID NO: 1245347
gcaaauacacgugaugcaa

SEQ ID NO: 1555559 - RNA, 19 nt, Artificial Sequence
  Description of Artificial Sequence: Synthetic oligonucleotide
  Antisense strand to SEQ ID NO: 1555558
uugcaucacguguauuugc

SEQ ID NO: 1555560 - RNA, 19 nt, Artificial Sequence
  Description of Artificial Sequence: Synthetic oligonucleotide
  Sense strand starting at position 1003 of SEQ ID NO: 1245347
agaauaguauaacugcaaa

SEQ ID NO: 1555561 - RNA, 19 nt, Artificial Sequence
  Description of Artificial Sequence: Synthetic oligonucleotide
  Antisense strand to SEQ ID NO: 1555560
uuugcaguuauacuauucu

SEQ ID NO: 1555562 - RNA, 19 nt, Artificial Sequence
  Description of Artificial Sequence: Synthetic oligonucleotide
  Sense strand starting at position 1408 of SEQ ID NO: 1245347
aaacaucgggaucgacauu

SEQ ID NO: 1555563 - RNA, 19 nt, Artificial Sequence
  Description of Artificial Sequence: Synthetic oligonucleotide
  Antisense strand to SEQ ID NO: 1555562
aaugucgaucccgauguuu

SEQ ID NO: 1555564 - RNA, 19 nt, Artificial Sequence
  Description of Artificial Sequence: Synthetic oligonucleotide
  Sense strand starting at position 1470 of SEQ ID NO: 1245347
auugaaacguuaccuuaaa

SEQ ID NO: 1555565 - RNA, 19 nt, Artificial Sequence
  Description of Artificial Sequence: Synthetic oligonucleotide
  Antisense strand to SEQ ID NO: 1555564
uuuaagguaacguuucaau

SEQ ID NO: 1555566 - RNA, 19 nt, Artificial Sequence
  Description of Artificial Sequence: Synthetic oligonucleotide
  Sense strand starting at position 1471 of SEQ ID NO: 1245347
uugaaacguuaccuuaaau

SEQ ID NO: 1555567 - RNA, 19 nt, Artificial Sequence
  Description of Artificial Sequence: Synthetic oligonucleotide
  Antisense strand to SEQ ID NO: 1555566
auuuaagguaacguuucaa

SEQ ID NO: 1555568 - RNA, 19 nt, Artificial Sequence
  Description of Artificial Sequence: Synthetic oligonucleotide
  Sense strand starting at position 1557 of SEQ ID NO: 1245347
aguacuuaguaucucacau

SEQ ID NO: 1555569 - RNA, 19 nt, Artificial Sequence
  Description of Artificial Sequence: Synthetic oligonucleotide
  Antisense strand to SEQ ID NO: 1555568
augugagauacuaaguacu

SEQ ID NO: 1555570 - RNA, 19 nt, Artificial Sequence
  Description of Artificial Sequence: Synthetic oligonucleotide
  Sense strand starting at position 1609 of SEQ ID NO: 1245347
aguccugcuccagggauau

SEQ ID NO: 1555571 - RNA, 19 nt, Artificial Sequence
  Description of Artificial Sequence: Synthetic oligonucleotide
  Antisense strand to SEQ ID NO: 1555570
auaucccuggagcaggacu

SEQ ID NO: 1555572 - RNA, 19 nt, Artificial Sequence
  Description of Artificial Sequence: Synthetic oligonucleotide
  Sense strand starting at position 1796 of SEQ ID NO: 1245347
aaacaauucuuguugguga

SEQ ID NO: 1555573 - RNA, 19 nt, Artificial Sequence
  Description of Artificial Sequence: Synthetic oligonucleotide
  Antisense strand to SEQ ID NO: 1555572
ucaccaacaagaauuguuu

SEQ ID NO: 1555574 - RNA, 19 nt, Artificial Sequence
  Description of Artificial Sequence: Synthetic oligonucleotide
  Sense strand starting at position 1798 of SEQ ID NO: 1245347
acaauucuuguuggugauu

SEQ ID NO: 1555575 - RNA, 19 nt, Artificial Sequence
  Description of Artificial Sequence: Synthetic oligonucleotide
  Antisense strand to SEQ ID NO: 1555574
aaucaccaacaagaauugu

SEQ ID NO: 1555576 - RNA, 19 nt, Artificial Sequence
  Description of Artificial Sequence: Synthetic oligonucleotide
  Sense strand starting at position 1836 of SEQ ID NO: 1245347
gucuuaaacuuguuccaag

SEQ ID NO: 1555577 - RNA, 19 nt, Artificial Sequence
  Description of Artificial Sequence: Synthetic oligonucleotide
  Antisense strand to SEQ ID NO: 1555576
cuuggaacaaguuuaagac

SEQ ID NO: 1555578 - RNA, 19 nt, Artificial Sequence
  Description of Artificial Sequence: Synthetic oligonucleotide
  Sense strand starting at position 1858 of SEQ ID NO: 1245347
agaggugucucaucaucau

SEQ ID NO: 1555579 - RNA, 19 nt, Artificial Sequence
  Description of Artificial Sequence: Synthetic oligonucleotide
  Antisense strand to SEQ ID NO: 1555578
augaugaugagacaccucu

SEQ ID NO: 1555580 - RNA, 19 nt, Artificial Sequence
  Description of Artificial Sequence: Synthetic oligonucleotide
  Sense strand starting at position 1931 of SEQ ID NO: 1245347
auaauagguuucccugaaa

SEQ ID NO: 1555581 - RNA, 19 nt, Artificial Sequence
  Description of Artificial Sequence: Synthetic oligonucleotide
  Antisense strand to SEQ ID NO: 1555580
uuucagggaaaccuauuau

SEQ ID NO: 1555582 - RNA, 19 nt, Artificial Sequence
  Description of Artificial Sequence: Synthetic oligonucleotide
  Sense strand starting at position 2060 of SEQ ID NO: 1245347
gcgaccauagagugguaaa

SEQ ID NO: 1555583 - RNA, 19 nt, Artificial Sequence
  Description of Artificial Sequence: Synthetic oligonucleotide
  Antisense strand to SEQ ID NO: 1555582
uuuaccacucuauggucgc

SEQ ID NO: 1555584 - RNA, 19 nt, Artificial Sequence
  Description of Artificial Sequence: Synthetic oligonucleotide
  Sense strand starting at position 2061 of SEQ ID NO: 1245347
cgaccauagagugguaaac

SEQ ID NO: 1555585 - RNA, 19 nt, Artificial Sequence
  Description of Artificial Sequence: Synthetic oligonucleotide
  Antisense strand to SEQ ID NO: 1555584
guuuaccacucuauggucg

SEQ ID NO: 1555586 - RNA, 19 nt, Artificial Sequence
  Description of Artificial Sequence: Synthetic oligonucleotide
  Sense strand starting at position 2320 of SEQ ID NO: 1245347
cacagacuuccgcagggaa

SEQ ID NO: 1555587 - RNA, 19 nt, Artificial Sequence
  Description of Artificial Sequence: Synthetic oligonucleotide
  Antisense strand to SEQ ID NO: 1555586
uucccugcggaagucugug

SEQ ID NO: 1555588 - RNA, 19 nt, Artificial Sequence
  Description of Artificial Sequence: Synthetic oligonucleotide
  Sense strand starting at position 2322 of SEQ ID NO: 1245347
cagacuuccgcagggaagu

SEQ ID NO: 1555589 - RNA, 19 nt, Artificial Sequence
  Description of Artificial Sequence: Synthetic oligonucleotide
  Antisense strand to SEQ ID NO: 1555588
acuucccugcggaagucug

SEQ ID NO: 1555590 - RNA, 19 nt, Artificial Sequence
  Description of Artificial Sequence: Synthetic oligonucleotide
  Sense strand starting at position 2433 of SEQ ID NO: 1245347
gagccagauuucucagcga

SEQ ID NO: 1555591 - RNA, 19 nt, Artificial Sequence
  Description of Artificial Sequence: Synthetic oligonucleotide
  Antisense strand to SEQ ID NO: 1555590
ucgcugagaaaucuggcuc

SEQ ID NO: 1555592 - RNA, 19 nt, Artificial Sequence
  Description of Artificial Sequence: Synthetic oligonucleotide
  Sense strand starting at position 2437 of SEQ ID NO: 1245347
cagauuucucagcgagccu

SEQ ID NO: 1555593 - RNA, 19 nt, Artificial Sequence
  Description of Artificial Sequence: Synthetic oligonucleotide
  Antisense strand to SEQ ID NO: 1555592
aggcucgcugagaaaucug

SEQ ID NO: 1555594 - RNA, 19 nt, Artificial Sequence
  Description of Artificial Sequence: Synthetic oligonucleotide
  Sense strand starting at position 2589 of SEQ ID NO: 1245347
agucuucacuuggcgaaga

SEQ ID NO: 1555595 - RNA, 19 nt, Artificial Sequence
  Description of Artificial Sequence: Synthetic oligonucleotide
  Antisense strand to SEQ ID NO: 1555594
ucuucgccaagugaagacu

SEQ ID NO: 1555596 - RNA, 19 nt, Artificial Sequence
  Description of Artificial Sequence: Synthetic oligonucleotide
  Sense strand starting at position 2624 of SEQ ID NO: 1245347
uguagacucaaauguaguu

SEQ ID NO: 1555597 - RNA, 19 nt, Artificial Sequence
  Description of Artificial Sequence: Synthetic oligonucleotide
  Antisense strand to SEQ ID NO: 1555596
aacuacauuugagucuaca

SEQ ID NO: 1555598 - RNA, 19 nt, Artificial Sequence
  Description of Artificial Sequence: Synthetic oligonucleotide
  Sense strand starting at position 2723 of SEQ ID NO: 1245347
gcaaauaacgcccacuuua

SEQ ID NO: 1555599 - RNA, 19 nt, Artificial Sequence
  Description of Artificial Sequence: Synthetic oligonucleotide
  Antisense strand to SEQ ID NO: 1555598
uaaagugggcguuauuugc

SEQ ID NO: 1555600 - RNA, 19 nt, Artificial Sequence
  Description of Artificial Sequence: Synthetic oligonucleotide
  Sense strand starting at position 2954 of SEQ ID NO: 1245347
gcuaaacaguguuccuaua

SEQ ID NO: 1555601 - RNA, 19 nt, Artificial Sequence
  Description of Artificial Sequence: Synthetic oligonucleotide
  Antisense strand to SEQ ID NO: 1555600
uauaggaacacuguuuagc

SEQ ID NO: 1555602 - RNA, 19 nt, Artificial Sequence
  Description of Artificial Sequence: Synthetic oligonucleotide
  Sense strand starting at position 3008 of SEQ ID NO: 1245347
aacccuauggaguauguau

SEQ ID NO: 1555603 - RNA, 19 nt, Artificial Sequence
  Description of Artificial Sequence: Synthetic oligonucleotide
  Antisense strand to SEQ ID NO: 1555602
auacauacuccauaggguu

SEQ ID NO: 1555604 - RNA, 19 nt, Artificial Sequence
  Description of Artificial Sequence: Synthetic oligonucleotide
  Sense strand starting at position 3010 of SEQ ID NO: 1245347
cccuauggaguauguauua

SEQ ID NO: 1555605 - RNA, 19 nt, Artificial Sequence
  Description of Artificial Sequence: Synthetic oligonucleotide
  Antisense strand to SEQ ID NO: 1555604
uaauacauacuccauaggg

SEQ ID NO: 1555606 - RNA, 19 nt, Artificial Sequence
  Description of Artificial Sequence: Synthetic oligonucleotide
  Sense strand starting at position 3039 of SEQ ID NO: 1245347
uuguauauugggcaacaga

SEQ ID NO: 1555607 - RNA, 19 nt, Artificial Sequence
  Description of Artificial Sequence: Synthetic oligonucleotide
  Antisense strand to SEQ ID NO: 1555606
ucuguugcccaauauacaa

SEQ ID NO: 1555608 - RNA, 19 nt, Artificial Sequence
  Description of Artificial Sequence: Synthetic oligonucleotide
  Sense strand starting at position 3097 of SEQ ID NO: 1245347
uuguaagugguacaaacuu

SEQ ID NO: 1555609 - RNA, 19 nt, Artificial Sequence
  Description of Artificial Sequence: Synthetic oligonucleotide
  Antisense strand to SEQ ID NO: 1555608
aaguuuguaccacuuacaa

SEQ ID NO: 1555610 - RNA, 19 nt, Artificial Sequence
  Description of Artificial Sequence: Synthetic oligonucleotide
  Sense strand starting at position 3161 of SEQ ID NO: 1245347
accagacagucugugauaa

SEQ ID NO: 1555611 - RNA, 19 nt, Artificial Sequence
  Description of Artificial Sequence: Synthetic oligonucleotide
  Antisense strand to SEQ ID NO: 1555610
uuaucacagacugucuggu

SEQ ID NO: 1555612 - RNA, 19 nt, Artificial Sequence
  Description of Artificial Sequence: Synthetic oligonucleotide
  Sense strand starting at position 3162 of SEQ ID NO: 1245347
ccagacagucugugauaac

SEQ ID NO: 1555613 - RNA, 19 nt, Artificial Sequence
  Description of Artificial Sequence: Synthetic oligonucleotide
  Antisense strand to SEQ ID NO: 1555612
guuaucacagacugucugg

SEQ ID NO: 1555614 - RNA, 19 nt, Artificial Sequence
  Description of Artificial Sequence: Synthetic oligonucleotide
  Sense strand starting at position 3275 of SEQ ID NO: 1245347
agaucaauuucggcgaucu

SEQ ID NO: 1555615 - RNA, 19 nt, Artificial Sequence
  Description of Artificial Sequence: Synthetic oligonucleotide
  Antisense strand to SEQ ID NO: 1555614
agaucgccgaaauugaucu

SEQ ID NO: 1555616 - RNA, 19 nt, Artificial Sequence
  Description of Artificial Sequence: Synthetic oligonucleotide
  Sense strand starting at position 3276 of SEQ ID NO: 1245347
gaucaauuucggcgaucuu

SEQ ID NO: 1555617 - RNA, 19 nt, Artificial Sequence
  Description of Artificial Sequence: Synthetic oligonucleotide
  Antisense strand to SEQ ID NO: 1555616
aagaucgccgaaauugauc

SEQ ID NO: 1555618 - RNA, 19 nt, Artificial Sequence
  Description of Artificial Sequence: Synthetic oligonucleotide
  Sense strand starting at position 3365 of SEQ ID NO: 1245347
uggugaagauuccugucuu

SEQ ID NO: 1555619 - RNA, 19 nt, Artificial Sequence
  Description of Artificial Sequence: Synthetic oligonucleotide
  Antisense strand to SEQ ID NO: 1555618
aagacaggaaucuucacca

SEQ ID NO: 1555620 - RNA, 19 nt, Artificial Sequence
  Description of Artificial Sequence: Synthetic oligonucleotide
  Sense strand starting at position 3486 of SEQ ID NO: 1245347
ccuacagguucugcuuaga

SEQ ID NO: 1555621 - RNA, 19 nt, Artificial Sequence
  Description of Artificial Sequence: Synthetic oligonucleotide
  Antisense strand to SEQ ID NO: 1555620
ucuaagcagaaccuguagg

SEQ ID NO: 1555622 - RNA, 19 nt, Artificial Sequence
  Description of Artificial Sequence: Synthetic oligonucleotide
  Sense strand starting at position 3489 of SEQ ID NO: 1245347
acagguucugcuuagauga

SEQ ID NO: 1555623 - RNA, 19 nt, Artificial Sequence
  Description of Artificial Sequence: Synthetic oligonucleotide
  Antisense strand to SEQ ID NO: 1555622
ucaucuaagcagaaccugu

SEQ ID NO: 1555624 - RNA, 19 nt, Artificial Sequence
  Description of Artificial Sequence: Synthetic oligonucleotide
  Sense strand starting at position 3494 of SEQ ID NO: 1245347
uucugcuuagaugauguaa

SEQ ID NO: 1555625 - RNA, 19 nt, Artificial Sequence
  Description of Artificial Sequence: Synthetic oligonucleotide
  Antisense strand to SEQ ID NO: 1555624
uuacaucaucuaagcagaa

SEQ ID NO: 1555626 - RNA, 19 nt, Artificial Sequence
  Description of Artificial Sequence: Synthetic oligonucleotide
  Sense strand starting at position 3519 of SEQ ID NO: 1245347
gaucacaaacguuggguua

SEQ ID NO: 1555627 - RNA, 19 nt, Artificial Sequence
  Description of Artificial Sequence: Synthetic oligonucleotide
  Antisense strand to SEQ ID NO: 1555626
uaacccaacguuugugauc

SEQ ID NO: 1555628 - RNA, 19 nt, Artificial Sequence
  Description of Artificial Sequence: Synthetic oligonucleotide
  Sense strand starting at position 3551 of SEQ ID NO: 1245347
uggcucuaccucuagucau

SEQ ID NO: 1555629 - RNA, 19 nt, Artificial Sequence
  Description of Artificial Sequence: Synthetic oligonucleotide
  Antisense strand to SEQ ID NO: 1555628
augacuagagguagagcca

SEQ ID NO: 1555630 - RNA, 19 nt, Artificial Sequence
  Description of Artificial Sequence: Synthetic oligonucleotide
  Sense strand starting at position 3671 of SEQ ID NO: 1245347
uccucauuccgcugaauuu

SEQ ID NO: 1555631 - RNA, 19 nt, Artificial Sequence
  Description of Artificial Sequence: Synthetic oligonucleotide
  Antisense strand to SEQ ID NO: 1555630
aaauucagcggaaugagga

SEQ ID NO: 1555632 - RNA, 19 nt, Artificial Sequence
  Description of Artificial Sequence: Synthetic oligonucleotide
  Sense strand starting at position 3907 of SEQ ID NO: 1245347
ucaucaggguggucucaaa

SEQ ID NO: 1555633 - RNA, 19 nt, Artificial Sequence
  Description of Artificial Sequence: Synthetic oligonucleotide
  Antisense strand to SEQ ID NO: 1555632
uuugagaccacccugauga

SEQ ID NO: 1555634 - RNA, 19 nt, Artificial Sequence
  Description of Artificial Sequence: Synthetic oligonucleotide
  Sense strand starting at position 353 of SEQ ID NO: 1245348
ugucuuauuucuguaaguc

SEQ ID NO: 1555635 - RNA, 19 nt, Artificial Sequence
  Description of Artificial Sequence: Synthetic oligonucleotide
  Antisense strand to SEQ ID NO: 1555634
gacuuacagaaauaagaca

SEQ ID NO: 1555636 - RNA, 19 nt, Artificial Sequence
  Description of Artificial Sequence: Synthetic oligonucleotide
  Sense strand starting at position 362 of SEQ ID NO: 1245348
ucuguaaguccuuaaggaa

SEQ ID NO: 1555637 - RNA, 19 nt, Artificial Sequence
  Description of Artificial Sequence: Synthetic oligonucleotide
  Antisense strand to SEQ ID NO: 1555636
uuccuuaaggacuuacaga

SEQ ID NO: 1555638 - RNA, 19 nt, Artificial Sequence
  Description of Artificial Sequence: Synthetic oligonucleotide
  Sense strand starting at position 417 of SEQ ID NO: 1245348
uucguaaaggaguacuaga

SEQ ID NO: 1555639 - RNA, 19 nt, Artificial Sequence
  Description of Artificial Sequence: Synthetic oligonucleotide
  Antisense strand to SEQ ID NO: 1555638
ucuaguacuccuuuacgaa

SEQ ID NO: 1555640 - RNA, 19 nt, Artificial Sequence
  Description of Artificial Sequence: Synthetic oligonucleotide
  Sense strand starting at position 624 of SEQ ID NO: 1245348
gcugguaguaucgcuacuu

SEQ ID NO: 1555641 - RNA, 19 nt, Artificial Sequence
  Description of Artificial Sequence: Synthetic oligonucleotide
  Antisense strand to SEQ ID NO: 1555640
aaguagcgauacuaccagc

SEQ ID NO: 1555642 - RNA, 19 nt, Artificial Sequence
  Description of Artificial Sequence: Synthetic oligonucleotide
  Sense strand starting at position 628 of SEQ ID NO: 1245348
guaguaucgcuacuuguuu

SEQ ID NO: 1555643 - RNA, 19 nt, Artificial Sequence
  Description of Artificial Sequence: Synthetic oligonucleotide
  Antisense strand to SEQ ID NO: 1555642
aaacaaguagcgauacuac

SEQ ID NO: 1555644 - RNA, 19 nt, Artificial Sequence
  Description of Artificial Sequence: Synthetic oligonucleotide
  Sense strand starting at position 692 of SEQ ID NO: 1245348
gaugucucucuugacagua

SEQ ID NO: 1555645 - RNA, 19 nt, Artificial Sequence
  Description of Artificial Sequence: Synthetic oligonucleotide
  Antisense strand to SEQ ID NO: 1555644
uacugucaagagagacauc

SEQ ID NO: 1555646 - RNA, 19 nt, Artificial Sequence
  Description of Artificial Sequence: Synthetic oligonucleotide
  Sense strand starting at position 899 of SEQ ID NO: 1245348
aauagaggguugccucuaa

SEQ ID NO: 1555647 - RNA, 19 nt, Artificial Sequence
  Description of Artificial Sequence: Synthetic oligonucleotide
  Antisense strand to SEQ ID NO: 1555646
uuagaggcaacccucuauu

SEQ ID NO: 1555648 - RNA, 19 nt, Artificial Sequence
  Description of Artificial Sequence: Synthetic oligonucleotide
  Sense strand starting at position 903 of SEQ ID NO: 1245348
gaggguugccucuaauaag

SEQ ID NO: 1555649 - RNA, 19 nt, Artificial Sequence
  Description of Artificial Sequence: Synthetic oligonucleotide
  Antisense strand to SEQ ID NO: 1555648
cuuauuagaggcaacccuc

SEQ ID NO: 1555650 - RNA, 19 nt, Artificial Sequence
  Description of Artificial Sequence: Synthetic oligonucleotide
  Sense strand starting at position 972 of SEQ ID NO: 1245348
aucugccucccagaggaau

SEQ ID NO: 1555651 - RNA, 19 nt, Artificial Sequence
  Description of Artificial Sequence: Synthetic oligonucleotide
  Antisense strand to SEQ ID NO: 1555650
auuccucugggaggcagau

SEQ ID NO: 1555652 - RNA, 19 nt, Artificial Sequence
  Description of Artificial Sequence: Synthetic oligonucleotide
  Sense strand starting at position 1484 of SEQ ID NO: 1245348
gauccagaaugguuuccau

SEQ ID NO: 1555653 - RNA, 19 nt, Artificial Sequence
  Description of Artificial Sequence: Synthetic oligonucleotide
  Antisense strand to SEQ ID NO: 1555652
auggaaaccauucuggauc

SEQ ID NO: 1555654 - RNA, 19 nt, Artificial Sequence
  Description of Artificial Sequence: Synthetic oligonucleotide
  Sense strand starting at position 1503 of SEQ ID NO: 1245348
uccucuauuucuccgucua

SEQ ID NO: 1555655 - RNA, 19 nt, Artificial Sequence
  Description of Artificial Sequence: Synthetic oligonucleotide
  Antisense strand to SEQ ID NO: 1555654
uagacggagaaauagagga

SEQ ID NO: 1555656 - RNA, 19 nt, Artificial Sequence
  Description of Artificial Sequence: Synthetic oligonucleotide
  Sense strand starting at position 1516 of SEQ ID NO: 1245348
cgucuaaagagucaugaca

SEQ ID NO: 1555657 - RNA, 19 nt, Artificial Sequence
  Description of Artificial Sequence: Synthetic oligonucleotide
  Antisense strand to SEQ ID NO: 1555656
ugucaugacucuuuagacg

SEQ ID NO: 1555658 - RNA, 19 nt, Artificial Sequence
  Description of Artificial Sequence: Synthetic oligonucleotide
  Sense strand starting at position 1705 of SEQ ID NO: 1245348
gucaaauauguccagcaau

SEQ ID NO: 1555659 - RNA, 19 nt, Artificial Sequence
  Description of Artificial Sequence: Synthetic oligonucleotide
  Antisense strand to SEQ ID NO: 1555658
auugcuggacauauuugac

SEQ ID NO: 1555660 - RNA, 19 nt, Artificial Sequence
  Description of Artificial Sequence: Synthetic oligonucleotide
  Sense strand starting at position 1763 of SEQ ID NO: 1245348
uuuaaucaagaguaagcuu

SEQ ID NO: 1555661 - RNA, 19 nt, Artificial Sequence
  Description of Artificial Sequence: Synthetic oligonucleotide
  Antisense strand to SEQ ID NO: 1555660
aagcuuacucuugauuaaa

SEQ ID NO: 1555662 - RNA, 19 nt, Artificial Sequence
  Description of Artificial Sequence: Synthetic oligonucleotide
  Sense strand starting at position 1992 of SEQ ID NO: 1245348
ugaguuaaugaugaccgua

SEQ ID NO: 1555663 - RNA, 19 nt, Artificial Sequence
  Description of Artificial Sequence: Synthetic oligonucleotide
  Antisense strand to SEQ ID NO: 1555662
uacggucaucauuaacuca

SEQ ID NO: 1555664 - RNA, 19 nt, Artificial Sequence
  Description of Artificial Sequence: Synthetic oligonucleotide
  Sense strand starting at position 2026 of SEQ ID NO: 1245348
guauauaucagucaguaga

SEQ ID NO: 1555665 - RNA, 19 nt, Artificial Sequence
  Description of Artificial Sequence: Synthetic oligonucleotide
  Antisense strand to SEQ ID NO: 1555664
ucuacugacugauauauac

SEQ ID NO: 1555666 - RNA, 19 nt, Artificial Sequence
  Description of Artificial Sequence: Synthetic oligonucleotide
  Sense strand starting at position 2028 of SEQ ID NO: 1245348
auauaucagucaguagaag

SEQ ID NO: 1555667 - RNA, 19 nt, Artificial Sequence
  Description of Artificial Sequence: Synthetic oligonucleotide
  Antisense strand to SEQ ID NO: 1555666
cuucuacugacugauauau

SEQ ID NO: 1555668 - RNA, 19 nt, Artificial Sequence
  Description of Artificial Sequence: Synthetic oligonucleotide
  Sense strand starting at position 2068 of SEQ ID NO: 1245348
guuuaugagcuacauuaga

SEQ ID NO: 1555669 - RNA, 19 nt, Artificial Sequence
  Description of Artificial Sequence: Synthetic oligonucleotide
  Antisense strand to SEQ ID NO: 1555668
ucuaauguagcucauaaac

SEQ ID NO: 1555670 - RNA, 19 nt, Artificial Sequence
  Description of Artificial Sequence: Synthetic oligonucleotide
  Sense strand starting at position 2186 of SEQ ID NO: 1245348
ugggaaucccacugcaaua

SEQ ID NO: 1555671 - RNA, 19 nt, Artificial Sequence
  Description of Artificial Sequence: Synthetic oligonucleotide
  Antisense strand to SEQ ID NO: 1555670
uauugcagugggauuccca

SEQ ID NO: 1555672 - RNA, 19 nt, Artificial Sequence
  Description of Artificial Sequence: Synthetic oligonucleotide
  Sense strand starting at position 2302 of SEQ ID NO: 1245348
gcaaacugucgucauuucu

SEQ ID NO: 1555673 - RNA, 19 nt, Artificial Sequence
  Description of Artificial Sequence: Synthetic oligonucleotide
  Antisense strand to SEQ ID NO: 1555672
agaaaugacgacaguuugc

SEQ ID NO: 1555674 - RNA, 19 nt, Artificial Sequence
  Description of Artificial Sequence: Synthetic oligonucleotide
  Sense strand starting at position 2338 of SEQ ID NO: 1245348
uguugaugucugaguaggu

SEQ ID NO: 1555675 - RNA, 19 nt, Artificial Sequence
  Description of Artificial Sequence: Synthetic oligonucleotide
  Antisense strand to SEQ ID NO: 1555674
accuacucagacaucaaca

SEQ ID NO: 1555676 - RNA, 19 nt, Artificial Sequence
  Description of Artificial Sequence: Synthetic oligonucleotide
  Sense strand starting at position 2480 of SEQ ID NO: 1245348
agggcagaauauguuaaua

SEQ ID NO: 1555677 - RNA, 19 nt, Artificial Sequence
  Description of Artificial Sequence: Synthetic oligonucleotide
  Antisense strand to SEQ ID NO: 1555676
uauuaacauauucugcccu

SEQ ID NO: 1555678 - RNA, 19 nt, Artificial Sequence
  Description of Artificial Sequence: Synthetic oligonucleotide
  Sense strand starting at position 2524 of SEQ ID NO: 1245348
gcaacuuagauguagguaa

SEQ ID NO: 1555679 - RNA, 19 nt, Artificial Sequence
  Description of Artificial Sequence: Synthetic oligonucleotide
  Antisense strand to SEQ ID NO: 1555678
uuaccuacaucuaaguugc

SEQ ID NO: 1555680 - RNA, 19 nt, Artificial Sequence
  Description of Artificial Sequence: Synthetic oligonucleotide
  Sense strand starting at position 2526 of SEQ ID NO: 1245348
aacuuagauguagguaaua

SEQ ID NO: 1555681 - RNA, 19 nt, Artificial Sequence
  Description of Artificial Sequence: Synthetic oligonucleotide
  Antisense strand to SEQ ID NO: 1555680
uauuaccuacaucuaaguu

SEQ ID NO: 1555682 - RNA, 19 nt, Artificial Sequence
  Description of Artificial Sequence: Synthetic oligonucleotide
  Sense strand starting at position 2539 of SEQ ID NO: 1245348
guaauagaguaauuccaaa

SEQ ID NO: 1555683 - RNA, 19 nt, Artificial Sequence
  Description of Artificial Sequence: Synthetic oligonucleotide
  Antisense strand to SEQ ID NO: 1555682
uuuggaauuacucuauuac

SEQ ID NO: 1555684 - RNA, 19 nt, Artificial Sequence
  Description of Artificial Sequence: Synthetic oligonucleotide
  Sense strand starting at position 2767 of SEQ ID NO: 1245348
guacuuuaacaacagaguu

SEQ ID NO: 1555685 - RNA, 19 nt, Artificial Sequence
  Description of Artificial Sequence: Synthetic oligonucleotide
  Antisense strand to SEQ ID NO: 1555684
aacucuguuguuaaaguac

SEQ ID NO: 1555686 - RNA, 19 nt, Artificial Sequence
  Description of Artificial Sequence: Synthetic oligonucleotide
  Sense strand starting at position 2823 of SEQ ID NO: 1245348
agucaaauacccugaguga

SEQ ID NO: 1555687 - RNA, 19 nt, Artificial Sequence
  Description of Artificial Sequence: Synthetic oligonucleotide
  Antisense strand to SEQ ID NO: 1555686
ucacucaggguauuugacu

SEQ ID NO: 1555688 - RNA, 19 nt, Artificial Sequence
  Description of Artificial Sequence: Synthetic oligonucleotide
  Sense strand starting at position 2824 of SEQ ID NO: 1245348
gucaaauacccugagugau

SEQ ID NO: 1555689 - RNA, 19 nt, Artificial Sequence
  Description of Artificial Sequence: Synthetic oligonucleotide
  Antisense strand to SEQ ID NO: 1555688
aucacucaggguauuugac

SEQ ID NO: 1555690 - RNA, 19 nt, Artificial Sequence
  Description of Artificial Sequence: Synthetic oligonucleotide
  Sense strand starting at position 2940 of SEQ ID NO: 1245348
auuauuccugauugaauug

SEQ ID NO: 1555691 - RNA, 19 nt, Artificial Sequence
  Description of Artificial Sequence: Synthetic oligonucleotide
  Antisense strand to SEQ ID NO: 1555690
caauucaaucaggaauaau

SEQ ID NO: 1555692 - RNA, 19 nt, Artificial Sequence
  Description of Artificial Sequence: Synthetic oligonucleotide
  Sense strand starting at position 3079 of SEQ ID NO: 1245348
cagacauucugguccaaag

SEQ ID NO: 1555693 - RNA, 19 nt, Artificial Sequence
  Description of Artificial Sequence: Synthetic oligonucleotide
  Antisense strand to SEQ ID NO: 1555692
cuuuggaccagaaugucug

SEQ ID NO: 1555694 - RNA, 19 nt, Artificial Sequence
  Description of Artificial Sequence: Synthetic oligonucleotide
  Sense strand starting at position 3311 of SEQ ID NO: 1245348
cgacuaccacguuaauaag

SEQ ID NO: 1555695 - RNA, 19 nt, Artificial Sequence
  Description of Artificial Sequence: Synthetic oligonucleotide
  Antisense strand to SEQ ID NO: 1555694
cuuauuaacgugguagucg

SEQ ID NO: 1555696 - RNA, 19 nt, Artificial Sequence
  Description of Artificial Sequence: Synthetic oligonucleotide
  Sense strand starting at position 3363 of SEQ ID NO: 1245348
gauagcaacuuggcaagau

SEQ ID NO: 1555697 - RNA, 19 nt, Artificial Sequence
  Description of Artificial Sequence: Synthetic oligonucleotide
  Antisense strand to SEQ ID NO: 1555696
aucuugccaaguugcuauc

SEQ ID NO: 1555698 - RNA, 19 nt, Artificial Sequence
  Description of Artificial Sequence: Synthetic oligonucleotide
  Sense strand starting at position 3367 of SEQ ID NO: 1245348
gcaacuuggcaagauacau

SEQ ID NO: 1555699 - RNA, 19 nt, Artificial Sequence
  Description of Artificial Sequence: Synthetic oligonucleotide
  Antisense strand to SEQ ID NO: 1555698
auguaucuugccaaguugc

SEQ ID NO: 1555700 - RNA, 19 nt, Artificial Sequence
  Description of Artificial Sequence: Synthetic oligonucleotide
  Sense strand starting at position 3460 of SEQ ID NO: 1245348
gugcaaggaguuuaagaug

SEQ ID NO: 1555701 - RNA, 19 nt, Artificial Sequence
  Description of Artificial Sequence: Synthetic oligonucleotide
  Antisense strand to SEQ ID NO: 1555700
caucuuaaacuccuugcac

SEQ ID NO: 1555702 - RNA, 19 nt, Artificial Sequence
  Description of Artificial Sequence: Synthetic oligonucleotide
  Sense strand starting at position 3471 of SEQ ID NO: 1245348
uuaagauguggucaacagu

SEQ ID NO: 1555703 - RNA, 19 nt, Artificial Sequence
  Description of Artificial Sequence: Synthetic oligonucleotide
  Antisense strand to SEQ ID NO: 1555702
acuguugaccacaucuuaa

SEQ ID NO: 1555704 - RNA, 19 nt, Artificial Sequence
  Description of Artificial Sequence: Synthetic oligonucleotide
  Sense strand starting at position 3517 of SEQ ID NO: 1245348
gauccaugugauggaauau

SEQ ID NO: 1555705 - RNA, 19 nt, Artificial Sequence
  Description of Artificial Sequence: Synthetic oligonucleotide
  Antisense strand to SEQ ID NO: 1555704
auauuccaucacauggauc

SEQ ID NO: 1555706 - RNA, 19 nt, Artificial Sequence
  Description of Artificial Sequence: Synthetic oligonucleotide
  Sense strand starting at position 3692 of SEQ ID NO: 1245348
uggcuaucuccacaaugag

SEQ ID NO: 1555707 - RNA, 19 nt, Artificial Sequence
  Description of Artificial Sequence: Synthetic oligonucleotide
  Antisense strand to SEQ ID NO: 1555706
cucauuguggagauagcca

SEQ ID NO: 1555708 - RNA, 19 nt, Artificial Sequence
  Description of Artificial Sequence: Synthetic oligonucleotide
  Sense strand starting at position 3704 of SEQ ID NO: 1245348
caaugaggauacguuacau

SEQ ID NO: 1555709 - RNA, 19 nt, Artificial Sequence
  Description of Artificial Sequence: Synthetic oligonucleotide
  Antisense strand to SEQ ID NO: 1555708
auguaacguauccucauug

SEQ ID NO: 1555710 - RNA, 19 nt, Artificial Sequence
  Description of Artificial Sequence: Synthetic oligonucleotide
  Sense strand starting at position 3852 of SEQ ID NO: 1245348
aggaucucauagucuauua

SEQ ID NO: 1555711 - RNA, 19 nt, Artificial Sequence
  Description of Artificial Sequence: Synthetic oligonucleotide
  Antisense strand to SEQ ID NO: 1555710
uaauagacuaugagauccu

SEQ ID NO: 1555712 - RNA, 19 nt, Artificial Sequence
  Description of Artificial Sequence: Synthetic oligonucleotide
  Sense strand starting at position 3975 of SEQ ID NO: 1245348
ucuacuacuguguauacau

SEQ ID NO: 1555713 - RNA, 19 nt, Artificial Sequence
  Description of Artificial Sequence: Synthetic oligonucleotide
  Antisense strand to SEQ ID NO: 1555712
auguauacacaguaguaga

SEQ ID NO: 1555714 - RNA, 19 nt, Artificial Sequence
  Description of Artificial Sequence: Synthetic oligonucleotide
  Sense strand starting at position 197 of SEQ ID NO: 1245349
ucagaugccgaauaugacu

SEQ ID NO: 1555715 - RNA, 19 nt, Artificial Sequence
  Description of Artificial Sequence: Synthetic oligonucleotide
  Antisense strand to SEQ ID NO: 1555714
agucauauucggcaucuga

SEQ ID NO: 1555716 - RNA, 19 nt, Artificial Sequence
  Description of Artificial Sequence: Synthetic oligonucleotide
  Sense strand starting at position 202 of SEQ ID NO: 1245349
ugccgaauaugacugaauu

SEQ ID NO: 1555717 - RNA, 19 nt, Artificial Sequence
  Description of Artificial Sequence: Synthetic oligonucleotide
  Antisense strand to SEQ ID NO: 1555716
aauucagucauauucggca

SEQ ID NO: 1555718 - RNA, 19 nt, Artificial Sequence
  Description of Artificial Sequence: Synthetic oligonucleotide
  Sense strand starting at position 203 of SEQ ID NO: 1245349
gccgaauaugacugaauug

SEQ ID NO: 1555719 - RNA, 19 nt, Artificial Sequence
  Description of Artificial Sequence: Synthetic oligonucleotide
  Antisense strand to SEQ ID NO: 1555718
caauucagucauauucggc

SEQ ID NO: 1555720 - RNA, 19 nt, Artificial Sequence
  Description of Artificial Sequence: Synthetic oligonucleotide
  Sense strand starting at position 311 of SEQ ID NO: 1245349
augucugguacguaaagga

SEQ ID NO: 1555721 - RNA, 19 nt, Artificial Sequence
  Description of Artificial Sequence: Synthetic oligonucleotide
  Antisense strand to SEQ ID NO: 1555720
uccuuuacguaccagacau

SEQ ID NO: 1555722 - RNA, 19 nt, Artificial Sequence
  Description of Artificial Sequence: Synthetic oligonucleotide
  Sense strand starting at position 335 of SEQ ID NO: 1245349
uccucauaggcucgauuua

SEQ ID NO: 1555723 - RNA, 19 nt, Artificial Sequence
  Description of Artificial Sequence: Synthetic oligonucleotide
  Antisense strand to SEQ ID NO: 1555722
uaaaucgagccuaugagga

SEQ ID NO: 1555724 - RNA, 19 nt, Artificial Sequence
  Description of Artificial Sequence: Synthetic oligonucleotide
  Sense strand starting at position 393 of SEQ ID NO: 1245349
uauuaaaugggcuguuuaa

SEQ ID NO: 1555725 - RNA, 19 nt, Artificial Sequence
  Description of Artificial Sequence: Synthetic oligonucleotide
  Antisense strand to SEQ ID NO: 1555724
uuaaacagcccauuuaaua

SEQ ID NO: 1555726 - RNA, 19 nt, Artificial Sequence
  Description of Artificial Sequence: Synthetic oligonucleotide
  Sense strand starting at position 542 of SEQ ID NO: 1245349
aguagagagcucugaauau

SEQ ID NO: 1555727 - RNA, 19 nt, Artificial Sequence
  Description of Artificial Sequence: Synthetic oligonucleotide
  Antisense strand to SEQ ID NO: 1555726
auauucagagcucucuacu

SEQ ID NO: 1555728 - RNA, 19 nt, Artificial Sequence
  Description of Artificial Sequence: Synthetic oligonucleotide
  Sense strand starting at position 599 of SEQ ID NO: 1245349
guaagaaaccaaugcacuu

SEQ ID NO: 1555729 - RNA, 19 nt, Artificial Sequence
  Description of Artificial Sequence: Synthetic oligonucleotide
  Antisense strand to SEQ ID NO: 1555728
aagugcauugguuucuuac

SEQ ID NO: 1555730 - RNA, 19 nt, Artificial Sequence
  Description of Artificial Sequence: Synthetic oligonucleotide
  Sense strand starting at position 705 of SEQ ID NO: 1245349
cucaguugucuugaaacaa

SEQ ID NO: 1555731 - RNA, 19 nt, Artificial Sequence
  Description of Artificial Sequence: Synthetic oligonucleotide
  Antisense strand to SEQ ID NO: 1555730
uuguuucaagacaacugag

SEQ ID NO: 1555732 - RNA, 19 nt, Artificial Sequence
  Description of Artificial Sequence: Synthetic oligonucleotide
  Sense strand starting at position 1109 of SEQ ID NO: 1245349
aaguauuuccugcguaaga

SEQ ID NO: 1555733 - RNA, 19 nt, Artificial Sequence
  Description of Artificial Sequence: Synthetic oligonucleotide
  Antisense strand to SEQ ID NO: 1555732
ucuuacgcaggaaauacuu

SEQ ID NO: 1555734 - RNA, 19 nt, Artificial Sequence
  Description of Artificial Sequence: Synthetic oligonucleotide
  Sense strand starting at position 1110 of SEQ ID NO: 1245349
aguauuuccugcguaagaa

SEQ ID NO: 1555735 - RNA, 19 nt, Artificial Sequence
  Description of Artificial Sequence: Synthetic oligonucleotide
  Antisense strand to SEQ ID NO: 1555734
uucuuacgcaggaaauacu

SEQ ID NO: 1555736 - RNA, 19 nt, Artificial Sequence
  Description of Artificial Sequence: Synthetic oligonucleotide
  Sense strand starting at position 1245 of SEQ ID NO: 1245349
ccaugaauguaguucugau

SEQ ID NO: 1555737 - RNA, 19 nt, Artificial Sequence
  Description of Artificial Sequence: Synthetic oligonucleotide
  Antisense strand to SEQ ID NO: 1555736
aucagaacuacauucaugg

SEQ ID NO: 1555738 - RNA, 19 nt, Artificial Sequence
  Description of Artificial Sequence: Synthetic oligonucleotide
  Sense strand starting at position 1260 of SEQ ID NO: 1245349
ugauacagcagcgaucuaa

SEQ ID NO: 1555739 - RNA, 19 nt, Artificial Sequence
  Description of Artificial Sequence: Synthetic oligonucleotide
  Antisense strand to SEQ ID NO: 1555738
uuagaucgcugcuguauca

SEQ ID NO: 1555740 - RNA, 19 nt, Artificial Sequence
  Description of Artificial Sequence: Synthetic oligonucleotide
  Sense strand starting at position 1264 of SEQ ID NO: 1245349
acagcagcgaucuaaagau

SEQ ID NO: 1555741 - RNA, 19 nt, Artificial Sequence
  Description of Artificial Sequence: Synthetic oligonucleotide
  Antisense strand to SEQ ID NO: 1555740
aucuuuagaucgcugcugu

SEQ ID NO: 1555742 - RNA, 19 nt, Artificial Sequence
  Description of Artificial Sequence: Synthetic oligonucleotide
  Sense strand starting at position 1279 of SEQ ID NO: 1245349
agaugagguguuuauuagu

SEQ ID NO: 1555743 - RNA, 19 nt, Artificial Sequence
  Description of Artificial Sequence: Synthetic oligonucleotide
  Antisense strand to SEQ ID NO: 1555742
acuaauaaacaccucaucu

SEQ ID NO: 1555744 - RNA, 19 nt, Artificial Sequence
  Description of Artificial Sequence: Synthetic oligonucleotide
  Sense strand starting at position 1615 of SEQ ID NO: 1245349
uguuuacauacguaaagua

SEQ ID NO: 1555745 - RNA, 19 nt, Artificial Sequence
  Description of Artificial Sequence: Synthetic oligonucleotide
  Antisense strand to SEQ ID NO: 1555744
uacuuuacguauguaaaca

SEQ ID NO: 1555746 - RNA, 19 nt, Artificial Sequence
  Description of Artificial Sequence: Synthetic oligonucleotide
  Sense strand starting at position 1678 of SEQ ID NO: 1245349
ccucacucuggcuaugaua

SEQ ID NO: 1555747 - RNA, 19 nt, Artificial Sequence
  Description of Artificial Sequence: Synthetic oligonucleotide
  Antisense strand to SEQ ID NO: 1555746
uaucauagccagagugagg

SEQ ID NO: 1555748 - RNA, 19 nt, Artificial Sequence
  Description of Artificial Sequence: Synthetic oligonucleotide
  Sense strand starting at position 1875 of SEQ ID NO: 1245349
auguaaugacccuagccua

SEQ ID NO: 1555749 - RNA, 19 nt, Artificial Sequence
  Description of Artificial Sequence: Synthetic oligonucleotide
  Antisense strand to SEQ ID NO: 1555748
uaggcuagggucauuacau

SEQ ID NO: 1555750 - RNA, 19 nt, Artificial Sequence
  Description of Artificial Sequence: Synthetic oligonucleotide
  Sense strand starting at position 1950 of SEQ ID NO: 1245349
aggcucuccagauggugaa

SEQ ID NO: 1555751 - RNA, 19 nt, Artificial Sequence
  Description of Artificial Sequence: Synthetic oligonucleotide
  Antisense strand to SEQ ID NO: 1555750
uucaccaucuggagagccu

SEQ ID NO: 1555752 - RNA, 19 nt, Artificial Sequence
  Description of Artificial Sequence: Synthetic oligonucleotide
  Sense strand starting at position 1962 of SEQ ID NO: 1245349
uggugaauuuagcaaagaa

SEQ ID NO: 1555753 - RNA, 19 nt, Artificial Sequence
  Description of Artificial Sequence: Synthetic oligonucleotide
  Antisense strand to SEQ ID NO: 1555752
uucuuugcuaaauucacca

SEQ ID NO: 1555754 - RNA, 19 nt, Artificial Sequence
  Description of Artificial Sequence: Synthetic oligonucleotide
  Sense strand starting at position 2026 of SEQ ID NO: 1245349
cucccuuucccaggaguga

SEQ ID NO: 1555755 - RNA, 19 nt, Artificial Sequence
  Description of Artificial Sequence: Synthetic oligonucleotide
  Antisense strand to SEQ ID NO: 1555754
ucacuccugggaaagggag

SEQ ID NO: 1555756 - RNA, 19 nt, Artificial Sequence
  Description of Artificial Sequence: Synthetic oligonucleotide
  Sense strand starting at position 2372 of SEQ ID NO: 1245349
gauagugacauguggagaa

SEQ ID NO: 1555757 - RNA, 19 nt, Artificial Sequence
  Description of Artificial Sequence: Synthetic oligonucleotide
  Antisense strand to SEQ ID NO: 1555756
uucuccacaugucacuauc

SEQ ID NO: 1555758 - RNA, 19 nt, Artificial Sequence
  Description of Artificial Sequence: Synthetic oligonucleotide
  Sense strand starting at position 2382 of SEQ ID NO: 1245349
uguggagaaucauuguaga

SEQ ID NO: 1555759 - RNA, 19 nt, Artificial Sequence
  Description of Artificial Sequence: Synthetic oligonucleotide
  Antisense strand to SEQ ID NO: 1555758
ucuacaaugauucuccaca

SEQ ID NO: 1555760 - RNA, 19 nt, Artificial Sequence
  Description of Artificial Sequence: Synthetic oligonucleotide
  Sense strand starting at position 2396 of SEQ ID NO: 1245349
guagaaaucuguccauacc

SEQ ID NO: 1555761 - RNA, 19 nt, Artificial Sequence
  Description of Artificial Sequence: Synthetic oligonucleotide
  Antisense strand to SEQ ID NO: 1555760
gguauggacagauuucuac

SEQ ID NO: 1555762 - RNA, 19 nt, Artificial Sequence
  Description of Artificial Sequence: Synthetic oligonucleotide
  Sense strand starting at position 2502 of SEQ ID NO: 1245349
ggagcuuuacaguaauugu

SEQ ID NO: 1555763 - RNA, 19 nt, Artificial Sequence
  Description of Artificial Sequence: Synthetic oligonucleotide
  Antisense strand to SEQ ID NO: 1555762
acaauuacuguaaagcucc

SEQ ID NO: 1555764 - RNA, 19 nt, Artificial Sequence
  Description of Artificial Sequence: Synthetic oligonucleotide
  Sense strand starting at position 2513 of SEQ ID NO: 1245349
guaauuguacuugauacau

SEQ ID NO: 1555765 - RNA, 19 nt, Artificial Sequence
  Description of Artificial Sequence: Synthetic oligonucleotide
  Antisense strand to SEQ ID NO: 1555764
auguaucaaguacaauuac

SEQ ID NO: 1555766 - RNA, 19 nt, Artificial Sequence
  Description of Artificial Sequence: Synthetic oligonucleotide
  Sense strand starting at position 2638 of SEQ ID NO: 1245349
acucaacacgaaugcuaaa

SEQ ID NO: 1555767 - RNA, 19 nt, Artificial Sequence
  Description of Artificial Sequence: Synthetic oligonucleotide
  Antisense strand to SEQ ID NO: 1555766
uuuagcauucguguugagu

SEQ ID NO: 1555768 - RNA, 19 nt, Artificial Sequence
  Description of Artificial Sequence: Synthetic oligonucleotide
  Sense strand starting at position 2700 of SEQ ID NO: 1245349
auguuauuagaguaugccu

SEQ ID NO: 1555769 - RNA, 19 nt, Artificial Sequence
  Description of Artificial Sequence: Synthetic oligonucleotide
  Antisense strand to SEQ ID NO: 1555768
aggcauacucuaauaacau

SEQ ID NO: 1555770 - RNA, 19 nt, Artificial Sequence
  Description of Artificial Sequence: Synthetic oligonucleotide
  Sense strand starting at position 2785 of SEQ ID NO: 1245349
aaggguauccuguauccaa

SEQ ID NO: 1555771 - RNA, 19 nt, Artificial Sequence
  Description of Artificial Sequence: Synthetic oligonucleotide
  Antisense strand to SEQ ID NO: 1555770
uuggauacaggauacccuu

SEQ ID NO: 1555772 - RNA, 19 nt, Artificial Sequence
  Description of Artificial Sequence: Synthetic oligonucleotide
  Sense strand starting at position 2796 of SEQ ID NO: 1245349
guauccaagucauuacaua

SEQ ID NO: 1555773 - RNA, 19 nt, Artificial Sequence
  Description of Artificial Sequence: Synthetic oligonucleotide
  Antisense strand to SEQ ID NO: 1555772
uauguaaugacuuggauac

SEQ ID NO: 1555774 - RNA, 19 nt, Artificial Sequence
  Description of Artificial Sequence: Synthetic oligonucleotide
  Sense strand starting at position 3054 of SEQ ID NO: 1245349
acuuccauuguaugaggau

SEQ ID NO: 1555775 - RNA, 19 nt, Artificial Sequence
  Description of Artificial Sequence: Synthetic oligonucleotide
  Antisense strand to SEQ ID NO: 1555774
auccucauacaauggaagu

SEQ ID NO: 1555776 - RNA, 19 nt, Artificial Sequence
  Description of Artificial Sequence: Synthetic oligonucleotide
  Sense strand starting at position 3111 of SEQ ID NO: 1245349
cagugugaauggucacaaa

SEQ ID NO: 1555777 - RNA, 19 nt, Artificial Sequence
  Description of Artificial Sequence: Synthetic oligonucleotide
  Antisense strand to SEQ ID NO: 1555776
uuugugaccauucacacug

SEQ ID NO: 1555778 - RNA, 19 nt, Artificial Sequence
  Description of Artificial Sequence: Synthetic oligonucleotide
  Sense strand starting at position 3140 of SEQ ID NO: 1245349
cucaucuguguacaucaaa

SEQ ID NO: 1555779 - RNA, 19 nt, Artificial Sequence
  Description of Artificial Sequence: Synthetic oligonucleotide
  Antisense strand to SEQ ID NO: 1555778
uuugauguacacagaugag

SEQ ID NO: 1555780 - RNA, 19 nt, Artificial Sequence
  Description of Artificial Sequence: Synthetic oligonucleotide
  Sense strand starting at position 3239 of SEQ ID NO: 1245349
acgcguguccuuccuuaag

SEQ ID NO: 1555781 - RNA, 19 nt, Artificial Sequence
  Description of Artificial Sequence: Synthetic oligonucleotide
  Antisense strand to SEQ ID NO: 1555780
cuuaaggaaggacacgcgu

SEQ ID NO: 1555782 - RNA, 19 nt, Artificial Sequence
  Description of Artificial Sequence: Synthetic oligonucleotide
  Sense strand starting at position 3404 of SEQ ID NO: 1245349
ugcucugacuuccuaagaa

SEQ ID NO: 1555783 - RNA, 19 nt, Artificial Sequence
  Description of Artificial Sequence: Synthetic oligonucleotide
  Antisense strand to SEQ ID NO: 1555782
uucuuaggaagucagagca

SEQ ID NO: 1555784 - RNA, 19 nt, Artificial Sequence
  Description of Artificial Sequence: Synthetic oligonucleotide
  Sense strand starting at position 3598 of SEQ ID NO: 1245349
ggaggaaucuuucugccag

SEQ ID NO: 1555785 - RNA, 19 nt, Artificial Sequence
  Description of Artificial Sequence: Synthetic oligonucleotide
  Antisense strand to SEQ ID NO: 1555784
cuggcagaaagauuccucc

SEQ ID NO: 1555786 - RNA, 19 nt, Artificial Sequence
  Description of Artificial Sequence: Synthetic oligonucleotide
  Sense strand starting at position 3600 of SEQ ID NO: 1245349
aggaaucuuucugccagga

SEQ ID NO: 1555787 - RNA, 19 nt, Artificial Sequence
  Description of Artificial Sequence: Synthetic oligonucleotide
  Antisense strand to SEQ ID NO: 1555786
uccuggcagaaagauuccu

SEQ ID NO: 1555788 - RNA, 19 nt, Artificial Sequence
  Description of Artificial Sequence: Synthetic oligonucleotide
  Sense strand starting at position 3631 of SEQ ID NO: 1245349
auagauauaaguugggcua

SEQ ID NO: 1555789 - RNA, 19 nt, Artificial Sequence
  Description of Artificial Sequence: Synthetic oligonucleotide
  Antisense strand to SEQ ID NO: 1555788
uagcccaacuuauaucuau

SEQ ID NO: 1555790 - RNA, 19 nt, Artificial Sequence
  Description of Artificial Sequence: Synthetic oligonucleotide
  Sense strand starting at position 3867 of SEQ ID NO: 1245349
ucagauacagacugcuuaa

SEQ ID NO: 1555791 - RNA, 19 nt, Artificial Sequence
  Description of Artificial Sequence: Synthetic oligonucleotide
  Antisense strand to SEQ ID NO: 1555790
uuaagcagucuguaucuga

SEQ ID NO: 1555792 - RNA, 19 nt, Artificial Sequence
  Description of Artificial Sequence: Synthetic oligonucleotide
  Sense strand starting at position 3946 of SEQ ID NO: 1245349
acaaguugucaggguuaaa

SEQ ID NO: 1555793 - RNA, 19 nt, Artificial Sequence
  Description of Artificial Sequence: Synthetic oligonucleotide
  Antisense strand to SEQ ID NO: 1555792
uuuaacccugacaacuugu

SEQ ID NO: 1555794 - RNA, 19 nt, Artificial Sequence
  Description of Artificial Sequence: Synthetic oligonucleotide
  Sense strand starting at position 91 of SEQ ID NO: 1245350
uaggcauuacuugggaagu

SEQ ID NO: 1555795 - RNA, 19 nt, Artificial Sequence
  Description of Artificial Sequence: Synthetic oligonucleotide
  Antisense strand to SEQ ID NO: 1555794
acuucccaaguaaugccua

SEQ ID NO: 1555796 - RNA, 19 nt, Artificial Sequence
  Description of Artificial Sequence: Synthetic oligonucleotide
  Sense strand starting at position 105 of SEQ ID NO: 1245350
gaaguuaugaguugguaua

SEQ ID NO: 1555797 - RNA, 19 nt, Artificial Sequence
  Description of Artificial Sequence: Synthetic oligonucleotide
  Antisense strand to SEQ ID NO: 1555796
uauaccaacucauaacuuc

SEQ ID NO: 1555798 - RNA, 19 nt, Artificial Sequence
  Description of Artificial Sequence: Synthetic oligonucleotide
  Sense strand starting at position 107 of SEQ ID NO: 1245350
aguuaugaguugguauaca

SEQ ID NO: 1555799 - RNA, 19 nt, Artificial Sequence
  Description of Artificial Sequence: Synthetic oligonucleotide
  Antisense strand to SEQ ID NO: 1555798
uguauaccaacucauaacu

SEQ ID NO: 1555800 - RNA, 19 nt, Artificial Sequence
  Description of Artificial Sequence: Synthetic oligonucleotide
  Sense strand starting at position 117 of SEQ ID NO: 1245350
ugguauacaucugugaauu

SEQ ID NO: 1555801 - RNA, 19 nt, Artificial Sequence
  Description of Artificial Sequence: Synthetic oligonucleotide
  Antisense strand to SEQ ID NO: 1555800
aauucacagauguauacca

SEQ ID NO: 1555802 - RNA, 19 nt, Artificial Sequence
  Description of Artificial Sequence: Synthetic oligonucleotide
  Sense strand starting at position 130 of SEQ ID NO: 1245350
ugaauuuggugggaggaga

SEQ ID NO: 1555803 - RNA, 19 nt, Artificial Sequence
  Description of Artificial Sequence: Synthetic oligonucleotide
  Antisense strand to SEQ ID NO: 1555802
ucuccucccaccaaauuca

SEQ ID NO: 1555804 - RNA, 19 nt, Artificial Sequence
  Description of Artificial Sequence: Synthetic oligonucleotide
  Sense strand starting at position 266 of SEQ ID NO: 1245350
auauuagaagcuggucaaa

SEQ ID NO: 1555805 - RNA, 19 nt, Artificial Sequence
  Description of Artificial Sequence: Synthetic oligonucleotide
  Antisense strand to SEQ ID NO: 1555804
uuugaccagcuucuaauau

SEQ ID NO: 1555806 - RNA, 19 nt, Artificial Sequence
  Description of Artificial Sequence: Synthetic oligonucleotide
  Sense strand starting at position 268 of SEQ ID NO: 1245350
auuagaagcuggucaaaga

SEQ ID NO: 1555807 - RNA, 19 nt, Artificial Sequence
  Description of Artificial Sequence: Synthetic oligonucleotide
  Antisense strand to SEQ ID NO: 1555806
ucuuugaccagcuucuaau

SEQ ID NO: 1555808 - RNA, 19 nt, Artificial Sequence
  Description of Artificial Sequence: Synthetic oligonucleotide
  Sense strand starting at position 734 of SEQ ID NO: 1245350
auguacaaacugugacaaa

SEQ ID NO: 1555809 - RNA, 19 nt, Artificial Sequence
  Description of Artificial Sequence: Synthetic oligonucleotide
  Antisense strand to SEQ ID NO: 1555808
uuugucacaguuuguacau

SEQ ID NO: 1555810 - RNA, 19 nt, Artificial Sequence
  Description of Artificial Sequence: Synthetic oligonucleotide
  Sense strand starting at position 880 of SEQ ID NO: 1245350
ucgugaaauaacugaugau

SEQ ID NO: 1555811 - RNA, 19 nt, Artificial Sequence
  Description of Artificial Sequence: Synthetic oligonucleotide
  Antisense strand to SEQ ID NO: 1555810
aucaucaguuauuucacga

SEQ ID NO: 1555812 - RNA, 19 nt, Artificial Sequence
  Description of Artificial Sequence: Synthetic oligonucleotide
  Sense strand starting at position 962 of SEQ ID NO: 1245350
cuuaacaaggcguauuaua

SEQ ID NO: 1555813 - RNA, 19 nt, Artificial Sequence
  Description of Artificial Sequence: Synthetic oligonucleotide
  Antisense strand to SEQ ID NO: 1555812
uauaauacgccuuguuaag

SEQ ID NO: 1555814 - RNA, 19 nt, Artificial Sequence
  Description of Artificial Sequence: Synthetic oligonucleotide
  Sense strand starting at position 1244 of SEQ ID NO: 1245350
gaagucagacucuguuuaa

SEQ ID NO: 1555815 - RNA, 19 nt, Artificial Sequence
  Description of Artificial Sequence: Synthetic oligonucleotide
  Antisense strand to SEQ ID NO: 1555814
uuaaacagagucugacuuc

SEQ ID NO: 1555816 - RNA, 19 nt, Artificial Sequence
  Description of Artificial Sequence: Synthetic oligonucleotide
  Sense strand starting at position 1245 of SEQ ID NO: 1245350
aagucagacucuguuuaag

SEQ ID NO: 1555817 - RNA, 19 nt, Artificial Sequence
  Description of Artificial Sequence: Synthetic oligonucleotide
  Antisense strand to SEQ ID NO: 1555816
cuuaaacagagucugacuu

SEQ ID NO: 1555818 - RNA, 19 nt, Artificial Sequence
  Description of Artificial Sequence: Synthetic oligonucleotide
  Sense strand starting at position 1248 of SEQ ID NO: 1245350
ucagacucuguuuaaguuu

SEQ ID NO: 1555819 - RNA, 19 nt, Artificial Sequence
  Description of Artificial Sequence: Synthetic oligonucleotide
  Antisense strand to SEQ ID NO: 1555818
aaacuuaaacagagucuga

SEQ ID NO: 1555820 - RNA, 19 nt, Artificial Sequence
  Description of Artificial Sequence: Synthetic oligonucleotide
  Sense strand starting at position 1316 of SEQ ID NO: 1245350
uugucugucaaacauggua

SEQ ID NO: 1555821 - RNA, 19 nt, Artificial Sequence
  Description of Artificial Sequence: Synthetic oligonucleotide
  Antisense strand to SEQ ID NO: 1555820
uaccauguuugacagacaa

SEQ ID NO: 1555822 - RNA, 19 nt, Artificial Sequence
  Description of Artificial Sequence: Synthetic oligonucleotide
  Sense strand starting at position 1423 of SEQ ID NO: 1245350
uguguuaaauauuugucga

SEQ ID NO: 1555823 - RNA, 19 nt, Artificial Sequence
  Description of Artificial Sequence: Synthetic oligonucleotide
  Antisense strand to SEQ ID NO: 1555822
ucgacaaauauuuaacaca

SEQ ID NO: 1555824 - RNA, 19 nt, Artificial Sequence
  Description of Artificial Sequence: Synthetic oligonucleotide
  Sense strand starting at position 1424 of SEQ ID NO: 1245350
guguuaaauauuugucgau

SEQ ID NO: 1555825 - RNA, 19 nt, Artificial Sequence
  Description of Artificial Sequence: Synthetic oligonucleotide
  Antisense strand to SEQ ID NO: 1555824
aucgacaaauauuuaacac

SEQ ID NO: 1555826 - RNA, 19 nt, Artificial Sequence
  Description of Artificial Sequence: Synthetic oligonucleotide
  Sense strand starting at position 1524 of SEQ ID NO: 1245350
agaaguguugagugagaga

SEQ ID NO: 1555827 - RNA, 19 nt, Artificial Sequence
  Description of Artificial Sequence: Synthetic oligonucleotide
  Antisense strand to SEQ ID NO: 1555826
ucucucacucaacacuucu

SEQ ID NO: 1555828 - RNA, 19 nt, Artificial Sequence
  Description of Artificial Sequence: Synthetic oligonucleotide
  Sense strand starting at position 1538 of SEQ ID NO: 1245350
agagaauuaugggcacauu

SEQ ID NO: 1555829 - RNA, 19 nt, Artificial Sequence
  Description of Artificial Sequence: Synthetic oligonucleotide
  Antisense strand to SEQ ID NO: 1555828
aaugugcccauaauucucu

SEQ ID NO: 1555830 - RNA, 19 nt, Artificial Sequence
  Description of Artificial Sequence: Synthetic oligonucleotide
  Sense strand starting at position 1739 of SEQ ID NO: 1245350
agcccaaauacgugaugaa

SEQ ID NO: 1555831 - RNA, 19 nt, Artificial Sequence
  Description of Artificial Sequence: Synthetic oligonucleotide
  Antisense strand to SEQ ID NO: 1555830
uucaucacguauuugggcu

SEQ ID NO: 1555832 - RNA, 19 nt, Artificial Sequence
  Description of Artificial Sequence: Synthetic oligonucleotide
  Sense strand starting at position 1740 of SEQ ID NO: 1245350
gcccaaauacgugaugaag

SEQ ID NO: 1555833 - RNA, 19 nt, Artificial Sequence
  Description of Artificial Sequence: Synthetic oligonucleotide
  Antisense strand to SEQ ID NO: 1555832
cuucaucacguauuugggc

SEQ ID NO: 1555834 - RNA, 19 nt, Artificial Sequence
  Description of Artificial Sequence: Synthetic oligonucleotide
  Sense strand starting at position 1768 of SEQ ID NO: 1245350
aaagcauguggaugaauaa

SEQ ID NO: 1555835 - RNA, 19 nt, Artificial Sequence
  Description of Artificial Sequence: Synthetic oligonucleotide
  Antisense strand to SEQ ID NO: 1555834
uuauucauccacaugcuuu

SEQ ID NO: 1555836 - RNA, 19 nt, Artificial Sequence
  Description of Artificial Sequence: Synthetic oligonucleotide
  Sense strand starting at position 1964 of SEQ ID NO: 1245350
ucucauacuugggucacaa

SEQ ID NO: 1555837 - RNA, 19 nt, Artificial Sequence
  Description of Artificial Sequence: Synthetic oligonucleotide
  Antisense strand to SEQ ID NO: 1555836
uugugacccaaguaugaga

SEQ ID NO: 1555838 - RNA, 19 nt, Artificial Sequence
  Description of Artificial Sequence: Synthetic oligonucleotide
  Sense strand starting at position 2011 of SEQ ID NO: 1245350
aagagaaucuaguucuuag

SEQ ID NO: 1555839 - RNA, 19 nt, Artificial Sequence
  Description of Artificial Sequence: Synthetic oligonucleotide
  Antisense strand to SEQ ID NO: 1555838
cuaagaacuagauucucuu

SEQ ID NO: 1555840 - RNA, 19 nt, Artificial Sequence
  Description of Artificial Sequence: Synthetic oligonucleotide
  Sense strand starting at position 2029 of SEQ ID NO: 1245350
ggcuaacacucaucacaug

SEQ ID NO: 1555841 - RNA, 19 nt, Artificial Sequence
  Description of Artificial Sequence: Synthetic oligonucleotide
  Antisense strand to SEQ ID NO: 1555840
caugugaugaguguuagcc

SEQ ID NO: 1555842 - RNA, 19 nt, Artificial Sequence
  Description of Artificial Sequence: Synthetic oligonucleotide
  Sense strand starting at position 2040 of SEQ ID NO: 1245350
aucacauguuuccuaugau

SEQ ID NO: 1555843 - RNA, 19 nt, Artificial Sequence
  Description of Artificial Sequence: Synthetic oligonucleotide
  Antisense strand to SEQ ID NO: 1555842
aucauaggaaacaugugau

SEQ ID NO: 1555844 - RNA, 19 nt, Artificial Sequence
  Description of Artificial Sequence: Synthetic oligonucleotide
  Sense strand starting at position 2043 of SEQ ID NO: 1245350
acauguuuccuaugaugga

SEQ ID NO: 1555845 - RNA, 19 nt, Artificial Sequence
  Description of Artificial Sequence: Synthetic oligonucleotide
  Antisense strand to SEQ ID NO: 1555844
uccaucauaggaaacaugu

SEQ ID NO: 1555846 - RNA, 19 nt, Artificial Sequence
  Description of Artificial Sequence: Synthetic oligonucleotide
  Sense strand starting at position 2047 of SEQ ID NO: 1245350
guuuccuaugauggaaauu

SEQ ID NO: 1555847 - RNA, 19 nt, Artificial Sequence
  Description of Artificial Sequence: Synthetic oligonucleotide
  Antisense strand to SEQ ID NO: 1555846
aauuuccaucauaggaaac

SEQ ID NO: 1555848 - RNA, 19 nt, Artificial Sequence
  Description of Artificial Sequence: Synthetic oligonucleotide
  Sense strand starting at position 2195 of SEQ ID NO: 1245350
ugggaauugugagcggaau

SEQ ID NO: 1555849 - RNA, 19 nt, Artificial Sequence
  Description of Artificial Sequence: Synthetic oligonucleotide
  Antisense strand to SEQ ID NO: 1555848
auuccgcucacaauuccca

SEQ ID NO: 1555850 - RNA, 19 nt, Artificial Sequence
  Description of Artificial Sequence: Synthetic oligonucleotide
  Sense strand starting at position 2196 of SEQ ID NO: 1245350
gggaauugugagcggaaug

SEQ ID NO: 1555851 - RNA, 19 nt, Artificial Sequence
  Description of Artificial Sequence: Synthetic oligonucleotide
  Antisense strand to SEQ ID NO: 1555850
cauuccgcucacaauuccc

SEQ ID NO: 1555852 - RNA, 19 nt, Artificial Sequence
  Description of Artificial Sequence: Synthetic oligonucleotide
  Sense strand starting at position 2197 of SEQ ID NO: 1245350
ggaauugugagcggaauga

SEQ ID NO: 1555853 - RNA, 19 nt, Artificial Sequence
  Description of Artificial Sequence: Synthetic oligonucleotide
  Antisense strand to SEQ ID NO: 1555852
ucauuccgcucacaauucc

SEQ ID NO: 1555854 - RNA, 19 nt, Artificial Sequence
  Description of Artificial Sequence: Synthetic oligonucleotide
  Sense strand starting at position 2229 of SEQ ID NO: 1245350
uccugacugcgacaugaau

SEQ ID NO: 1555855 - RNA, 19 nt, Artificial Sequence
  Description of Artificial Sequence: Synthetic oligonucleotide
  Antisense strand to SEQ ID NO: 1555854
auucaugucgcagucagga

SEQ ID NO: 1555856 - RNA, 19 nt, Artificial Sequence
  Description of Artificial Sequence: Synthetic oligonucleotide
  Sense strand starting at position 2653 of SEQ ID NO: 1245350
ggucuuauacaauagaagc

SEQ ID NO: 1555857 - RNA, 19 nt, Artificial Sequence
  Description of Artificial Sequence: Synthetic oligonucleotide
  Antisense strand to SEQ ID NO: 1555856
gcuucuauuguauaagacc

SEQ ID NO: 1555858 - RNA, 19 nt, Artificial Sequence
  Description of Artificial Sequence: Synthetic oligonucleotide
  Sense strand starting at position 2808 of SEQ ID NO: 1245350
cacagaguugugcaaauca

SEQ ID NO: 1555859 - RNA, 19 nt, Artificial Sequence
  Description of Artificial Sequence: Synthetic oligonucleotide
  Antisense strand to SEQ ID NO: 1555858
ugauuugcacaacucugug

SEQ ID NO: 1555860 - RNA, 19 nt, Artificial Sequence
  Description of Artificial Sequence: Synthetic oligonucleotide
  Sense strand starting at position 2818 of SEQ ID NO: 1245350
ugcaaaucauuucugcgau

SEQ ID NO: 1555861 - RNA, 19 nt, Artificial Sequence
  Description of Artificial Sequence: Synthetic oligonucleotide
  Antisense strand to SEQ ID NO: 1555860
aucgcagaaaugauuugca

SEQ ID NO: 1555862 - RNA, 19 nt, Artificial Sequence
  Description of Artificial Sequence: Synthetic oligonucleotide
  Sense strand starting at position 3044 of SEQ ID NO: 1245350
ugagcuaaaguguaaguga

SEQ ID NO: 1555863 - RNA, 19 nt, Artificial Sequence
  Description of Artificial Sequence: Synthetic oligonucleotide
  Antisense strand to SEQ ID NO: 1555862
ucacuuacacuuuagcuca

SEQ ID NO: 1555864 - RNA, 19 nt, Artificial Sequence
  Description of Artificial Sequence: Synthetic oligonucleotide
  Sense strand starting at position 3047 of SEQ ID NO: 1245350
gcuaaaguguaagugaaga

SEQ ID NO: 1555865 - RNA, 19 nt, Artificial Sequence
  Description of Artificial Sequence: Synthetic oligonucleotide
  Antisense strand to SEQ ID NO: 1555864
ucuucacuuacacuuuagc

SEQ ID NO: 1555866 - RNA, 19 nt, Artificial Sequence
  Description of Artificial Sequence: Synthetic oligonucleotide
  Sense strand starting at position 3098 of SEQ ID NO: 1245350
ugggaacgguguuuauaag

SEQ ID NO: 1555867 - RNA, 19 nt, Artificial Sequence
  Description of Artificial Sequence: Synthetic oligonucleotide
  Antisense strand to SEQ ID NO: 1555866
cuuauaaacaccguuccca

SEQ ID NO: 1555868 - RNA, 19 nt, Artificial Sequence
  Description of Artificial Sequence: Synthetic oligonucleotide
  Sense strand starting at position 3099 of SEQ ID NO: 1245350
gggaacgguguuuauaagu

SEQ ID NO: 1555869 - RNA, 19 nt, Artificial Sequence
  Description of Artificial Sequence: Synthetic oligonucleotide
  Antisense strand to SEQ ID NO: 1555868
acuuauaaacaccguuccc

SEQ ID NO: 1555870 - RNA, 19 nt, Artificial Sequence
  Description of Artificial Sequence: Synthetic oligonucleotide
  Sense strand starting at position 3453 of SEQ ID NO: 1245350
acaucauugucacuuauga

SEQ ID NO: 1555871 - RNA, 19 nt, Artificial Sequence
  Description of Artificial Sequence: Synthetic oligonucleotide
  Antisense strand to SEQ ID NO: 1555870
ucauaagugacaaugaugu

SEQ ID NO: 1555872 - RNA, 19 nt, Artificial Sequence
  Description of Artificial Sequence: Synthetic oligonucleotide
  Sense strand starting at position 3780 of SEQ ID NO: 1245350
acaagcuuccaaggaauca

SEQ ID NO: 1555873 - RNA, 19 nt, Artificial Sequence
  Description of Artificial Sequence: Synthetic oligonucleotide
  Antisense strand to SEQ ID NO: 1555872
ugauuccuuggaagcuugu

SEQ ID NO: 1555874 - RNA, 19 nt, Artificial Sequence
  Description of Artificial Sequence: Synthetic oligonucleotide
  Sense strand starting at position 14 of SEQ ID NO: 1245351
ucagauauuuaagaugcaa

SEQ ID NO: 1555875 - RNA, 19 nt, Artificial Sequence
  Description of Artificial Sequence: Synthetic oligonucleotide
  Antisense strand to SEQ ID NO: 1555874
uugcaucuuaaauaucuga

SEQ ID NO: 1555876 - RNA, 19 nt, Artificial Sequence
  Description of Artificial Sequence: Synthetic oligonucleotide
  Sense strand starting at position 135 of SEQ ID NO: 1245351
agggcuaucuaaucccuga

SEQ ID NO: 1555877 - RNA, 19 nt, Artificial Sequence
  Description of Artificial Sequence: Synthetic oligonucleotide
  Antisense strand to SEQ ID NO: 1555876
ucagggauuagauagcccu

SEQ ID NO: 1555878 - RNA, 19 nt, Artificial Sequence
  Description of Artificial Sequence: Synthetic oligonucleotide
  Sense strand starting at position 232 of SEQ ID NO: 1245351
aaaggugcugaauaaguua

SEQ ID NO: 1555879 - RNA, 19 nt, Artificial Sequence
  Description of Artificial Sequence: Synthetic oligonucleotide
  Antisense strand to SEQ ID NO: 1555878
uaacuuauucagcaccuuu

SEQ ID NO: 1555880 - RNA, 19 nt, Artificial Sequence
  Description of Artificial Sequence: Synthetic oligonucleotide
  Sense strand starting at position 240 of SEQ ID NO: 1245351
ugaauaaguuauguaugag

SEQ ID NO: 1555881 - RNA, 19 nt, Artificial Sequence
  Description of Artificial Sequence: Synthetic oligonucleotide
  Antisense strand to SEQ ID NO: 1555880
cucauacauaacuuauuca

SEQ ID NO: 1555882 - RNA, 19 nt, Artificial Sequence
  Description of Artificial Sequence: Synthetic oligonucleotide
  Sense strand starting at position 243 of SEQ ID NO: 1245351
auaaguuauguaugagaac

SEQ ID NO: 1555883 - RNA, 19 nt, Artificial Sequence
  Description of Artificial Sequence: Synthetic oligonucleotide
  Antisense strand to SEQ ID NO: 1555882
guucucauacauaacuuau

SEQ ID NO: 1555884 - RNA, 19 nt, Artificial Sequence
  Description of Artificial Sequence: Synthetic oligonucleotide
  Sense strand starting at position 490 of SEQ ID NO: 1245351
auaggauagcgcuaugaac

SEQ ID NO: 1555885 - RNA, 19 nt, Artificial Sequence
  Description of Artificial Sequence: Synthetic oligonucleotide
  Antisense strand to SEQ ID NO: 1555884
guucauagcgcuauccuau

SEQ ID NO: 1555886 - RNA, 19 nt, Artificial Sequence
  Description of Artificial Sequence: Synthetic oligonucleotide
  Sense strand starting at position 651 of SEQ ID NO: 1245351
agaauaugcucaucuagaa

SEQ ID NO: 1555887 - RNA, 19 nt, Artificial Sequence
  Description of Artificial Sequence: Synthetic oligonucleotide
  Antisense strand to SEQ ID NO: 1555886
uucuagaugagcauauucu

SEQ ID NO: 1555888 - RNA, 19 nt, Artificial Sequence
  Description of Artificial Sequence: Synthetic oligonucleotide
  Sense strand starting at position 666 of SEQ ID NO: 1245351
agaaauaaccguuaugcau

SEQ ID NO: 1555889 - RNA, 19 nt, Artificial Sequence
  Description of Artificial Sequence: Synthetic oligonucleotide
  Antisense strand to SEQ ID NO: 1555888
augcauaacgguuauuucu

SEQ ID NO: 1555890 - RNA, 19 nt, Artificial Sequence
  Description of Artificial Sequence: Synthetic oligonucleotide
  Sense strand starting at position 775 of SEQ ID NO: 1245351
uccugaaagcucugaucug

SEQ ID NO: 1555891 - RNA, 19 nt, Artificial Sequence
  Description of Artificial Sequence: Synthetic oligonucleotide
  Antisense strand to SEQ ID NO: 1555890
cagaucagagcuuucagga

SEQ ID NO: 1555892 - RNA, 19 nt, Artificial Sequence
  Description of Artificial Sequence: Synthetic oligonucleotide
  Sense strand starting at position 1177 of SEQ ID NO: 1245351
uguuauaugcaugaaugaa

SEQ ID NO: 1555893 - RNA, 19 nt, Artificial Sequence
  Description of Artificial Sequence: Synthetic oligonucleotide
  Antisense strand to SEQ ID NO: 1555892
uucauucaugcauauaaca

SEQ ID NO: 1555894 - RNA, 19 nt, Artificial Sequence
  Description of Artificial Sequence: Synthetic oligonucleotide
  Sense strand starting at position 1279 of SEQ ID NO: 1245351
uuauguguuugcucuauuu

SEQ ID NO: 1555895 - RNA, 19 nt, Artificial Sequence
  Description of Artificial Sequence: Synthetic oligonucleotide
  Antisense strand to SEQ ID NO: 1555894
aaauagagcaaacacauaa

SEQ ID NO: 1555896 - RNA, 19 nt, Artificial Sequence
  Description of Artificial Sequence: Synthetic oligonucleotide
  Sense strand starting at position 1305 of SEQ ID NO: 1245351
ucagguucucuccacucua

SEQ ID NO: 1555897 - RNA, 19 nt, Artificial Sequence
  Description of Artificial Sequence: Synthetic oligonucleotide
  Antisense strand to SEQ ID NO: 1555896
uagaguggagagaaccuga

SEQ ID NO: 1555898 - RNA, 19 nt, Artificial Sequence
  Description of Artificial Sequence: Synthetic oligonucleotide
  Sense strand starting at position 1463 of SEQ ID NO: 1245351
aacagucauuuggaaggaa

SEQ ID NO: 1555899 - RNA, 19 nt, Artificial Sequence
  Description of Artificial Sequence: Synthetic oligonucleotide
  Antisense strand to SEQ ID NO: 1555898
uuccuuccaaaugacuguu

SEQ ID NO: 1555900 - RNA, 19 nt, Artificial Sequence
  Description of Artificial Sequence: Synthetic oligonucleotide
  Sense strand starting at position 1560 of SEQ ID NO: 1245351
ggauccacucucuaaagcu

SEQ ID NO: 1555901 - RNA, 19 nt, Artificial Sequence
  Description of Artificial Sequence: Synthetic oligonucleotide
  Antisense strand to SEQ ID NO: 1555900
agcuuuagagaguggaucc

SEQ ID NO: 1555902 - RNA, 19 nt, Artificial Sequence
  Description of Artificial Sequence: Synthetic oligonucleotide
  Sense strand starting at position 1650 of SEQ ID NO: 1245351
agaagaagaucuuaggauu

SEQ ID NO: 1555903 - RNA, 19 nt, Artificial Sequence
  Description of Artificial Sequence: Synthetic oligonucleotide
  Antisense strand to SEQ ID NO: 1555902
aauccuaagaucuucuucu

SEQ ID NO: 1555904 - RNA, 19 nt, Artificial Sequence
  Description of Artificial Sequence: Synthetic oligonucleotide
  Sense strand starting at position 1656 of SEQ ID NO: 1245351
agaucuuaggauuggcaaa

SEQ ID NO: 1555905 - RNA, 19 nt, Artificial Sequence
  Description of Artificial Sequence: Synthetic oligonucleotide
  Antisense strand to SEQ ID NO: 1555904
uuugccaauccuaagaucu

SEQ ID NO: 1555906 - RNA, 19 nt, Artificial Sequence
  Description of Artificial Sequence: Synthetic oligonucleotide
  Sense strand starting at position 1753 of SEQ ID NO: 1245351
ucaucccugcgacaauaaa

SEQ ID NO: 1555907 - RNA, 19 nt, Artificial Sequence
  Description of Artificial Sequence: Synthetic oligonucleotide
  Antisense strand to SEQ ID NO: 1555906
uuuauugucgcagggauga

SEQ ID NO: 1555908 - RNA, 19 nt, Artificial Sequence
  Description of Artificial Sequence: Synthetic oligonucleotide
  Sense strand starting at position 1992 of SEQ ID NO: 1245351
aagcguggugaauaugcaa

SEQ ID NO: 1555909 - RNA, 19 nt, Artificial Sequence
  Description of Artificial Sequence: Synthetic oligonucleotide
  Antisense strand to SEQ ID NO: 1555908
uugcauauucaccacgcuu

SEQ ID NO: 1555910 - RNA, 19 nt, Artificial Sequence
  Description of Artificial Sequence: Synthetic oligonucleotide
  Sense strand starting at position 2164 of SEQ ID NO: 1245351
uuuauuaguuccucgaaua

SEQ ID NO: 1555911 - RNA, 19 nt, Artificial Sequence
  Description of Artificial Sequence: Synthetic oligonucleotide
  Antisense strand to SEQ ID NO: 1555910
uauucgaggaacuaauaaa

SEQ ID NO: 1555912 - RNA, 19 nt, Artificial Sequence
  Description of Artificial Sequence: Synthetic oligonucleotide
  Sense strand starting at position 2165 of SEQ ID NO: 1245351
uuauuaguuccucgaauaa

SEQ ID NO: 1555913 - RNA, 19 nt, Artificial Sequence
  Description of Artificial Sequence: Synthetic oligonucleotide
  Antisense strand to SEQ ID NO: 1555912
uuauucgaggaacuaauaa

SEQ ID NO: 1555914 - RNA, 19 nt, Artificial Sequence
  Description of Artificial Sequence: Synthetic oligonucleotide
  Sense strand starting at position 2176 of SEQ ID NO: 1245351
ucgaauaaugccgauucuu

SEQ ID NO: 1555915 - RNA, 19 nt, Artificial Sequence
  Description of Artificial Sequence: Synthetic oligonucleotide
  Antisense strand to SEQ ID NO: 1555914
aagaaucggcauuauucga

SEQ ID NO: 1555916 - RNA, 19 nt, Artificial Sequence
  Description of Artificial Sequence: Synthetic oligonucleotide
  Sense strand starting at position 2337 of SEQ ID NO: 1245351
ggguccauuauugagcaga

SEQ ID NO: 1555917 - RNA, 19 nt, Artificial Sequence
  Description of Artificial Sequence: Synthetic oligonucleotide
  Antisense strand to SEQ ID NO: 1555916
ucugcucaauaauggaccc

SEQ ID NO: 1555918 - RNA, 19 nt, Artificial Sequence
  Description of Artificial Sequence: Synthetic oligonucleotide
  Sense strand starting at position 2339 of SEQ ID NO: 1245351
guccauuauugagcagaau

SEQ ID NO: 1555919 - RNA, 19 nt, Artificial Sequence
  Description of Artificial Sequence: Synthetic oligonucleotide
  Antisense strand to SEQ ID NO: 1555918
auucugcucaauaauggac

SEQ ID NO: 1555920 - RNA, 19 nt, Artificial Sequence
  Description of Artificial Sequence: Synthetic oligonucleotide
  Sense strand starting at position 2442 of SEQ ID NO: 1245351
aagggaaucguaugaugca

SEQ ID NO: 1555921 - RNA, 19 nt, Artificial Sequence
  Description of Artificial Sequence: Synthetic oligonucleotide
  Antisense strand to SEQ ID NO: 1555920
ugcaucauacgauucccuu

SEQ ID NO: 1555922 - RNA, 19 nt, Artificial Sequence
  Description of Artificial Sequence: Synthetic oligonucleotide
  Sense strand starting at position 2449 of SEQ ID NO: 1245351
ucguaugaugcacaucuaa

SEQ ID NO: 1555923 - RNA, 19 nt, Artificial Sequence
  Description of Artificial Sequence: Synthetic oligonucleotide
  Antisense strand to SEQ ID NO: 1555922
uuagaugugcaucauacga

SEQ ID NO: 1555924 - RNA, 19 nt, Artificial Sequence
  Description of Artificial Sequence: Synthetic oligonucleotide
  Sense strand starting at position 2525 of SEQ ID NO: 1245351
gagaacucgacucggagaa

SEQ ID NO: 1555925 - RNA, 19 nt, Artificial Sequence
  Description of Artificial Sequence: Synthetic oligonucleotide
  Antisense strand to SEQ ID NO: 1555924
uucuccgagucgaguucuc

SEQ ID NO: 1555926 - RNA, 19 nt, Artificial Sequence
  Description of Artificial Sequence: Synthetic oligonucleotide
  Sense strand starting at position 2526 of SEQ ID NO: 1245351
agaacucgacucggagaaa

SEQ ID NO: 1555927 - RNA, 19 nt, Artificial Sequence
  Description of Artificial Sequence: Synthetic oligonucleotide
  Antisense strand to SEQ ID NO: 1555926
uuucuccgagucgaguucu

SEQ ID NO: 1555928 - RNA, 19 nt, Artificial Sequence
  Description of Artificial Sequence: Synthetic oligonucleotide
  Sense strand starting at position 2639 of SEQ ID NO: 1245351
cugacugcuuggucaacaa

SEQ ID NO: 1555929 - RNA, 19 nt, Artificial Sequence
  Description of Artificial Sequence: Synthetic oligonucleotide
  Antisense strand to SEQ ID NO: 1555928
uuguugaccaagcagucag

SEQ ID NO: 1555930 - RNA, 19 nt, Artificial Sequence
  Description of Artificial Sequence: Synthetic oligonucleotide
  Sense strand starting at position 2926 of SEQ ID NO: 1245351
gcuauuugcugggcucuaa

SEQ ID NO: 1555931 - RNA, 19 nt, Artificial Sequence
  Description of Artificial Sequence: Synthetic oligonucleotide
  Antisense strand to SEQ ID NO: 1555930
uuagagcccagcaaauagc

SEQ ID NO: 1555932 - RNA, 19 nt, Artificial Sequence
  Description of Artificial Sequence: Synthetic oligonucleotide
  Sense strand starting at position 3048 of SEQ ID NO: 1245351
agcccaguaucuguauaaa

SEQ ID NO: 1555933 - RNA, 19 nt, Artificial Sequence
  Description of Artificial Sequence: Synthetic oligonucleotide
  Antisense strand to SEQ ID NO: 1555932
uuuauacagauacugggcu

SEQ ID NO: 1555934 - RNA, 19 nt, Artificial Sequence
  Description of Artificial Sequence: Synthetic oligonucleotide
  Sense strand starting at position 3051 of SEQ ID NO: 1245351
ccaguaucuguauaaauau

SEQ ID NO: 1555935 - RNA, 19 nt, Artificial Sequence
  Description of Artificial Sequence: Synthetic oligonucleotide
  Antisense strand to SEQ ID NO: 1555934
auauuuauacagauacugg

SEQ ID NO: 1555936 - RNA, 19 nt, Artificial Sequence
  Description of Artificial Sequence: Synthetic oligonucleotide
  Sense strand starting at position 3184 of SEQ ID NO: 1245351
auggcaagguuucucacaa

SEQ ID NO: 1555937 - RNA, 19 nt, Artificial Sequence
  Description of Artificial Sequence: Synthetic oligonucleotide
  Antisense strand to SEQ ID NO: 1555936
uugugagaaaccuugccau

SEQ ID NO: 1555938 - RNA, 19 nt, Artificial Sequence
  Description of Artificial Sequence: Synthetic oligonucleotide
  Sense strand starting at position 3185 of SEQ ID NO: 1245351
uggcaagguuucucacaag

SEQ ID NO: 1555939 - RNA, 19 nt, Artificial Sequence
  Description of Artificial Sequence: Synthetic oligonucleotide
  Antisense strand to SEQ ID NO: 1555938
cuugugagaaaccuugcca

SEQ ID NO: 1555940 - RNA, 19 nt, Artificial Sequence
  Description of Artificial Sequence: Synthetic oligonucleotide
  Sense strand starting at position 3541 of SEQ ID NO: 1245351
guugguuccgaggagcaaa

SEQ ID NO: 1555941 - RNA, 19 nt, Artificial Sequence
  Description of Artificial Sequence: Synthetic oligonucleotide
  Antisense strand to SEQ ID NO: 1555940
uuugcuccucggaaccaac

SEQ ID NO: 1555942 - RNA, 19 nt, Artificial Sequence
  Description of Artificial Sequence: Synthetic oligonucleotide
  Sense strand starting at position 3564 of SEQ ID NO: 1245351
gggcuaaugguggaaaguu

SEQ ID NO: 1555943 - RNA, 19 nt, Artificial Sequence
  Description of Artificial Sequence: Synthetic oligonucleotide
  Antisense strand to SEQ ID NO: 1555942
aacuuuccaccauuagccc

SEQ ID NO: 1555944 - RNA, 19 nt, Artificial Sequence
  Description of Artificial Sequence: Synthetic oligonucleotide
  Sense strand starting at position 3641 of SEQ ID NO: 1245351
cccagagguuugucuaacu

SEQ ID NO: 1555945 - RNA, 19 nt, Artificial Sequence
  Description of Artificial Sequence: Synthetic oligonucleotide
  Antisense strand to SEQ ID NO: 1555944
aguuagacaaaccucuggg

SEQ ID NO: 1555946 - RNA, 19 nt, Artificial Sequence
  Description of Artificial Sequence: Synthetic oligonucleotide
  Sense strand starting at position 3697 of SEQ ID NO: 1245351
uuguguaaacaguacuuga

SEQ ID NO: 1555947 - RNA, 19 nt, Artificial Sequence
  Description of Artificial Sequence: Synthetic oligonucleotide
  Antisense strand to SEQ ID NO: 1555946
ucaaguacuguuuacacaa

SEQ ID NO: 1555948 - RNA, 19 nt, Artificial Sequence
  Description of Artificial Sequence: Synthetic oligonucleotide
  Sense strand starting at position 3700 of SEQ ID NO: 1245351
uguaaacaguacuugaauu

SEQ ID NO: 1555949 - RNA, 19 nt, Artificial Sequence
  Description of Artificial Sequence: Synthetic oligonucleotide
  Antisense strand to SEQ ID NO: 1555948
aauucaaguacuguuuaca

SEQ ID NO: 1555950 - RNA, 19 nt, Artificial Sequence
  Description of Artificial Sequence: Synthetic oligonucleotide
  Sense strand starting at position 3769 of SEQ ID NO: 1245351
uagaacaguuaguugucaa

SEQ ID NO: 1555951 - RNA, 19 nt, Artificial Sequence
  Description of Artificial Sequence: Synthetic oligonucleotide
  Antisense strand to SEQ ID NO: 1555950
uugacaacuaacuguucua

SEQ ID NO: 1555952 - RNA, 19 nt, Artificial Sequence
  Description of Artificial Sequence: Synthetic oligonucleotide
  Sense strand starting at position 3795 of SEQ ID NO: 1245351
ggaucacauuuguaaccuu

SEQ ID NO: 1555953 - RNA, 19 nt, Artificial Sequence
  Description of Artificial Sequence: Synthetic oligonucleotide
  Antisense strand to SEQ ID NO: 1555952
aagguuacaaaugugaucc

SEQ ID NO: 1555954 - RNA, 19 nt, Artificial Sequence
  Description of Artificial Sequence: Synthetic oligonucleotide
  Sense strand starting at position 152 of SEQ ID NO: 1245352
gaugaaauugcaggucuug

SEQ ID NO: 1555955 - RNA, 19 nt, Artificial Sequence
  Description of Artificial Sequence: Synthetic oligonucleotide
  Antisense strand to SEQ ID NO: 1555954
caagaccugcaauuucauc

SEQ ID NO: 1555956 - RNA, 19 nt, Artificial Sequence
  Description of Artificial Sequence: Synthetic oligonucleotide
  Sense strand starting at position 267 of SEQ ID NO: 1245352
gagcucgucccagagaaca

SEQ ID NO: 1555957 - RNA, 19 nt, Artificial Sequence
  Description of Artificial Sequence: Synthetic oligonucleotide
  Antisense strand to SEQ ID NO: 1555956
uguucucugggacgagcuc

SEQ ID NO: 1555958 - RNA, 19 nt, Artificial Sequence
  Description of Artificial Sequence: Synthetic oligonucleotide
  Sense strand starting at position 297 of SEQ ID NO: 1245352
aaggucacucuggguuaau

SEQ ID NO: 1555959 - RNA, 19 nt, Artificial Sequence
  Description of Artificial Sequence: Synthetic oligonucleotide
  Antisense strand to SEQ ID NO: 1555958
auuaacccagagugaccuu

SEQ ID NO: 1555960 - RNA, 19 nt, Artificial Sequence
  Description of Artificial Sequence: Synthetic oligonucleotide
  Sense strand starting at position 298 of SEQ ID NO: 1245352
aggucacucuggguuaaua

SEQ ID NO: 1555961 - RNA, 19 nt, Artificial Sequence
  Description of Artificial Sequence: Synthetic oligonucleotide
  Antisense strand to SEQ ID NO: 1555960
uauuaacccagagugaccu

SEQ ID NO: 1555962 - RNA, 19 nt, Artificial Sequence
  Description of Artificial Sequence: Synthetic oligonucleotide
  Sense strand starting at position 300 of SEQ ID NO: 1245352
gucacucuggguuaauaca

SEQ ID NO: 1555963 - RNA, 19 nt, Artificial Sequence
  Description of Artificial Sequence: Synthetic oligonucleotide
  Antisense strand to SEQ ID NO: 1555962
uguauuaacccagagugac

SEQ ID NO: 1555964 - RNA, 19 nt, Artificial Sequence
  Description of Artificial Sequence: Synthetic oligonucleotide
  Sense strand starting at position 313 of SEQ ID NO: 1245352
aauacaaggucaucgauca

SEQ ID NO: 1555965 - RNA, 19 nt, Artificial Sequence
  Description of Artificial Sequence: Synthetic oligonucleotide
  Antisense strand to SEQ ID NO: 1555964
ugaucgaugaccuuguauu

SEQ ID NO: 1555966 - RNA, 19 nt, Artificial Sequence
  Description of Artificial Sequence: Synthetic oligonucleotide
  Sense strand starting at position 314 of SEQ ID NO: 1245352
auacaaggucaucgaucau

SEQ ID NO: 1555967 - RNA, 19 nt, Artificial Sequence
  Description of Artificial Sequence: Synthetic oligonucleotide
  Antisense strand to SEQ ID NO: 1555966
augaucgaugaccuuguau

SEQ ID NO: 1555968 - RNA, 19 nt, Artificial Sequence
  Description of Artificial Sequence: Synthetic oligonucleotide
  Sense strand starting at position 456 of SEQ ID NO: 1245352
cccucccaccagugagaua

SEQ ID NO: 1555969 - RNA, 19 nt, Artificial Sequence
  Description of Artificial Sequence: Synthetic oligonucleotide
  Antisense strand to SEQ ID NO: 1555968
uaucucacuggugggaggg

SEQ ID NO: 1555970 - RNA, 19 nt, Artificial Sequence
  Description of Artificial Sequence: Synthetic oligonucleotide
  Sense strand starting at position 638 of SEQ ID NO: 1245352
gcugguugaauguaauaca

SEQ ID NO: 1555971 - RNA, 19 nt, Artificial Sequence
  Description of Artificial Sequence: Synthetic oligonucleotide
  Antisense strand to SEQ ID NO: 1555970
uguauuacauucaaccagc

SEQ ID NO: 1555972 - RNA, 19 nt, Artificial Sequence
  Description of Artificial Sequence: Synthetic oligonucleotide
  Sense strand starting at position 771 of SEQ ID NO: 1245352
agagauuuguuuggauuua

SEQ ID NO: 1555973 - RNA, 19 nt, Artificial Sequence
  Description of Artificial Sequence: Synthetic oligonucleotide
  Antisense strand to SEQ ID NO: 1555972
uaaauccaaacaaaucucu

SEQ ID NO: 1555974 - RNA, 19 nt, Artificial Sequence
  Description of Artificial Sequence: Synthetic oligonucleotide
  Sense strand starting at position 827 of SEQ ID NO: 1245352
ucauucuguggugaaaugu

SEQ ID NO: 1555975 - RNA, 19 nt, Artificial Sequence
  Description of Artificial Sequence: Synthetic oligonucleotide
  Antisense strand to SEQ ID NO: 1555974
acauuucaccacagaauga

SEQ ID NO: 1555976 - RNA, 19 nt, Artificial Sequence
  Description of Artificial Sequence: Synthetic oligonucleotide
  Sense strand starting at position 903 of SEQ ID NO: 1245352
gccgcuucugaacaaacaa

SEQ ID NO: 1555977 - RNA, 19 nt, Artificial Sequence
  Description of Artificial Sequence: Synthetic oligonucleotide
  Antisense strand to SEQ ID NO: 1555976
uuguuuguucagaagcggc

SEQ ID NO: 1555978 - RNA, 19 nt, Artificial Sequence
  Description of Artificial Sequence: Synthetic oligonucleotide
  Sense strand starting at position 973 of SEQ ID NO: 1245352
aucccauuauaugugauau

SEQ ID NO: 1555979 - RNA, 19 nt, Artificial Sequence
  Description of Artificial Sequence: Synthetic oligonucleotide
  Antisense strand to SEQ ID NO: 1555978
auaucacauauaaugggau

SEQ ID NO: 1555980 - RNA, 19 nt, Artificial Sequence
  Description of Artificial Sequence: Synthetic oligonucleotide
  Sense strand starting at position 1307 of SEQ ID NO: 1245352
aguaaaccguuucugagaa

SEQ ID NO: 1555981 - RNA, 19 nt, Artificial Sequence
  Description of Artificial Sequence: Synthetic oligonucleotide
  Antisense strand to SEQ ID NO: 1555980
uucucagaaacgguuuacu

SEQ ID NO: 1555982 - RNA, 19 nt, Artificial Sequence
  Description of Artificial Sequence: Synthetic oligonucleotide
  Sense strand starting at position 1386 of SEQ ID NO: 1245352
gugguuguaaccgaaugau

SEQ ID NO: 1555983 - RNA, 19 nt, Artificial Sequence
  Description of Artificial Sequence: Synthetic oligonucleotide
  Antisense strand to SEQ ID NO: 1555982
aucauucgguuacaaccac

SEQ ID NO: 1555984 - RNA, 19 nt, Artificial Sequence
  Description of Artificial Sequence: Synthetic oligonucleotide
  Sense strand starting at position 1389 of SEQ ID NO: 1245352
guuguaaccgaaugauaaa

SEQ ID NO: 1555985 - RNA, 19 nt, Artificial Sequence
  Description of Artificial Sequence: Synthetic oligonucleotide
  Antisense strand to SEQ ID NO: 1555984
uuuaucauucgguuacaac

SEQ ID NO: 1555986 - RNA, 19 nt, Artificial Sequence
  Description of Artificial Sequence: Synthetic oligonucleotide
  Sense strand starting at position 1556 of SEQ ID NO: 1245352
ccaggaacauucguaauga

SEQ ID NO: 1555987 - RNA, 19 nt, Artificial Sequence
  Description of Artificial Sequence: Synthetic oligonucleotide
  Antisense strand to SEQ ID NO: 1555986
ucauuacgaauguuccugg

SEQ ID NO: 1555988 - RNA, 19 nt, Artificial Sequence
  Description of Artificial Sequence: Synthetic oligonucleotide
  Sense strand starting at position 1607 of SEQ ID NO: 1245352
agcagaugaaggugguaaa

SEQ ID NO: 1555989 - RNA, 19 nt, Artificial Sequence
  Description of Artificial Sequence: Synthetic oligonucleotide
  Antisense strand to SEQ ID NO: 1555988
uuuaccaccuucaucugcu

SEQ ID NO: 1555990 - RNA, 19 nt, Artificial Sequence
  Description of Artificial Sequence: Synthetic oligonucleotide
  Sense strand starting at position 1660 of SEQ ID NO: 1245352
uggugaaugccagggaaga

SEQ ID NO: 1555991 - RNA, 19 nt, Artificial Sequence
  Description of Artificial Sequence: Synthetic oligonucleotide
  Antisense strand to SEQ ID NO: 1555990
ucuucccuggcauucacca

SEQ ID NO: 1555992 - RNA, 19 nt, Artificial Sequence
  Description of Artificial Sequence: Synthetic oligonucleotide
  Sense strand starting at position 2200 of SEQ ID NO: 1245352
cugugaccuccugggaaua

SEQ ID NO: 1555993 - RNA, 19 nt, Artificial Sequence
  Description of Artificial Sequence: Synthetic oligonucleotide
  Antisense strand to SEQ ID NO: 1555992
uauucccaggaggucacag

SEQ ID NO: 1555994 - RNA, 19 nt, Artificial Sequence
  Description of Artificial Sequence: Synthetic oligonucleotide
  Sense strand starting at position 2222 of SEQ ID NO: 1245352
gaggucuccuucccugaau

SEQ ID NO: 1555995 - RNA, 19 nt, Artificial Sequence
  Description of Artificial Sequence: Synthetic oligonucleotide
  Antisense strand to SEQ ID NO: 1555994
auucagggaaggagaccuc

SEQ ID NO: 1555996 - RNA, 19 nt, Artificial Sequence
  Description of Artificial Sequence: Synthetic oligonucleotide
  Sense strand starting at position 2421 of SEQ ID NO: 1245352
cuuugauagcaguaaagca

SEQ ID NO: 1555997 - RNA, 19 nt, Artificial Sequence
  Description of Artificial Sequence: Synthetic oligonucleotide
  Antisense strand to SEQ ID NO: 1555996
ugcuuuacugcuaucaaag

SEQ ID NO: 1555998 - RNA, 19 nt, Artificial Sequence
  Description of Artificial Sequence: Synthetic oligonucleotide
  Sense strand starting at position 2461 of SEQ ID NO: 1245352
aaagguugaagguguuuaa

SEQ ID NO: 1555999 - RNA, 19 nt, Artificial Sequence
  Description of Artificial Sequence: Synthetic oligonucleotide
  Antisense strand to SEQ ID NO: 1555998
uuaaacaccuucaaccuuu

SEQ ID NO: 1556000 - RNA, 19 nt, Artificial Sequence
  Description of Artificial Sequence: Synthetic oligonucleotide
  Sense strand starting at position 2464 of SEQ ID NO: 1245352
gguugaagguguuuaagac

SEQ ID NO: 1556001 - RNA, 19 nt, Artificial Sequence
  Description of Artificial Sequence: Synthetic oligonucleotide
  Antisense strand to SEQ ID NO: 1556000
gucuuaaacaccuucaacc

SEQ ID NO: 1556002 - RNA, 19 nt, Artificial Sequence
  Description of Artificial Sequence: Synthetic oligonucleotide
  Sense strand starting at position 2479 of SEQ ID NO: 1245352
agacguggcaaguaaacuu

SEQ ID NO: 1556003 - RNA, 19 nt, Artificial Sequence
  Description of Artificial Sequence: Synthetic oligonucleotide
  Antisense strand to SEQ ID NO: 1556002
aaguuuacuugccacgucu

SEQ ID NO: 1556004 - RNA, 19 nt, Artificial Sequence
  Description of Artificial Sequence: Synthetic oligonucleotide
  Sense strand starting at position 2490 of SEQ ID NO: 1245352
guaaacuugccauagaaau

SEQ ID NO: 1556005 - RNA, 19 nt, Artificial Sequence
  Description of Artificial Sequence: Synthetic oligonucleotide
  Antisense strand to SEQ ID NO: 1556004
auuucuauggcaaguuuac

SEQ ID NO: 1556006 - RNA, 19 nt, Artificial Sequence
  Description of Artificial Sequence: Synthetic oligonucleotide
  Sense strand starting at position 2684 of SEQ ID NO: 1245352
aacugaguuuaccugaugu

SEQ ID NO: 1556007 - RNA, 19 nt, Artificial Sequence
  Description of Artificial Sequence: Synthetic oligonucleotide
  Antisense strand to SEQ ID NO: 1556006
acaucagguaaacucaguu

SEQ ID NO: 1556008 - RNA, 19 nt, Artificial Sequence
  Description of Artificial Sequence: Synthetic oligonucleotide
  Sense strand starting at position 2686 of SEQ ID NO: 1245352
cugaguuuaccugauguaa

SEQ ID NO: 1556009 - RNA, 19 nt, Artificial Sequence
  Description of Artificial Sequence: Synthetic oligonucleotide
  Antisense strand to SEQ ID NO: 1556008
uuacaucagguaaacucag

SEQ ID NO: 1556010 - RNA, 19 nt, Artificial Sequence
  Description of Artificial Sequence: Synthetic oligonucleotide
  Sense strand starting at position 2740 of SEQ ID NO: 1245352
guaggauuaucaccuccaa

SEQ ID NO: 1556011 - RNA, 19 nt, Artificial Sequence
  Description of Artificial Sequence: Synthetic oligonucleotide
  Antisense strand to SEQ ID NO: 1556010
uuggaggugauaauccuac

SEQ ID NO: 1556012 - RNA, 19 nt, Artificial Sequence
  Description of Artificial Sequence: Synthetic oligonucleotide
  Sense strand starting at position 2755 of SEQ ID NO: 1245352
ccaauuaagggucaguguu

SEQ ID NO: 1556013 - RNA, 19 nt, Artificial Sequence
  Description of Artificial Sequence: Synthetic oligonucleotide
  Antisense strand to SEQ ID NO: 1556012
aacacugacccuuaauugg

SEQ ID NO: 1556014 - RNA, 19 nt, Artificial Sequence
  Description of Artificial Sequence: Synthetic oligonucleotide
  Sense strand starting at position 2769 of SEQ ID NO: 1245352
guguuagucuauuuaaacu

SEQ ID NO: 1556015 - RNA, 19 nt, Artificial Sequence
  Description of Artificial Sequence: Synthetic oligonucleotide
  Antisense strand to SEQ ID NO: 1556014
aguuuaaauagacuaacac

SEQ ID NO: 1556016 - RNA, 19 nt, Artificial Sequence
  Description of Artificial Sequence: Synthetic oligonucleotide
  Sense strand starting at position 2834 of SEQ ID NO: 1245352
ggaggaauaucagucgaau

SEQ ID NO: 1556017 - RNA, 19 nt, Artificial Sequence
  Description of Artificial Sequence: Synthetic oligonucleotide
  Antisense strand to SEQ ID NO: 1556016
auucgacugauauuccucc

SEQ ID NO: 1556018 - RNA, 19 nt, Artificial Sequence
  Description of Artificial Sequence: Synthetic oligonucleotide
  Sense strand starting at position 2836 of SEQ ID NO: 1245352
aggaauaucagucgaauau

SEQ ID NO: 1556019 - RNA, 19 nt, Artificial Sequence
  Description of Artificial Sequence: Synthetic oligonucleotide
  Antisense strand to SEQ ID NO: 1556018
auauucgacugauauuccu

SEQ ID NO: 1556020 - RNA, 19 nt, Artificial Sequence
  Description of Artificial Sequence: Synthetic oligonucleotide
  Sense strand starting at position 2930 of SEQ ID NO: 1245352
uccagaauucuuuguuaga

SEQ ID NO: 1556021 - RNA, 19 nt, Artificial Sequence
  Description of Artificial Sequence: Synthetic oligonucleotide
  Antisense strand to SEQ ID NO: 1556020
ucuaacaaagaauucugga

SEQ ID NO: 1556022 - RNA, 19 nt, Artificial Sequence
  Description of Artificial Sequence: Synthetic oligonucleotide
  Sense strand starting at position 2931 of SEQ ID NO: 1245352
ccagaauucuuuguuagaa

SEQ ID NO: 1556023 - RNA, 19 nt, Artificial Sequence
  Description of Artificial Sequence: Synthetic oligonucleotide
  Antisense strand to SEQ ID NO: 1556022
uucuaacaaagaauucugg

SEQ ID NO: 1556024 - RNA, 19 nt, Artificial Sequence
  Description of Artificial Sequence: Synthetic oligonucleotide
  Sense strand starting at position 3354 of SEQ ID NO: 1245352
cuuucuacgguguaaacau

SEQ ID NO: 1556025 - RNA, 19 nt, Artificial Sequence
  Description of Artificial Sequence: Synthetic oligonucleotide
  Antisense strand to SEQ ID NO: 1556024
auguuuacaccguagaaag

SEQ ID NO: 1556026 - RNA, 19 nt, Artificial Sequence
  Description of Artificial Sequence: Synthetic oligonucleotide
  Sense strand starting at position 3683 of SEQ ID NO: 1245352
auaggaauucgaugugaga

SEQ ID NO: 1556027 - RNA, 19 nt, Artificial Sequence
  Description of Artificial Sequence: Synthetic oligonucleotide
  Antisense strand to SEQ ID NO: 1556026
ucucacaucgaauuccuau

SEQ ID NO: 1556028 - RNA, 19 nt, Artificial Sequence
  Description of Artificial Sequence: Synthetic oligonucleotide
  Sense strand starting at position 3685 of SEQ ID NO: 1245352
aggaauucgaugugagagu

SEQ ID NO: 1556029 - RNA, 19 nt, Artificial Sequence
  Description of Artificial Sequence: Synthetic oligonucleotide
  Antisense strand to SEQ ID NO: 1556028
acucucacaucgaauuccu

SEQ ID NO: 1556030 - RNA, 19 nt, Artificial Sequence
  Description of Artificial Sequence: Synthetic oligonucleotide
  Sense strand starting at position 3754 of SEQ ID NO: 1245352
gaaugcaguuugucagaag

SEQ ID NO: 1556031 - RNA, 19 nt, Artificial Sequence
  Description of Artificial Sequence: Synthetic oligonucleotide
  Antisense strand to SEQ ID NO: 1556030
cuucugacaaacugcauuc

SEQ ID NO: 1556032 - RNA, 19 nt, Artificial Sequence
  Description of Artificial Sequence: Synthetic oligonucleotide
  Sense strand starting at position 3949 of SEQ ID NO: 1245352
uuacgauugcaugagacaa

SEQ ID NO: 1556033 - RNA, 19 nt, Artificial Sequence
  Description of Artificial Sequence: Synthetic oligonucleotide
  Antisense strand to SEQ ID NO: 1556032
uugucucaugcaaucguaa

SEQ ID NO: 1556034 - RNA, 19 nt, Artificial Sequence
  Description of Artificial Sequence: Synthetic oligonucleotide
  Sense strand starting at position 123 of SEQ ID NO: 1245353
uccagaacacuucguggaa

SEQ ID NO: 1556035 - RNA, 19 nt, Artificial Sequence
  Description of Artificial Sequence: Synthetic oligonucleotide
  Antisense strand to SEQ ID NO: 1556034
uuccacgaaguguucugga

SEQ ID NO: 1556036 - RNA, 19 nt, Artificial Sequence
  Description of Artificial Sequence: Synthetic oligonucleotide
  Sense strand starting at position 124 of SEQ ID NO: 1245353
ccagaacacuucguggaaa

SEQ ID NO: 1556037 - RNA, 19 nt, Artificial Sequence
  Description of Artificial Sequence: Synthetic oligonucleotide
  Antisense strand to SEQ ID NO: 1556036
uuuccacgaaguguucugg

SEQ ID NO: 1556038 - RNA, 19 nt, Artificial Sequence
  Description of Artificial Sequence: Synthetic oligonucleotide
  Sense strand starting at position 126 of SEQ ID NO: 1245353
agaacacuucguggaaaca

SEQ ID NO: 1556039 - RNA, 19 nt, Artificial Sequence
  Description of Artificial Sequence: Synthetic oligonucleotide
  Antisense strand to SEQ ID NO: 1556038
uguuuccacgaaguguucu

SEQ ID NO: 1556040 - RNA, 19 nt, Artificial Sequence
  Description of Artificial Sequence: Synthetic oligonucleotide
  Sense strand starting at position 613 of SEQ ID NO: 1245353
gggugucggcggagacaau

SEQ ID NO: 1556041 - RNA, 19 nt, Artificial Sequence
  Description of Artificial Sequence: Synthetic oligonucleotide
  Antisense strand to SEQ ID NO: 1556040
auugucuccgccgacaccc

SEQ ID NO: 1556042 - RNA, 19 nt, Artificial Sequence
  Description of Artificial Sequence: Synthetic oligonucleotide
  Sense strand starting at position 659 of SEQ ID NO: 1245353
cugagcguguuucuugaca

SEQ ID NO: 1556043 - RNA, 19 nt, Artificial Sequence
  Description of Artificial Sequence: Synthetic oligonucleotide
  Antisense strand to SEQ ID NO: 1556042
ugucaagaaacacgcucag

SEQ ID NO: 1556044 - RNA, 19 nt, Artificial Sequence
  Description of Artificial Sequence: Synthetic oligonucleotide
  Sense strand starting at position 717 of SEQ ID NO: 1245353
ccucguguugugucuagca

SEQ ID NO: 1556045 - RNA, 19 nt, Artificial Sequence
  Description of Artificial Sequence: Synthetic oligonucleotide
  Antisense strand to SEQ ID NO: 1556044
ugcuagacacaacacgagg

SEQ ID NO: 1556046 - RNA, 19 nt, Artificial Sequence
  Description of Artificial Sequence: Synthetic oligonucleotide
  Sense strand starting at position 1228 of SEQ ID NO: 1245353
cggcgcugucagagugaga

SEQ ID NO: 1556047 - RNA, 19 nt, Artificial Sequence
  Description of Artificial Sequence: Synthetic oligonucleotide
  Antisense strand to SEQ ID NO: 1556046
ucucacucugacagcgccg

SEQ ID NO: 1556048 - RNA, 19 nt, Artificial Sequence
  Description of Artificial Sequence: Synthetic oligonucleotide
  Sense strand starting at position 1230 of SEQ ID NO: 1245353
gcgcugucagagugagaga

SEQ ID NO: 1556049 - RNA, 19 nt, Artificial Sequence
  Description of Artificial Sequence: Synthetic oligonucleotide
  Antisense strand to SEQ ID NO: 1556048
ucucucacucugacagcgc

SEQ ID NO: 1556050 - RNA, 19 nt, Artificial Sequence
  Description of Artificial Sequence: Synthetic oligonucleotide
  Sense strand starting at position 1989 of SEQ ID NO: 1245353
acgcucacaugcucuuuaa

SEQ ID NO: 1556051 - RNA, 19 nt, Artificial Sequence
  Description of Artificial Sequence: Synthetic oligonucleotide
  Antisense strand to SEQ ID NO: 1556050
uuaaagagcaugugagcgu

SEQ ID NO: 1556052 - RNA, 19 nt, Artificial Sequence
  Description of Artificial Sequence: Synthetic oligonucleotide
  Sense strand starting at position 1993 of SEQ ID NO: 1245353
ucacaugcucuuuaaacgu

SEQ ID NO: 1556053 - RNA, 19 nt, Artificial Sequence
  Description of Artificial Sequence: Synthetic oligonucleotide
  Antisense strand to SEQ ID NO: 1556052
acguuuaaagagcauguga

SEQ ID NO: 1556054 - RNA, 19 nt, Artificial Sequence
  Description of Artificial Sequence: Synthetic oligonucleotide
  Sense strand starting at position 2133 of SEQ ID NO: 1245353
gucuguuucggucaacagu

SEQ ID NO: 1556055 - RNA, 19 nt, Artificial Sequence
  Description of Artificial Sequence: Synthetic oligonucleotide
  Antisense strand to SEQ ID NO: 1556054
acuguugaccgaaacagac

SEQ ID NO: 1556056 - RNA, 19 nt, Artificial Sequence
  Description of Artificial Sequence: Synthetic oligonucleotide
  Sense strand starting at position 2149 of SEQ ID NO: 1245353
agugucuacucuucggauu

SEQ ID NO: 1556057 - RNA, 19 nt, Artificial Sequence
  Description of Artificial Sequence: Synthetic oligonucleotide
  Antisense strand to SEQ ID NO: 1556056
aauccgaagaguagacacu

SEQ ID NO: 1556058 - RNA, 19 nt, Artificial Sequence
  Description of Artificial Sequence: Synthetic oligonucleotide
  Sense strand starting at position 2313 of SEQ ID NO: 1245353
ugcuguuuggcugacuuga

SEQ ID NO: 1556059 - RNA, 19 nt, Artificial Sequence
  Description of Artificial Sequence: Synthetic oligonucleotide
  Antisense strand to SEQ ID NO: 1556058
ucaagucagccaaacagca

SEQ ID NO: 1556060 - RNA, 19 nt, Artificial Sequence
  Description of Artificial Sequence: Synthetic oligonucleotide
  Sense strand starting at position 2370 of SEQ ID NO: 1245353
ugguuacguccuguuguuu

SEQ ID NO: 1556061 - RNA, 19 nt, Artificial Sequence
  Description of Artificial Sequence: Synthetic oligonucleotide
  Antisense strand to SEQ ID NO: 1556060
aaacaacaggacguaacca

SEQ ID NO: 1556062 - RNA, 19 nt, Artificial Sequence
  Description of Artificial Sequence: Synthetic oligonucleotide
  Sense strand starting at position 2466 of SEQ ID NO: 1245353
cguaaauaagccuagcaga

SEQ ID NO: 1556063 - RNA, 19 nt, Artificial Sequence
  Description of Artificial Sequence: Synthetic oligonucleotide
  Antisense strand to SEQ ID NO: 1556062
ucugcuaggcuuauuuacg

SEQ ID NO: 1556064 - RNA, 19 nt, Artificial Sequence
  Description of Artificial Sequence: Synthetic oligonucleotide
  Sense strand starting at position 2532 of SEQ ID NO: 1245353
ucgguaaccucgguggaga

SEQ ID NO: 1556065 - RNA, 19 nt, Artificial Sequence
  Description of Artificial Sequence: Synthetic oligonucleotide
  Antisense strand to SEQ ID NO: 1556064
ucuccaccgagguuaccga

SEQ ID NO: 1556066 - RNA, 19 nt, Artificial Sequence
  Description of Artificial Sequence: Synthetic oligonucleotide
  Sense strand starting at position 2533 of SEQ ID NO: 1245353
cgguaaccucgguggagau

SEQ ID NO: 1556067 - RNA, 19 nt, Artificial Sequence
  Description of Artificial Sequence: Synthetic oligonucleotide
  Antisense strand to SEQ ID NO: 1556066
aucuccaccgagguuaccg

SEQ ID NO: 1556068 - RNA, 19 nt, Artificial Sequence
  Description of Artificial Sequence: Synthetic oligonucleotide
  Sense strand starting at position 2543 of SEQ ID NO: 1245353
gguggagaucccggcagaa

SEQ ID NO: 1556069 - RNA, 19 nt, Artificial Sequence
  Description of Artificial Sequence: Synthetic oligonucleotide
  Antisense strand to SEQ ID NO: 1556068
uucugccgggaucuccacc

SEQ ID NO: 1556070 - RNA, 19 nt, Artificial Sequence
  Description of Artificial Sequence: Synthetic oligonucleotide
  Sense strand starting at position 2580 of SEQ ID NO: 1245353
gauuaaacccgaggaguac

SEQ ID NO: 1556071 - RNA, 19 nt, Artificial Sequence
  Description of Artificial Sequence: Synthetic oligonucleotide
  Antisense strand to SEQ ID NO: 1556070
guacuccucggguuuaauc

SEQ ID NO: 1556072 - RNA, 19 nt, Artificial Sequence
  Description of Artificial Sequence: Synthetic oligonucleotide
  Sense strand starting at position 2610 of SEQ ID NO: 1245353
agggauaacuaacucgacu

SEQ ID NO: 1556073 - RNA, 19 nt, Artificial Sequence
  Description of Artificial Sequence: Synthetic oligonucleotide
  Antisense strand to SEQ ID NO: 1556072
agucgaguuaguuaucccu

SEQ ID NO: 1556074 - RNA, 19 nt, Artificial Sequence
  Description of Artificial Sequence: Synthetic oligonucleotide
  Sense strand starting at position 2717 of SEQ ID NO: 1245353
gcguggaggccagaguuua

SEQ ID NO: 1556075 - RNA, 19 nt, Artificial Sequence
  Description of Artificial Sequence: Synthetic oligonucleotide
  Antisense strand to SEQ ID NO: 1556074
uaaacucuggccuccacgc

SEQ ID NO: 1556076 - RNA, 19 nt, Artificial Sequence
  Description of Artificial Sequence: Synthetic oligonucleotide
  Sense strand starting at position 2844 of SEQ ID NO: 1245353
cugacugcucgggacagaa

SEQ ID NO: 1556077 - RNA, 19 nt, Artificial Sequence
  Description of Artificial Sequence: Synthetic oligonucleotide
  Antisense strand to SEQ ID NO: 1556076
uucugucccgagcagucag

SEQ ID NO: 1556078 - RNA, 19 nt, Artificial Sequence
  Description of Artificial Sequence: Synthetic oligonucleotide
  Sense strand starting at position 3060 of SEQ ID NO: 1245353
ccucgcuauuucguuugaa

SEQ ID NO: 1556079 - RNA, 19 nt, Artificial Sequence
  Description of Artificial Sequence: Synthetic oligonucleotide
  Antisense strand to SEQ ID NO: 1556078
uucaaacgaaauagcgagg

SEQ ID NO: 1556080 - RNA, 19 nt, Artificial Sequence
  Description of Artificial Sequence: Synthetic oligonucleotide
  Sense strand starting at position 3061 of SEQ ID NO: 1245353
cucgcuauuucguuugaag

SEQ ID NO: 1556081 - RNA, 19 nt, Artificial Sequence
  Description of Artificial Sequence: Synthetic oligonucleotide
  Antisense strand to SEQ ID NO: 1556080
cuucaaacgaaauagcgag

SEQ ID NO: 1556082 - RNA, 19 nt, Artificial Sequence
  Description of Artificial Sequence: Synthetic oligonucleotide
  Sense strand starting at position 3081 of SEQ ID NO: 1245353
guugucuguggcugggauu

SEQ ID NO: 1556083 - RNA, 19 nt, Artificial Sequence
  Description of Artificial Sequence: Synthetic oligonucleotide
  Antisense strand to SEQ ID NO: 1556082
aaucccagccacagacaac

SEQ ID NO: 1556084 - RNA, 19 nt, Artificial Sequence
  Description of Artificial Sequence: Synthetic oligonucleotide
  Sense strand starting at position 3093 of SEQ ID NO: 1245353
ugggauugguggcuccuau

SEQ ID NO: 1556085 - RNA, 19 nt, Artificial Sequence
  Description of Artificial Sequence: Synthetic oligonucleotide
  Antisense strand to SEQ ID NO: 1556084
auaggagccaccaauccca

SEQ ID NO: 1556086 - RNA, 19 nt, Artificial Sequence
  Description of Artificial Sequence: Synthetic oligonucleotide
  Sense strand starting at position 3199 of SEQ ID NO: 1245353
gcaggagccucgucuggaa

SEQ ID NO: 1556087 - RNA, 19 nt, Artificial Sequence
  Description of Artificial Sequence: Synthetic oligonucleotide
  Antisense strand to SEQ ID NO: 1556086
uuccagacgaggcuccugc

SEQ ID NO: 1556088 - RNA, 19 nt, Artificial Sequence
  Description of Artificial Sequence: Synthetic oligonucleotide
  Sense strand starting at position 3233 of SEQ ID NO: 1245353
ggagacgcuuuguuugcua

SEQ ID NO: 1556089 - RNA, 19 nt, Artificial Sequence
  Description of Artificial Sequence: Synthetic oligonucleotide
  Antisense strand to SEQ ID NO: 1556088
uagcaaacaaagcgucucc

SEQ ID NO: 1556090 - RNA, 19 nt, Artificial Sequence
  Description of Artificial Sequence: Synthetic oligonucleotide
  Sense strand starting at position 3241 of SEQ ID NO: 1245353
uuuguuugcuaacuucgaa

SEQ ID NO: 1556091 - RNA, 19 nt, Artificial Sequence
  Description of Artificial Sequence: Synthetic oligonucleotide
  Antisense strand to SEQ ID NO: 1556090
uucgaaguuagcaaacaaa

SEQ ID NO: 1556092 - RNA, 19 nt, Artificial Sequence
  Description of Artificial Sequence: Synthetic oligonucleotide
  Sense strand starting at position 3344 of SEQ ID NO: 1245353
cgcuuuagccagcucgaga

SEQ ID NO: 1556093 - RNA, 19 nt, Artificial Sequence
  Description of Artificial Sequence: Synthetic oligonucleotide
  Antisense strand to SEQ ID NO: 1556092
ucucgagcuggcuaaagcg

SEQ ID NO: 1556094 - RNA, 19 nt, Artificial Sequence
  Description of Artificial Sequence: Synthetic oligonucleotide
  Sense strand starting at position 3408 of SEQ ID NO: 1245353
ggcucucauuauguacaca

SEQ ID NO: 1556095 - RNA, 19 nt, Artificial Sequence
  Description of Artificial Sequence: Synthetic oligonucleotide
  Antisense strand to SEQ ID NO: 1556094
uguguacauaaugagagcc

SEQ ID NO: 1556096 - RNA, 19 nt, Artificial Sequence
  Description of Artificial Sequence: Synthetic oligonucleotide
  Sense strand starting at position 3446 of SEQ ID NO: 1245353
ccaaguggacuuggcuaau

SEQ ID NO: 1556097 - RNA, 19 nt, Artificial Sequence
  Description of Artificial Sequence: Synthetic oligonucleotide
  Antisense strand to SEQ ID NO: 1556096
auuagccaaguccacuugg

SEQ ID NO: 1556098 - RNA, 19 nt, Artificial Sequence
  Description of Artificial Sequence: Synthetic oligonucleotide
  Sense strand starting at position 3456 of SEQ ID NO: 1245353
uuggcuaaugacugcgauu

SEQ ID NO: 1556099 - RNA, 19 nt, Artificial Sequence
  Description of Artificial Sequence: Synthetic oligonucleotide
  Antisense strand to SEQ ID NO: 1556098
aaucgcagucauuagccaa

SEQ ID NO: 1556100 - RNA, 19 nt, Artificial Sequence
  Description of Artificial Sequence: Synthetic oligonucleotide
  Sense strand starting at position 3458 of SEQ ID NO: 1245353
ggcuaaugacugcgauucu

SEQ ID NO: 1556101 - RNA, 19 nt, Artificial Sequence
  Description of Artificial Sequence: Synthetic oligonucleotide
  Antisense strand to SEQ ID NO: 1556100
agaaucgcagucauuagcc

SEQ ID NO: 1556102 - RNA, 19 nt, Artificial Sequence
  Description of Artificial Sequence: Synthetic oligonucleotide
  Sense strand starting at position 3508 of SEQ ID NO: 1245353
aaggguuuauagcuugaaa

SEQ ID NO: 1556103 - RNA, 19 nt, Artificial Sequence
  Description of Artificial Sequence: Synthetic oligonucleotide
  Antisense strand to SEQ ID NO: 1556102
uuucaagcuauaaacccuu

SEQ ID NO: 1556104 - RNA, 19 nt, Artificial Sequence
  Description of Artificial Sequence: Synthetic oligonucleotide
  Sense strand starting at position 3565 of SEQ ID NO: 1245353
uugaaagccucuuucgaau

SEQ ID NO: 1556105 - RNA, 19 nt, Artificial Sequence
  Description of Artificial Sequence: Synthetic oligonucleotide
  Antisense strand to SEQ ID NO: 1556104
auucgaaagaggcuuucaa

SEQ ID NO: 1556106 - RNA, 19 nt, Artificial Sequence
  Description of Artificial Sequence: Synthetic oligonucleotide
  Sense strand starting at position 3613 of SEQ ID NO: 1245353
ucaccuuggcuagaaguca

SEQ ID NO: 1556107 - RNA, 19 nt, Artificial Sequence
  Description of Artificial Sequence: Synthetic oligonucleotide
  Antisense strand to SEQ ID NO: 1556106
ugacuucuagccaagguga

SEQ ID NO: 1556108 - RNA, 19 nt, Artificial Sequence
  Description of Artificial Sequence: Synthetic oligonucleotide
  Sense strand starting at position 3826 of SEQ ID NO: 1245353
uucggauucuuggugcauu

SEQ ID NO: 1556109 - RNA, 19 nt, Artificial Sequence
  Description of Artificial Sequence: Synthetic oligonucleotide
  Antisense strand to SEQ ID NO: 1556108
aaugcaccaagaauccgaa

SEQ ID NO: 1556110 - RNA, 19 nt, Artificial Sequence
  Description of Artificial Sequence: Synthetic oligonucleotide
  Sense strand starting at position 3836 of SEQ ID NO: 1245353
uggugcauucugggaagaa

SEQ ID NO: 1556111 - RNA, 19 nt, Artificial Sequence
  Description of Artificial Sequence: Synthetic oligonucleotide
  Antisense strand to SEQ ID NO: 1556110
uucuucccagaaugcacca

SEQ ID NO: 1556112 - RNA, 19 nt, Artificial Sequence
  Description of Artificial Sequence: Synthetic oligonucleotide
  Sense strand starting at position 3916 of SEQ ID NO: 1245353
ccagcaauugcuuagggua

SEQ ID NO: 1556113 - RNA, 19 nt, Artificial Sequence
  Description of Artificial Sequence: Synthetic oligonucleotide
  Antisense strand to SEQ ID NO: 1556112
uacccuaagcaauugcugg

SEQ ID NO: 1556114 - RNA, 19 nt, Artificial Sequence
  Description of Artificial Sequence: Synthetic oligonucleotide
  Sense strand starting at position 361 of SEQ ID NO: 1245354
uccagaacacuucguggaa

SEQ ID NO: 1556115 - RNA, 19 nt, Artificial Sequence
  Description of Artificial Sequence: Synthetic oligonucleotide
  Antisense strand to SEQ ID NO: 1556114
uuccacgaaguguucugga

SEQ ID NO: 1556116 - RNA, 19 nt, Artificial Sequence
  Description of Artificial Sequence: Synthetic oligonucleotide
  Sense strand starting at position 362 of SEQ ID NO: 1245354
ccagaacacuucguggaaa

SEQ ID NO: 1556117 - RNA, 19 nt, Artificial Sequence
  Description of Artificial Sequence: Synthetic oligonucleotide
  Antisense strand to SEQ ID NO: 1556116
uuuccacgaaguguucugg

SEQ ID NO: 1556118 - RNA, 19 nt, Artificial Sequence
  Description of Artificial Sequence: Synthetic oligonucleotide
  Sense strand starting at position 364 of SEQ ID NO: 1245354
agaacacuucguggaaaca

SEQ ID NO: 1556119 - RNA, 19 nt, Artificial Sequence
  Description of Artificial Sequence: Synthetic oligonucleotide
  Antisense strand to SEQ ID NO: 1556118
uguuuccacgaaguguucu

SEQ ID NO: 1556120 - RNA, 19 nt, Artificial Sequence
  Description of Artificial Sequence: Synthetic oligonucleotide
  Sense strand starting at position 851 of SEQ ID NO: 1245354
gggugucggcggagacaau

SEQ ID NO: 1556121 - RNA, 19 nt, Artificial Sequence
  Description of Artificial Sequence: Synthetic oligonucleotide
  Antisense strand to SEQ ID NO: 1556120
auugucuccgccgacaccc

SEQ ID NO: 1556122 - RNA, 19 nt, Artificial Sequence
  Description of Artificial Sequence: Synthetic oligonucleotide
  Sense strand starting at position 897 of SEQ ID NO: 1245354
cugagcguguuucuugaca

SEQ ID NO: 1556123 - RNA, 19 nt, Artificial Sequence
  Description of Artificial Sequence: Synthetic oligonucleotide
  Antisense strand to SEQ ID NO: 1556122
ugucaagaaacacgcucag

SEQ ID NO: 1556124 - RNA, 19 nt, Artificial Sequence
  Description of Artificial Sequence: Synthetic oligonucleotide
  Sense strand starting at position 955 of SEQ ID NO: 1245354
ccucguguugugucuagca

SEQ ID NO: 1556125 - RNA, 19 nt, Artificial Sequence
  Description of Artificial Sequence: Synthetic oligonucleotide
  Antisense strand to SEQ ID NO: 1556124
ugcuagacacaacacgagg

SEQ ID NO: 1556126 - RNA, 19 nt, Artificial Sequence
  Description of Artificial Sequence: Synthetic oligonucleotide
  Sense strand starting at position 1466 of SEQ ID NO: 1245354
cggcgcugucagagugaga

SEQ ID NO: 1556127 - RNA, 19 nt, Artificial Sequence
  Description of Artificial Sequence: Synthetic oligonucleotide
  Antisense strand to SEQ ID NO: 1556126
ucucacucugacagcgccg

SEQ ID NO: 1556128 - RNA, 19 nt, Artificial Sequence
  Description of Artificial Sequence: Synthetic oligonucleotide
  Sense strand starting at position 1468 of SEQ ID NO: 1245354
gcgcugucagagugagaga

SEQ ID NO: 1556129 - RNA, 19 nt, Artificial Sequence
  Description of Artificial Sequence: Synthetic oligonucleotide
  Antisense strand to SEQ ID NO: 1556128
ucucucacucugacagcgc

SEQ ID NO: 1556130 - RNA, 19 nt, Artificial Sequence
  Description of Artificial Sequence: Synthetic oligonucleotide
  Sense strand starting at position 2227 of SEQ ID NO: 1245354
acgcucacaugcucuuuaa

SEQ ID NO: 1556131 - RNA, 19 nt, Artificial Sequence
  Description of Artificial Sequence: Synthetic oligonucleotide
  Antisense strand to SEQ ID NO: 1556130
uuaaagagcaugugagcgu

SEQ ID NO: 1556132 - RNA, 19 nt, Artificial Sequence
  Description of Artificial Sequence: Synthetic oligonucleotide
  Sense strand starting at position 2231 of SEQ ID NO: 1245354
ucacaugcucuuuaaacgu

SEQ ID NO: 1556133 - RNA, 19 nt, Artificial Sequence
  Description of Artificial Sequence: Synthetic oligonucleotide
  Antisense strand to SEQ ID NO: 1556132
acguuuaaagagcauguga

SEQ ID NO: 1556134 - RNA, 19 nt, Artificial Sequence
  Description of Artificial Sequence: Synthetic oligonucleotide
  Sense strand starting at position 2369 of SEQ ID NO: 1245354
ucgucuguuucggucaaca

SEQ ID NO: 1556135 - RNA, 19 nt, Artificial Sequence
  Description of Artificial Sequence: Synthetic oligonucleotide
  Antisense strand to SEQ ID NO: 1556134
uguugaccgaaacagacga

SEQ ID NO: 1556136 - RNA, 19 nt, Artificial Sequence
  Description of Artificial Sequence: Synthetic oligonucleotide
  Sense strand starting at position 2371 of SEQ ID NO: 1245354
gucuguuucggucaacagu

SEQ ID NO: 1556137 - RNA, 19 nt, Artificial Sequence
  Description of Artificial Sequence: Synthetic oligonucleotide
  Antisense strand to SEQ ID NO: 1556136
acuguugaccgaaacagac

SEQ ID NO: 1556138 - RNA, 19 nt, Artificial Sequence
  Description of Artificial Sequence: Synthetic oligonucleotide
  Sense strand starting at position 2387 of SEQ ID NO: 1245354
agugucuacucuucggauu

SEQ ID NO: 1556139 - RNA, 19 nt, Artificial Sequence
  Description of Artificial Sequence: Synthetic oligonucleotide
  Antisense strand to SEQ ID NO: 1556138
aauccgaagaguagacacu

SEQ ID NO: 1556140 - RNA, 19 nt, Artificial Sequence
  Description of Artificial Sequence: Synthetic oligonucleotide
  Sense strand starting at position 2511 of SEQ ID NO: 1245354
acaggaguuucuugaugaa

SEQ ID NO: 1556141 - RNA, 19 nt, Artificial Sequence
  Description of Artificial Sequence: Synthetic oligonucleotide
  Antisense strand to SEQ ID NO: 1556140
uucaucaagaaacuccugu

SEQ ID NO: 1556142 - RNA, 19 nt, Artificial Sequence
  Description of Artificial Sequence: Synthetic oligonucleotide
  Sense strand starting at position 2551 of SEQ ID NO: 1245354
ugcuguuuggcugacuuga

SEQ ID NO: 1556143 - RNA, 19 nt, Artificial Sequence
  Description of Artificial Sequence: Synthetic oligonucleotide
  Antisense strand to SEQ ID NO: 1556142
ucaagucagccaaacagca

SEQ ID NO: 1556144 - RNA, 19 nt, Artificial Sequence
  Description of Artificial Sequence: Synthetic oligonucleotide
  Sense strand starting at position 2608 of SEQ ID NO: 1245354
ugguuacguccuguuguuu

SEQ ID NO: 1556145 - RNA, 19 nt, Artificial Sequence
  Description of Artificial Sequence: Synthetic oligonucleotide
  Antisense strand to SEQ ID NO: 1556144
aaacaacaggacguaacca

SEQ ID NO: 1556146 - RNA, 19 nt, Artificial Sequence
  Description of Artificial Sequence: Synthetic oligonucleotide
  Sense strand starting at position 2704 of SEQ ID NO: 1245354
cguaaauaagccuagcaga

SEQ ID NO: 1556147 - RNA, 19 nt, Artificial Sequence
  Description of Artificial Sequence: Synthetic oligonucleotide
  Antisense strand to SEQ ID NO: 1556146
ucugcuaggcuuauuuacg

SEQ ID NO: 1556148 - RNA, 19 nt, Artificial Sequence
  Description of Artificial Sequence: Synthetic oligonucleotide
  Sense strand starting at position 2770 of SEQ ID NO: 1245354
ucgguaaccucgguggaga

SEQ ID NO: 1556149 - RNA, 19 nt, Artificial Sequence
  Description of Artificial Sequence: Synthetic oligonucleotide
  Antisense strand to SEQ ID NO: 1556148
ucuccaccgagguuaccga

SEQ ID NO: 1556150 - RNA, 19 nt, Artificial Sequence
  Description of Artificial Sequence: Synthetic oligonucleotide
  Sense strand starting at position 2771 of SEQ ID NO: 1245354
cgguaaccucgguggagau

SEQ ID NO: 1556151 - RNA, 19 nt, Artificial Sequence
  Description of Artificial Sequence: Synthetic oligonucleotide
  Antisense strand to SEQ ID NO: 1556150
aucuccaccgagguuaccg

SEQ ID NO: 1556152 - RNA, 19 nt, Artificial Sequence
  Description of Artificial Sequence: Synthetic oligonucleotide
  Sense strand starting at position 2781 of SEQ ID NO: 1245354
gguggagaucccggcagaa

SEQ ID NO: 1556153 - RNA, 19 nt, Artificial Sequence
  Description of Artificial Sequence: Synthetic oligonucleotide
  Antisense strand to SEQ ID NO: 1556152
uucugccgggaucuccacc

SEQ ID NO: 1556154 - RNA, 19 nt, Artificial Sequence
  Description of Artificial Sequence: Synthetic oligonucleotide
  Sense strand starting at position 2818 of SEQ ID NO: 1245354
gauuaaacccgaggaguac

SEQ ID NO: 1556155 - RNA, 19 nt, Artificial Sequence
  Description of Artificial Sequence: Synthetic oligonucleotide
  Antisense strand to SEQ ID NO: 1556154
guacuccucggguuuaauc

SEQ ID NO: 1556156 - RNA, 19 nt, Artificial Sequence
  Description of Artificial Sequence: Synthetic oligonucleotide
  Sense strand starting at position 2848 of SEQ ID NO: 1245354
agggauaacuaacucgacu

SEQ ID NO: 1556157 - RNA, 19 nt, Artificial Sequence
  Description of Artificial Sequence: Synthetic oligonucleotide
  Antisense strand to SEQ ID NO: 1556156
agucgaguuaguuaucccu

SEQ ID NO: 1556158 - RNA, 19 nt, Artificial Sequence
  Description of Artificial Sequence: Synthetic oligonucleotide
  Sense strand starting at position 2955 of SEQ ID NO: 1245354
gcguggaggccagaguuua

SEQ ID NO: 1556159 - RNA, 19 nt, Artificial Sequence
  Description of Artificial Sequence: Synthetic oligonucleotide
  Antisense strand to SEQ ID NO: 1556158
uaaacucuggccuccacgc

SEQ ID NO: 1556160 - RNA, 19 nt, Artificial Sequence
  Description of Artificial Sequence: Synthetic oligonucleotide
  Sense strand starting at position 3082 of SEQ ID NO: 1245354
cugacugcucgggacagaa

SEQ ID NO: 1556161 - RNA, 19 nt, Artificial Sequence
  Description of Artificial Sequence: Synthetic oligonucleotide
  Antisense strand to SEQ ID NO: 1556160
uucugucccgagcagucag

SEQ ID NO: 1556162 - RNA, 19 nt, Artificial Sequence
  Description of Artificial Sequence: Synthetic oligonucleotide
  Sense strand starting at position 3298 of SEQ ID NO: 1245354
ccucgcuauuucguuugaa

SEQ ID NO: 1556163 - RNA, 19 nt, Artificial Sequence
  Description of Artificial Sequence: Synthetic oligonucleotide
  Antisense strand to SEQ ID NO: 1556162
uucaaacgaaauagcgagg

SEQ ID NO: 1556164 - RNA, 19 nt, Artificial Sequence
  Description of Artificial Sequence: Synthetic oligonucleotide
  Sense strand starting at position 3299 of SEQ ID NO: 1245354
cucgcuauuucguuugaag

SEQ ID NO: 1556165 - RNA, 19 nt, Artificial Sequence
  Description of Artificial Sequence: Synthetic oligonucleotide
  Antisense strand to SEQ ID NO: 1556164
cuucaaacgaaauagcgag

SEQ ID NO: 1556166 - RNA, 19 nt, Artificial Sequence
  Description of Artificial Sequence: Synthetic oligonucleotide
  Sense strand starting at position 3302 of SEQ ID NO: 1245354
gcuauuucguuugaagggu

SEQ ID NO: 1556167 - RNA, 19 nt, Artificial Sequence
  Description of Artificial Sequence: Synthetic oligonucleotide
  Antisense strand to SEQ ID NO: 1556166
acccuucaaacgaaauagc

SEQ ID NO: 1556168 - RNA, 19 nt, Artificial Sequence
  Description of Artificial Sequence: Synthetic oligonucleotide
  Sense strand starting at position 3319 of SEQ ID NO: 1245354
guugucuguggcugggauu

SEQ ID NO: 1556169 - RNA, 19 nt, Artificial Sequence
  Description of Artificial Sequence: Synthetic oligonucleotide
  Antisense strand to SEQ ID NO: 1556168
aaucccagccacagacaac

SEQ ID NO: 1556170 - RNA, 19 nt, Artificial Sequence
  Description of Artificial Sequence: Synthetic oligonucleotide
  Sense strand starting at position 3331 of SEQ ID NO: 1245354
ugggauugguggcuccuau

SEQ ID NO: 1556171 - RNA, 19 nt, Artificial Sequence
  Description of Artificial Sequence: Synthetic oligonucleotide
  Antisense strand to SEQ ID NO: 1556170
auaggagccaccaauccca

SEQ ID NO: 1556172 - RNA, 19 nt, Artificial Sequence
  Description of Artificial Sequence: Synthetic oligonucleotide
  Sense strand starting at position 3437 of SEQ ID NO: 1245354
gcaggagccucgucuggaa

SEQ ID NO: 1556173 - RNA, 19 nt, Artificial Sequence
  Description of Artificial Sequence: Synthetic oligonucleotide
  Antisense strand to SEQ ID NO: 1556172
uuccagacgaggcuccugc

SEQ ID NO: 1556174 - RNA, 19 nt, Artificial Sequence
  Description of Artificial Sequence: Synthetic oligonucleotide
  Sense strand starting at position 3471 of SEQ ID NO: 1245354
ggagacgcuuuguuugcua

SEQ ID NO: 1556175 - RNA, 19 nt, Artificial Sequence
  Description of Artificial Sequence: Synthetic oligonucleotide
  Antisense strand to SEQ ID NO: 1556174
uagcaaacaaagcgucucc

SEQ ID NO: 1556176 - RNA, 19 nt, Artificial Sequence
  Description of Artificial Sequence: Synthetic oligonucleotide
  Sense strand starting at position 3479 of SEQ ID NO: 1245354
uuuguuugcuaacuucgaa

SEQ ID NO: 1556177 - RNA, 19 nt, Artificial Sequence
  Description of Artificial Sequence: Synthetic oligonucleotide
  Antisense strand to SEQ ID NO: 1556176
uucgaaguuagcaaacaaa

SEQ ID NO: 1556178 - RNA, 19 nt, Artificial Sequence
  Description of Artificial Sequence: Synthetic oligonucleotide
  Sense strand starting at position 3582 of SEQ ID NO: 1245354
cgcuuuagccagcucgaga

SEQ ID NO: 1556179 - RNA, 19 nt, Artificial Sequence
  Description of Artificial Sequence: Synthetic oligonucleotide
  Antisense strand to SEQ ID NO: 1556178
ucucgagcuggcuaaagcg

SEQ ID NO: 1556180 - RNA, 19 nt, Artificial Sequence
  Description of Artificial Sequence: Synthetic oligonucleotide
  Sense strand starting at position 3646 of SEQ ID NO: 1245354
ggcucucauuauguacaca

SEQ ID NO: 1556181 - RNA, 19 nt, Artificial Sequence
  Description of Artificial Sequence: Synthetic oligonucleotide
  Antisense strand to SEQ ID NO: 1556180
uguguacauaaugagagcc

SEQ ID NO: 1556182 - RNA, 19 nt, Artificial Sequence
  Description of Artificial Sequence: Synthetic oligonucleotide
  Sense strand starting at position 3684 of SEQ ID NO: 1245354
ccaaguggacuuggcuaau

SEQ ID NO: 1556183 - RNA, 19 nt, Artificial Sequence
  Description of Artificial Sequence: Synthetic oligonucleotide
  Antisense strand to SEQ ID NO: 1556182
auuagccaaguccacuugg

SEQ ID NO: 1556184 - RNA, 19 nt, Artificial Sequence
  Description of Artificial Sequence: Synthetic oligonucleotide
  Sense strand starting at position 3694 of SEQ ID NO: 1245354
uuggcuaaugacugcgauu

SEQ ID NO: 1556185 - RNA, 19 nt, Artificial Sequence
  Description of Artificial Sequence: Synthetic oligonucleotide
  Antisense strand to SEQ ID NO: 1556184
aaucgcagucauuagccaa

SEQ ID NO: 1556186 - RNA, 19 nt, Artificial Sequence
  Description of Artificial Sequence: Synthetic oligonucleotide
  Sense strand starting at position 3696 of SEQ ID NO: 1245354
ggcuaaugacugcgauucu

SEQ ID NO: 1556187 - RNA, 19 nt, Artificial Sequence
  Description of Artificial Sequence: Synthetic oligonucleotide
  Antisense strand to SEQ ID NO: 1556186
agaaucgcagucauuagcc

SEQ ID NO: 1556188 - RNA, 19 nt, Artificial Sequence
  Description of Artificial Sequence: Synthetic oligonucleotide
  Sense strand starting at position 3746 of SEQ ID NO: 1245354
aaggguuuauagcuugaaa

SEQ ID NO: 1556189 - RNA, 19 nt, Artificial Sequence
  Description of Artificial Sequence: Synthetic oligonucleotide
  Antisense strand to SEQ ID NO: 1556188
uuucaagcuauaaacccuu

SEQ ID NO: 1556190 - RNA, 19 nt, Artificial Sequence
  Description of Artificial Sequence: Synthetic oligonucleotide
  Sense strand starting at position 3803 of SEQ ID NO: 1245354
uugaaagccucuuucgaau

SEQ ID NO: 1556191 - RNA, 19 nt, Artificial Sequence
  Description of Artificial Sequence: Synthetic oligonucleotide
  Antisense strand to SEQ ID NO: 1556190
auucgaaagaggcuuucaa

SEQ ID NO: 1556192 - RNA, 19 nt, Artificial Sequence
  Description of Artificial Sequence: Synthetic oligonucleotide
  Sense strand starting at position 3851 of SEQ ID NO: 1245354
ucaccuuggcuagaaguca

SEQ ID NO: 1556193 - RNA, 19 nt, Artificial Sequence
  Description of Artificial Sequence: Synthetic oligonucleotide
  Antisense strand to SEQ ID NO: 1556192
ugacuucuagccaagguga

SEQ ID NO: 1556194 - RNA, 19 nt, Artificial Sequence
  Description of Artificial Sequence: Synthetic oligonucleotide
  Sense strand starting at position 40 of SEQ ID NO: 1245355
ugaucucagccucagagua

SEQ ID NO: 1556195 - RNA, 19 nt, Artificial Sequence
  Description of Artificial Sequence: Synthetic oligonucleotide
  Antisense strand to SEQ ID NO: 1556194
uacucugaggcugagauca

SEQ ID NO: 1556196 - RNA, 19 nt, Artificial Sequence
  Description of Artificial Sequence: Synthetic oligonucleotide
  Sense strand starting at position 50 of SEQ ID NO: 1245355
cucagaguagcuuggacua

SEQ ID NO: 1556197 - RNA, 19 nt, Artificial Sequence
  Description of Artificial Sequence: Synthetic oligonucleotide
  Antisense strand to SEQ ID NO: 1556196
uaguccaagcuacucugag

SEQ ID NO: 1556198 - RNA, 19 nt, Artificial Sequence
  Description of Artificial Sequence: Synthetic oligonucleotide
  Sense strand starting at position 252 of SEQ ID NO: 1245355
gggucaccucuuuaaguuc

SEQ ID NO: 1556199 - RNA, 19 nt, Artificial Sequence
  Description of Artificial Sequence: Synthetic oligonucleotide
  Antisense strand to SEQ ID NO: 1556198
gaacuuaaagaggugaccc

SEQ ID NO: 1556200 - RNA, 19 nt, Artificial Sequence
  Description of Artificial Sequence: Synthetic oligonucleotide
  Sense strand starting at position 291 of SEQ ID NO: 1245355
cguuacuagaaguauguca

SEQ ID NO: 1556201 - RNA, 19 nt, Artificial Sequence
  Description of Artificial Sequence: Synthetic oligonucleotide
  Antisense strand to SEQ ID NO: 1556200
ugacauacuucuaguaacg

SEQ ID NO: 1556202 - RNA, 19 nt, Artificial Sequence
  Description of Artificial Sequence: Synthetic oligonucleotide
  Sense strand starting at position 293 of SEQ ID NO: 1245355
uuacuagaaguaugucaua

SEQ ID NO: 1556203 - RNA, 19 nt, Artificial Sequence
  Description of Artificial Sequence: Synthetic oligonucleotide
  Antisense strand to SEQ ID NO: 1556202
uaugacauacuucuaguaa

SEQ ID NO: 1556204 - RNA, 19 nt, Artificial Sequence
  Description of Artificial Sequence: Synthetic oligonucleotide
  Sense strand starting at position 423 of SEQ ID NO: 1245355
agguuugaaacauguggau

SEQ ID NO: 1556205 - RNA, 19 nt, Artificial Sequence
  Description of Artificial Sequence: Synthetic oligonucleotide
  Antisense strand to SEQ ID NO: 1556204
auccacauguuucaaaccu

SEQ ID NO: 1556206 - RNA, 19 nt, Artificial Sequence
  Description of Artificial Sequence: Synthetic oligonucleotide
  Sense strand starting at position 425 of SEQ ID NO: 1245355
guuugaaacauguggauca

SEQ ID NO: 1556207 - RNA, 19 nt, Artificial Sequence
  Description of Artificial Sequence: Synthetic oligonucleotide
  Antisense strand to SEQ ID NO: 1556206
ugauccacauguuucaaac

SEQ ID NO: 1556208 - RNA, 19 nt, Artificial Sequence
  Description of Artificial Sequence: Synthetic oligonucleotide
  Sense strand starting at position 478 of SEQ ID NO: 1245355
gcaguagcucuugaauuag

SEQ ID NO: 1556209 - RNA, 19 nt, Artificial Sequence
  Description of Artificial Sequence: Synthetic oligonucleotide
  Antisense strand to SEQ ID NO: 1556208
cuaauucaagagcuacugc

SEQ ID NO: 1556210 - RNA, 19 nt, Artificial Sequence
  Description of Artificial Sequence: Synthetic oligonucleotide
  Sense strand starting at position 489 of SEQ ID NO: 1245355
ugaauuaguuguguaaaug

SEQ ID NO: 1556211 - RNA, 19 nt, Artificial Sequence
  Description of Artificial Sequence: Synthetic oligonucleotide
  Antisense strand to SEQ ID NO: 1556210
cauuuacacaacuaauuca

SEQ ID NO: 1556212 - RNA, 19 nt, Artificial Sequence
  Description of Artificial Sequence: Synthetic oligonucleotide
  Sense strand starting at position 490 of SEQ ID NO: 1245355
gaauuaguuguguaaauga

SEQ ID NO: 1556213 - RNA, 19 nt, Artificial Sequence
  Description of Artificial Sequence: Synthetic oligonucleotide
  Antisense strand to SEQ ID NO: 1556212
ucauuuacacaacuaauuc

SEQ ID NO: 1556214 - RNA, 19 nt, Artificial Sequence
  Description of Artificial Sequence: Synthetic oligonucleotide
  Sense strand starting at position 535 of SEQ ID NO: 1245355
cuggguucacaguaagugu

SEQ ID NO: 1556215 - RNA, 19 nt, Artificial Sequence
  Description of Artificial Sequence: Synthetic oligonucleotide
  Antisense strand to SEQ ID NO: 1556214
acacuuacugugaacccag

SEQ ID NO: 1556216 - RNA, 19 nt, Artificial Sequence
  Description of Artificial Sequence: Synthetic oligonucleotide
  Sense strand starting at position 546 of SEQ ID NO: 1245355
guaaguguuagggauuauu

SEQ ID NO: 1556217 - RNA, 19 nt, Artificial Sequence
  Description of Artificial Sequence: Synthetic oligonucleotide
  Antisense strand to SEQ ID NO: 1556216
aauaaucccuaacacuuac

SEQ ID NO: 1556218 - RNA, 19 nt, Artificial Sequence
  Description of Artificial Sequence: Synthetic oligonucleotide
  Sense strand starting at position 557 of SEQ ID NO: 1245355
ggauuauugugaucauuau

SEQ ID NO: 1556219 - RNA, 19 nt, Artificial Sequence
  Description of Artificial Sequence: Synthetic oligonucleotide
  Antisense strand to SEQ ID NO: 1556218
auaaugaucacaauaaucc

SEQ ID NO: 1556220 - RNA, 19 nt, Artificial Sequence
  Description of Artificial Sequence: Synthetic oligonucleotide
  Sense strand starting at position 747 of SEQ ID NO: 1245355
guauaaaugauacgauugu

SEQ ID NO: 1556221 - RNA, 19 nt, Artificial Sequence
  Description of Artificial Sequence: Synthetic oligonucleotide
  Antisense strand to SEQ ID NO: 1556220
acaaucguaucauuuauac

SEQ ID NO: 1556222 - RNA, 19 nt, Artificial Sequence
  Description of Artificial Sequence: Synthetic oligonucleotide
  Sense strand starting at position 751 of SEQ ID NO: 1245355
aaaugauacgauuguguau

SEQ ID NO: 1556223 - RNA, 19 nt, Artificial Sequence
  Description of Artificial Sequence: Synthetic oligonucleotide
  Antisense strand to SEQ ID NO: 1556222
auacacaaucguaucauuu

SEQ ID NO: 1556224 - RNA, 19 nt, Artificial Sequence
  Description of Artificial Sequence: Synthetic oligonucleotide
  Sense strand starting at position 783 of SEQ ID NO: 1245355
gagaauuaauuagugcuua

SEQ ID NO: 1556225 - RNA, 19 nt, Artificial Sequence
  Description of Artificial Sequence: Synthetic oligonucleotide
  Antisense strand to SEQ ID NO: 1556224
uaagcacuaauuaauucuc

SEQ ID NO: 1556226 - RNA, 19 nt, Artificial Sequence
  Description of Artificial Sequence: Synthetic oligonucleotide
  Sense strand starting at position 956 of SEQ ID NO: 1245355
uuggcaacugcucaauacu

SEQ ID NO: 1556227 - RNA, 19 nt, Artificial Sequence
  Description of Artificial Sequence: Synthetic oligonucleotide
  Antisense strand to SEQ ID NO: 1556226
aguauugagcaguugccaa

SEQ ID NO: 1556228 - RNA, 19 nt, Artificial Sequence
  Description of Artificial Sequence: Synthetic oligonucleotide
  Sense strand starting at position 1052 of SEQ ID NO: 1245355
uucccuugacgauauaucu

SEQ ID NO: 1556229 - RNA, 19 nt, Artificial Sequence
  Description of Artificial Sequence: Synthetic oligonucleotide
  Antisense strand to SEQ ID NO: 1556228
agauauaucgucaagggaa

SEQ ID NO: 1556230 - RNA, 19 nt, Artificial Sequence
  Description of Artificial Sequence: Synthetic oligonucleotide
  Sense strand starting at position 1498 of SEQ ID NO: 1245355
cuggauuaaugaguggcaa

SEQ ID NO: 1556231 - RNA, 19 nt, Artificial Sequence
  Description of Artificial Sequence: Synthetic oligonucleotide
  Antisense strand to SEQ ID NO: 1556230
uugccacucauuaauccag

SEQ ID NO: 1556232 - RNA, 19 nt, Artificial Sequence
  Description of Artificial Sequence: Synthetic oligonucleotide
  Sense strand starting at position 1499 of SEQ ID NO: 1245355
uggauuaaugaguggcaaa

SEQ ID NO: 1556233 - RNA, 19 nt, Artificial Sequence
  Description of Artificial Sequence: Synthetic oligonucleotide
  Antisense strand to SEQ ID NO: 1556232
uuugccacucauuaaucca

SEQ ID NO: 1556234 - RNA, 19 nt, Artificial Sequence
  Description of Artificial Sequence: Synthetic oligonucleotide
  Sense strand starting at position 1500 of SEQ ID NO: 1245355
ggauuaaugaguggcaaau

SEQ ID NO: 1556235 - RNA, 19 nt, Artificial Sequence
  Description of Artificial Sequence: Synthetic oligonucleotide
  Antisense strand to SEQ ID NO: 1556234
auuugccacucauuaaucc

SEQ ID NO: 1556236 - RNA, 19 nt, Artificial Sequence
  Description of Artificial Sequence: Synthetic oligonucleotide
  Sense strand starting at position 1506 of SEQ ID NO: 1245355
augaguggcaaaugagaua

SEQ ID NO: 1556237 - RNA, 19 nt, Artificial Sequence
  Description of Artificial Sequence: Synthetic oligonucleotide
  Antisense strand to SEQ ID NO: 1556236
uaucucauuugccacucau

SEQ ID NO: 1556238 - RNA, 19 nt, Artificial Sequence
  Description of Artificial Sequence: Synthetic oligonucleotide
  Sense strand starting at position 1520 of SEQ ID NO: 1245355
agauaaugguaguuagcaa

SEQ ID NO: 1556239 - RNA, 19 nt, Artificial Sequence
  Description of Artificial Sequence: Synthetic oligonucleotide
  Antisense strand to SEQ ID NO: 1556238
uugcuaacuaccauuaucu

SEQ ID NO: 1556240 - RNA, 19 nt, Artificial Sequence
  Description of Artificial Sequence: Synthetic oligonucleotide
  Sense strand starting at position 1531 of SEQ ID NO: 1245355
guuagcaaacuuuauugua

SEQ ID NO: 1556241 - RNA, 19 nt, Artificial Sequence
  Description of Artificial Sequence: Synthetic oligonucleotide
  Antisense strand to SEQ ID NO: 1556240
uacaauaaaguuugcuaac

SEQ ID NO: 1556242 - RNA, 19 nt, Artificial Sequence
  Description of Artificial Sequence: Synthetic oligonucleotide
  Sense strand starting at position 1717 of SEQ ID NO: 1245355
auuaauaauccggauguau

SEQ ID NO: 1556243 - RNA, 19 nt, Artificial Sequence
  Description of Artificial Sequence: Synthetic oligonucleotide
  Antisense strand to SEQ ID NO: 1556242
auacauccggauuauuaau

SEQ ID NO: 1556244 - RNA, 19 nt, Artificial Sequence
  Description of Artificial Sequence: Synthetic oligonucleotide
  Sense strand starting at position 1726 of SEQ ID NO: 1245355
ccggauguauuugagauuu

SEQ ID NO: 1556245 - RNA, 19 nt, Artificial Sequence
  Description of Artificial Sequence: Synthetic oligonucleotide
  Antisense strand to SEQ ID NO: 1556244
aaaucucaaauacauccgg

SEQ ID NO: 1556246 - RNA, 19 nt, Artificial Sequence
  Description of Artificial Sequence: Synthetic oligonucleotide
  Sense strand starting at position 2120 of SEQ ID NO: 1245355
gaaugagucaacggcaaag

SEQ ID NO: 1556247 - RNA, 19 nt, Artificial Sequence
  Description of Artificial Sequence: Synthetic oligonucleotide
  Antisense strand to SEQ ID NO: 1556246
cuuugccguugacucauuc

SEQ ID NO: 1556248 - RNA, 19 nt, Artificial Sequence
  Description of Artificial Sequence: Synthetic oligonucleotide
  Sense strand starting at position 2196 of SEQ ID NO: 1245355
gggcccacuuaaucuuaaa

SEQ ID NO: 1556249 - RNA, 19 nt, Artificial Sequence
  Description of Artificial Sequence: Synthetic oligonucleotide
  Antisense strand to SEQ ID NO: 1556248
uuuaagauuaagugggccc

SEQ ID NO: 1556250 - RNA, 19 nt, Artificial Sequence
  Description of Artificial Sequence: Synthetic oligonucleotide
  Sense strand starting at position 2284 of SEQ ID NO: 1245355
cucccagaugugcaaagaa

SEQ ID NO: 1556251 - RNA, 19 nt, Artificial Sequence
  Description of Artificial Sequence: Synthetic oligonucleotide
  Antisense strand to SEQ ID NO: 1556250
uucuuugcacaucugggag

SEQ ID NO: 1556252 - RNA, 19 nt, Artificial Sequence
  Description of Artificial Sequence: Synthetic oligonucleotide
  Sense strand starting at position 2320 of SEQ ID NO: 1245355
cuaugcgugcucguuuaga

SEQ ID NO: 1556253 - RNA, 19 nt, Artificial Sequence
  Description of Artificial Sequence: Synthetic oligonucleotide
  Antisense strand to SEQ ID NO: 1556252
ucuaaacgagcacgcauag

SEQ ID NO: 1556254 - RNA, 19 nt, Artificial Sequence
  Description of Artificial Sequence: Synthetic oligonucleotide
  Sense strand starting at position 2322 of SEQ ID NO: 1245355
augcgugcucguuuagaag

SEQ ID NO: 1556255 - RNA, 19 nt, Artificial Sequence
  Description of Artificial Sequence: Synthetic oligonucleotide
  Antisense strand to SEQ ID NO: 1556254
cuucuaaacgagcacgcau

SEQ ID NO: 1556256 - RNA, 19 nt, Artificial Sequence
  Description of Artificial Sequence: Synthetic oligonucleotide
  Sense strand starting at position 2501 of SEQ ID NO: 1245355
aucuuuaccugguugagua

SEQ ID NO: 1556257 - RNA, 19 nt, Artificial Sequence
  Description of Artificial Sequence: Synthetic oligonucleotide
  Antisense strand to SEQ ID NO: 1556256
uacucaaccagguaaagau

SEQ ID NO: 1556258 - RNA, 19 nt, Artificial Sequence
  Description of Artificial Sequence: Synthetic oligonucleotide
  Sense strand starting at position 2502 of SEQ ID NO: 1245355
ucuuuaccugguugaguaa

SEQ ID NO: 1556259 - RNA, 19 nt, Artificial Sequence
  Description of Artificial Sequence: Synthetic oligonucleotide
  Antisense strand to SEQ ID NO: 1556258
uuacucaaccagguaaaga

SEQ ID NO: 1556260 - RNA, 19 nt, Artificial Sequence
  Description of Artificial Sequence: Synthetic oligonucleotide
  Sense strand starting at position 2503 of SEQ ID NO: 1245355
cuuuaccugguugaguaaa

SEQ ID NO: 1556261 - RNA, 19 nt, Artificial Sequence
  Description of Artificial Sequence: Synthetic oligonucleotide
  Antisense strand to SEQ ID NO: 1556260
uuuacucaaccagguaaag

SEQ ID NO: 1556262 - RNA, 19 nt, Artificial Sequence
  Description of Artificial Sequence: Synthetic oligonucleotide
  Sense strand starting at position 2570 of SEQ ID NO: 1245355
cuuccuugaccugguagaa

SEQ ID NO: 1556263 - RNA, 19 nt, Artificial Sequence
  Description of Artificial Sequence: Synthetic oligonucleotide
  Antisense strand to SEQ ID NO: 1556262
uucuaccaggucaaggaag

SEQ ID NO: 1556264 - RNA, 19 nt, Artificial Sequence
  Description of Artificial Sequence: Synthetic oligonucleotide
  Sense strand starting at position 3049 of SEQ ID NO: 1245355
auggucagauguucccaau

SEQ ID NO: 1556265 - RNA, 19 nt, Artificial Sequence
  Description of Artificial Sequence: Synthetic oligonucleotide
  Antisense strand to SEQ ID NO: 1556264
auugggaacaucugaccau

SEQ ID NO: 1556266 - RNA, 19 nt, Artificial Sequence
  Description of Artificial Sequence: Synthetic oligonucleotide
  Sense strand starting at position 3671 of SEQ ID NO: 1245355
cugaaacaagccuguauca

SEQ ID NO: 1556267 - RNA, 19 nt, Artificial Sequence
  Description of Artificial Sequence: Synthetic oligonucleotide
  Antisense strand to SEQ ID NO: 1556266
ugauacaggcuuguuucag

SEQ ID NO: 1556268 - RNA, 19 nt, Artificial Sequence
  Description of Artificial Sequence: Synthetic oligonucleotide
  Sense strand starting at position 3822 of SEQ ID NO: 1245355
ugggaggugguaugaguaa

SEQ ID NO: 1556269 - RNA, 19 nt, Artificial Sequence
  Description of Artificial Sequence: Synthetic oligonucleotide
  Antisense strand to SEQ ID NO: 1556268
uuacucauaccaccuccca

SEQ ID NO: 1556270 - RNA, 19 nt, Artificial Sequence
  Description of Artificial Sequence: Synthetic oligonucleotide
  Sense strand starting at position 3873 of SEQ ID NO: 1245355
uguuguaugaagugaaaga

SEQ ID NO: 1556271 - RNA, 19 nt, Artificial Sequence
  Description of Artificial Sequence: Synthetic oligonucleotide
  Antisense strand to SEQ ID NO: 1556270
ucuuucacuucauacaaca

SEQ ID NO: 1556272 - RNA, 19 nt, Artificial Sequence
  Description of Artificial Sequence: Synthetic oligonucleotide
  Sense strand starting at position 3874 of SEQ ID NO: 1245355
guuguaugaagugaaagac

SEQ ID NO: 1556273 - RNA, 19 nt, Artificial Sequence
  Description of Artificial Sequence: Synthetic oligonucleotide
  Antisense strand to SEQ ID NO: 1556272
gucuuucacuucauacaac

SEQ ID NO: 1556274 - RNA, 19 nt, Artificial Sequence
  Description of Artificial Sequence: Synthetic oligonucleotide
  Sense strand starting at position 872 of SEQ ID NO: 1245356
uuguaaagcuuccagaaca

SEQ ID NO: 1556275 - RNA, 19 nt, Artificial Sequence
  Description of Artificial Sequence: Synthetic oligonucleotide
  Antisense strand to SEQ ID NO: 1556274
uguucuggaagcuuuacaa

SEQ ID NO: 1556276 - RNA, 19 nt, Artificial Sequence
  Description of Artificial Sequence: Synthetic oligonucleotide
  Sense strand starting at position 882 of SEQ ID NO: 1245356
uccagaacacuucguggaa

SEQ ID NO: 1556277 - RNA, 19 nt, Artificial Sequence
  Description of Artificial Sequence: Synthetic oligonucleotide
  Antisense strand to SEQ ID NO: 1556276
uuccacgaaguguucugga

SEQ ID NO: 1556278 - RNA, 19 nt, Artificial Sequence
  Description of Artificial Sequence: Synthetic oligonucleotide
  Sense strand starting at position 883 of SEQ ID NO: 1245356
ccagaacacuucguggaaa

SEQ ID NO: 1556279 - RNA, 19 nt, Artificial Sequence
  Description of Artificial Sequence: Synthetic oligonucleotide
  Antisense strand to SEQ ID NO: 1556278
uuuccacgaaguguucugg

SEQ ID NO: 1556280 - RNA, 19 nt, Artificial Sequence
  Description of Artificial Sequence: Synthetic oligonucleotide
  Sense strand starting at position 885 of SEQ ID NO: 1245356
agaacacuucguggaaaca

SEQ ID NO: 1556281 - RNA, 19 nt, Artificial Sequence
  Description of Artificial Sequence: Synthetic oligonucleotide
  Antisense strand to SEQ ID NO: 1556280
uguuuccacgaaguguucu

SEQ ID NO: 1556282 - RNA, 19 nt, Artificial Sequence
  Description of Artificial Sequence: Synthetic oligonucleotide
  Sense strand starting at position 1115 of SEQ ID NO: 1245356
ucgcauuccuucgaucgua

SEQ ID NO: 1556283 - RNA, 19 nt, Artificial Sequence
  Description of Artificial Sequence: Synthetic oligonucleotide
  Antisense strand to SEQ ID NO: 1556282
uacgaucgaaggaaugcga

SEQ ID NO: 1556284 - RNA, 19 nt, Artificial Sequence
  Description of Artificial Sequence: Synthetic oligonucleotide
  Sense strand starting at position 1372 of SEQ ID NO: 1245356
gggugucggcggagacaau

SEQ ID NO: 1556285 - RNA, 19 nt, Artificial Sequence
  Description of Artificial Sequence: Synthetic oligonucleotide
  Antisense strand to SEQ ID NO: 1556284
auugucuccgccgacaccc

SEQ ID NO: 1556286 - RNA, 19 nt, Artificial Sequence
  Description of Artificial Sequence: Synthetic oligonucleotide
  Sense strand starting at position 1416 of SEQ ID NO: 1245356
cgcugagcguguuucuuga

SEQ ID NO: 1556287 - RNA, 19 nt, Artificial Sequence
  Description of Artificial Sequence: Synthetic oligonucleotide
  Antisense strand to SEQ ID NO: 1556286
ucaagaaacacgcucagcg

SEQ ID NO: 1556288 - RNA, 19 nt, Artificial Sequence
  Description of Artificial Sequence: Synthetic oligonucleotide
  Sense strand starting at position 1418 of SEQ ID NO: 1245356
cugagcguguuucuugaca

SEQ ID NO: 1556289 - RNA, 19 nt, Artificial Sequence
  Description of Artificial Sequence: Synthetic oligonucleotide
  Antisense strand to SEQ ID NO: 1556288
ugucaagaaacacgcucag

SEQ ID NO: 1556290 - RNA, 19 nt, Artificial Sequence
  Description of Artificial Sequence: Synthetic oligonucleotide
  Sense strand starting at position 1420 of SEQ ID NO: 1245356
gagcguguuucuugacaac

SEQ ID NO: 1556291 - RNA, 19 nt, Artificial Sequence
  Description of Artificial Sequence: Synthetic oligonucleotide
  Antisense strand to SEQ ID NO: 1556290
guugucaagaaacacgcuc

SEQ ID NO: 1556292 - RNA, 19 nt, Artificial Sequence
  Description of Artificial Sequence: Synthetic oligonucleotide
  Sense strand starting at position 1476 of SEQ ID NO: 1245356
ccucguguugugucuagca

SEQ ID NO: 1556293 - RNA, 19 nt, Artificial Sequence
  Description of Artificial Sequence: Synthetic oligonucleotide
  Antisense strand to SEQ ID NO: 1556292
ugcuagacacaacacgagg

SEQ ID NO: 1556294 - RNA, 19 nt, Artificial Sequence
  Description of Artificial Sequence: Synthetic oligonucleotide
  Sense strand starting at position 1479 of SEQ ID NO: 1245356
cguguugugucuagcagga

SEQ ID NO: 1556295 - RNA, 19 nt, Artificial Sequence
  Description of Artificial Sequence: Synthetic oligonucleotide
  Antisense strand to SEQ ID NO: 1556294
uccugcuagacacaacacg

SEQ ID NO: 1556296 - RNA, 19 nt, Artificial Sequence
  Description of Artificial Sequence: Synthetic oligonucleotide
  Sense strand starting at position 1481 of SEQ ID NO: 1245356
uguugugucuagcaggaaa

SEQ ID NO: 1556297 - RNA, 19 nt, Artificial Sequence
  Description of Artificial Sequence: Synthetic oligonucleotide
  Antisense strand to SEQ ID NO: 1556296
uuuccugcuagacacaaca

SEQ ID NO: 1556298 - RNA, 19 nt, Artificial Sequence
  Description of Artificial Sequence: Synthetic oligonucleotide
  Sense strand starting at position 1987 of SEQ ID NO: 1245356
cggcgcugucagagugaga

SEQ ID NO: 1556299 - RNA, 19 nt, Artificial Sequence
  Description of Artificial Sequence: Synthetic oligonucleotide
  Antisense strand to SEQ ID NO: 1556298
ucucacucugacagcgccg

SEQ ID NO: 1556300 - RNA, 19 nt, Artificial Sequence
  Description of Artificial Sequence: Synthetic oligonucleotide
  Sense strand starting at position 1989 of SEQ ID NO: 1245356
gcgcugucagagugagaga

SEQ ID NO: 1556301 - RNA, 19 nt, Artificial Sequence
  Description of Artificial Sequence: Synthetic oligonucleotide
  Antisense strand to SEQ ID NO: 1556300
ucucucacucugacagcgc

SEQ ID NO: 1556302 - RNA, 19 nt, Artificial Sequence
  Description of Artificial Sequence: Synthetic oligonucleotide
  Sense strand starting at position 2748 of SEQ ID NO: 1245356
acgcucacaugcucuuuaa

SEQ ID NO: 1556303 - RNA, 19 nt, Artificial Sequence
  Description of Artificial Sequence: Synthetic oligonucleotide
  Antisense strand to SEQ ID NO: 1556302
uuaaagagcaugugagcgu

SEQ ID NO: 1556304 - RNA, 19 nt, Artificial Sequence
  Description of Artificial Sequence: Synthetic oligonucleotide
  Sense strand starting at position 2752 of SEQ ID NO: 1245356
ucacaugcucuuuaaacgu

SEQ ID NO: 1556305 - RNA, 19 nt, Artificial Sequence
  Description of Artificial Sequence: Synthetic oligonucleotide
  Antisense strand to SEQ ID NO: 1556304
acguuuaaagagcauguga

SEQ ID NO: 1556306 - RNA, 19 nt, Artificial Sequence
  Description of Artificial Sequence: Synthetic oligonucleotide
  Sense strand starting at position 2890 of SEQ ID NO: 1245356
ucgucuguuucggucaaca

SEQ ID NO: 1556307 - RNA, 19 nt, Artificial Sequence
  Description of Artificial Sequence: Synthetic oligonucleotide
  Antisense strand to SEQ ID NO: 1556306
uguugaccgaaacagacga

SEQ ID NO: 1556308 - RNA, 19 nt, Artificial Sequence
  Description of Artificial Sequence: Synthetic oligonucleotide
  Sense strand starting at position 2892 of SEQ ID NO: 1245356
gucuguuucggucaacagu

SEQ ID NO: 1556309 - RNA, 19 nt, Artificial Sequence
  Description of Artificial Sequence: Synthetic oligonucleotide
  Antisense strand to SEQ ID NO: 1556308
acuguugaccgaaacagac

SEQ ID NO: 1556310 - RNA, 19 nt, Artificial Sequence
  Description of Artificial Sequence: Synthetic oligonucleotide
  Sense strand starting at position 2908 of SEQ ID NO: 1245356
agugucuacucuucggauu

SEQ ID NO: 1556311 - RNA, 19 nt, Artificial Sequence
  Description of Artificial Sequence: Synthetic oligonucleotide
  Antisense strand to SEQ ID NO: 1556310
aauccgaagaguagacacu

SEQ ID NO: 1556312 - RNA, 19 nt, Artificial Sequence
  Description of Artificial Sequence: Synthetic oligonucleotide
  Sense strand starting at position 2911 of SEQ ID NO: 1245356
gucuacucuucggauugga

SEQ ID NO: 1556313 - RNA, 19 nt, Artificial Sequence
  Description of Artificial Sequence: Synthetic oligonucleotide
  Antisense strand to SEQ ID NO: 1556312
uccaauccgaagaguagac

SEQ ID NO: 1556314 - RNA, 19 nt, Artificial Sequence
  Description of Artificial Sequence: Synthetic oligonucleotide
  Sense strand starting at position 3032 of SEQ ID NO: 1245356
acaggaguuucuugaugaa

SEQ ID NO: 1556315 - RNA, 19 nt, Artificial Sequence
  Description of Artificial Sequence: Synthetic oligonucleotide
  Antisense strand to SEQ ID NO: 1556314
uucaucaagaaacuccugu

SEQ ID NO: 1556316 - RNA, 19 nt, Artificial Sequence
  Description of Artificial Sequence: Synthetic oligonucleotide
  Sense strand starting at position 3035 of SEQ ID NO: 1245356
ggaguuucuugaugaaauu

SEQ ID NO: 1556317 - RNA, 19 nt, Artificial Sequence
  Description of Artificial Sequence: Synthetic oligonucleotide
  Antisense strand to SEQ ID NO: 1556316
aauuucaucaagaaacucc

SEQ ID NO: 1556318 - RNA, 19 nt, Artificial Sequence
  Description of Artificial Sequence: Synthetic oligonucleotide
  Sense strand starting at position 3072 of SEQ ID NO: 1245356
ugcuguuuggcugacuuga

SEQ ID NO: 1556319 - RNA, 19 nt, Artificial Sequence
  Description of Artificial Sequence: Synthetic oligonucleotide
  Antisense strand to SEQ ID NO: 1556318
ucaagucagccaaacagca

SEQ ID NO: 1556320 - RNA, 19 nt, Artificial Sequence
  Description of Artificial Sequence: Synthetic oligonucleotide
  Sense strand starting at position 3129 of SEQ ID NO: 1245356
ugguuacguccuguuguuu

SEQ ID NO: 1556321 - RNA, 19 nt, Artificial Sequence
  Description of Artificial Sequence: Synthetic oligonucleotide
  Antisense strand to SEQ ID NO: 1556320
aaacaacaggacguaacca

SEQ ID NO: 1556322 - RNA, 19 nt, Artificial Sequence
  Description of Artificial Sequence: Synthetic oligonucleotide
  Sense strand starting at position 3225 of SEQ ID NO: 1245356
cguaaauaagccuagcaga

SEQ ID NO: 1556323 - RNA, 19 nt, Artificial Sequence
  Description of Artificial Sequence: Synthetic oligonucleotide
  Antisense strand to SEQ ID NO: 1556322
ucugcuaggcuuauuuacg

SEQ ID NO: 1556324 - RNA, 19 nt, Artificial Sequence
  Description of Artificial Sequence: Synthetic oligonucleotide
  Sense strand starting at position 3291 of SEQ ID NO: 1245356
ucgguaaccucgguggaga

SEQ ID NO: 1556325 - RNA, 19 nt, Artificial Sequence
  Description of Artificial Sequence: Synthetic oligonucleotide
  Antisense strand to SEQ ID NO: 1556324
ucuccaccgagguuaccga

SEQ ID NO: 1556326 - RNA, 19 nt, Artificial Sequence
  Description of Artificial Sequence: Synthetic oligonucleotide
  Sense strand starting at position 3292 of SEQ ID NO: 1245356
cgguaaccucgguggagau

SEQ ID NO: 1556327 - RNA, 19 nt, Artificial Sequence
  Description of Artificial Sequence: Synthetic oligonucleotide
  Antisense strand to SEQ ID NO: 1556326
aucuccaccgagguuaccg

SEQ ID NO: 1556328 - RNA, 19 nt, Artificial Sequence
  Description of Artificial Sequence: Synthetic oligonucleotide
  Sense strand starting at position 3302 of SEQ ID NO: 1245356
gguggagaucccggcagaa

SEQ ID NO: 1556329 - RNA, 19 nt, Artificial Sequence
  Description of Artificial Sequence: Synthetic oligonucleotide
  Antisense strand to SEQ ID NO: 1556328
uucugccgggaucuccacc

SEQ ID NO: 1556330 - RNA, 19 nt, Artificial Sequence
  Description of Artificial Sequence: Synthetic oligonucleotide
  Sense strand starting at position 3339 of SEQ ID NO: 1245356
gauuaaacccgaggaguac

SEQ ID NO: 1556331 - RNA, 19 nt, Artificial Sequence
  Description of Artificial Sequence: Synthetic oligonucleotide
  Antisense strand to SEQ ID NO: 1556330
guacuccucggguuuaauc

SEQ ID NO: 1556332 - RNA, 19 nt, Artificial Sequence
  Description of Artificial Sequence: Synthetic oligonucleotide
  Sense strand starting at position 3369 of SEQ ID NO: 1245356
agggauaacuaacucgacu

SEQ ID NO: 1556333 - RNA, 19 nt, Artificial Sequence
  Description of Artificial Sequence: Synthetic oligonucleotide
  Antisense strand to SEQ ID NO: 1556332
agucgaguuaguuaucccu

SEQ ID NO: 1556334 - RNA, 19 nt, Artificial Sequence
  Description of Artificial Sequence: Synthetic oligonucleotide
  Sense strand starting at position 3393 of SEQ ID NO: 1245356
gcgucuguuucaggaacua

SEQ ID NO: 1556335 - RNA, 19 nt, Artificial Sequence
  Description of Artificial Sequence: Synthetic oligonucleotide
  Antisense strand to SEQ ID NO: 1556334
uaguuccugaaacagacgc

SEQ ID NO: 1556336 - RNA, 19 nt, Artificial Sequence
  Description of Artificial Sequence: Synthetic oligonucleotide
  Sense strand starting at position 3476 of SEQ ID NO: 1245356
gcguggaggccagaguuua

SEQ ID NO: 1556337 - RNA, 19 nt, Artificial Sequence
  Description of Artificial Sequence: Synthetic oligonucleotide
  Antisense strand to SEQ ID NO: 1556336
uaaacucuggccuccacgc

SEQ ID NO: 1556338 - RNA, 19 nt, Artificial Sequence
  Description of Artificial Sequence: Synthetic oligonucleotide
  Sense strand starting at position 3602 of SEQ ID NO: 1245356
gcugacugcucgggacaga

SEQ ID NO: 1556339 - RNA, 19 nt, Artificial Sequence
  Description of Artificial Sequence: Synthetic oligonucleotide
  Antisense strand to SEQ ID NO: 1556338
ucugucccgagcagucagc

SEQ ID NO: 1556340 - RNA, 19 nt, Artificial Sequence
  Description of Artificial Sequence: Synthetic oligonucleotide
  Sense strand starting at position 3603 of SEQ ID NO: 1245356
cugacugcucgggacagaa

SEQ ID NO: 1556341 - RNA, 19 nt, Artificial Sequence
  Description of Artificial Sequence: Synthetic oligonucleotide
  Antisense strand to SEQ ID NO: 1556340
uucugucccgagcagucag

SEQ ID NO: 1556342 - RNA, 19 nt, Artificial Sequence
  Description of Artificial Sequence: Synthetic oligonucleotide
  Sense strand starting at position 3819 of SEQ ID NO: 1245356
ccucgcuauuucguuugaa

SEQ ID NO: 1556343 - RNA, 19 nt, Artificial Sequence
  Description of Artificial Sequence: Synthetic oligonucleotide
  Antisense strand to SEQ ID NO: 1556342
uucaaacgaaauagcgagg

SEQ ID NO: 1556344 - RNA, 19 nt, Artificial Sequence
  Description of Artificial Sequence: Synthetic oligonucleotide
  Sense strand starting at position 3820 of SEQ ID NO: 1245356
cucgcuauuucguuugaag

SEQ ID NO: 1556345 - RNA, 19 nt, Artificial Sequence
  Description of Artificial Sequence: Synthetic oligonucleotide
  Antisense strand to SEQ ID NO: 1556344
cuucaaacgaaauagcgag

SEQ ID NO: 1556346 - RNA, 19 nt, Artificial Sequence
  Description of Artificial Sequence: Synthetic oligonucleotide
  Sense strand starting at position 3823 of SEQ ID NO: 1245356
gcuauuucguuugaagggu

SEQ ID NO: 1556347 - RNA, 19 nt, Artificial Sequence
  Description of Artificial Sequence: Synthetic oligonucleotide
  Antisense strand to SEQ ID NO: 1556346
acccuucaaacgaaauagc

SEQ ID NO: 1556348 - RNA, 19 nt, Artificial Sequence
  Description of Artificial Sequence: Synthetic oligonucleotide
  Sense strand starting at position 3840 of SEQ ID NO: 1245356
guugucuguggcugggauu

SEQ ID NO: 1556349 - RNA, 19 nt, Artificial Sequence
  Description of Artificial Sequence: Synthetic oligonucleotide
  Antisense strand to SEQ ID NO: 1556348
aaucccagccacagacaac

SEQ ID NO: 1556350 - RNA, 19 nt, Artificial Sequence
  Description of Artificial Sequence: Synthetic oligonucleotide
  Sense strand starting at position 3852 of SEQ ID NO: 1245356
ugggauugguggcuccuau

SEQ ID NO: 1556351 - RNA, 19 nt, Artificial Sequence
  Description of Artificial Sequence: Synthetic oligonucleotide
  Antisense strand to SEQ ID NO: 1556350
auaggagccaccaauccca

SEQ ID NO: 1556352 - RNA, 19 nt, Artificial Sequence
  Description of Artificial Sequence: Synthetic oligonucleotide
  Sense strand starting at position 3958 of SEQ ID NO: 1245356
gcaggagccucgucuggaa

SEQ ID NO: 1556353 - RNA, 19 nt, Artificial Sequence
  Description of Artificial Sequence: Synthetic oligonucleotide
  Antisense strand to SEQ ID NO: 1556352
uuccagacgaggcuccugc

SEQ ID NO: 1556354 - RNA, 19 nt, Artificial Sequence
  Description of Artificial Sequence: Synthetic oligonucleotide
  Sense strand starting at position 14 of SEQ ID NO: 1245357
uucugaauagcucgguaac

SEQ ID NO: 1556355 - RNA, 19 nt, Artificial Sequence
  Description of Artificial Sequence: Synthetic oligonucleotide
  Antisense strand to SEQ ID NO: 1556354
guuaccgagcuauucagaa

SEQ ID NO: 1556356 - RNA, 19 nt, Artificial Sequence
  Description of Artificial Sequence: Synthetic oligonucleotide
  Sense strand starting at position 15 of SEQ ID NO: 1245357
ucugaauagcucgguaaca

SEQ ID NO: 1556357 - RNA, 19 nt, Artificial Sequence
  Description of Artificial Sequence: Synthetic oligonucleotide
  Antisense strand to SEQ ID NO: 1556356
uguuaccgagcuauucaga

SEQ ID NO: 1556358 - RNA, 19 nt, Artificial Sequence
  Description of Artificial Sequence: Synthetic oligonucleotide
  Sense strand starting at position 16 of SEQ ID NO: 1245357
cugaauagcucgguaacau

SEQ ID NO: 1556359 - RNA, 19 nt, Artificial Sequence
  Description of Artificial Sequence: Synthetic oligonucleotide
  Antisense strand to SEQ ID NO: 1556358
auguuaccgagcuauucag

SEQ ID NO: 1556360 - RNA, 19 nt, Artificial Sequence
  Description of Artificial Sequence: Synthetic oligonucleotide
  Sense strand starting at position 17 of SEQ ID NO: 1245357
ugaauagcucgguaacauc

SEQ ID NO: 1556361 - RNA, 19 nt, Artificial Sequence
  Description of Artificial Sequence: Synthetic oligonucleotide
  Antisense strand to SEQ ID NO: 1556360
gauguuaccgagcuauuca

SEQ ID NO: 1556362 - RNA, 19 nt, Artificial Sequence
  Description of Artificial Sequence: Synthetic oligonucleotide
  Sense strand starting at position 25 of SEQ ID NO: 1245357
ucgguaacaucaugagaca

SEQ ID NO: 1556363 - RNA, 19 nt, Artificial Sequence
  Description of Artificial Sequence: Synthetic oligonucleotide
  Antisense strand to SEQ ID NO: 1556362
ugucucaugauguuaccga

SEQ ID NO: 1556364 - RNA, 19 nt, Artificial Sequence
  Description of Artificial Sequence: Synthetic oligonucleotide
  Sense strand starting at position 81 of SEQ ID NO: 1245357
aaauaagauugaugggaaa

SEQ ID NO: 1556365 - RNA, 19 nt, Artificial Sequence
  Description of Artificial Sequence: Synthetic oligonucleotide
  Antisense strand to SEQ ID NO: 1556364
uuucccaucaaucuuauuu

SEQ ID NO: 1556366 - RNA, 19 nt, Artificial Sequence
  Description of Artificial Sequence: Synthetic oligonucleotide
  Sense strand starting at position 140 of SEQ ID NO: 1245357
caaguuuccugaccagaag

SEQ ID NO: 1556367 - RNA, 19 nt, Artificial Sequence
  Description of Artificial Sequence: Synthetic oligonucleotide
  Antisense strand to SEQ ID NO: 1556366
cuucuggucaggaaacuug

SEQ ID NO: 1556368 - RNA, 19 nt, Artificial Sequence
  Description of Artificial Sequence: Synthetic oligonucleotide
  Sense strand starting at position 141 of SEQ ID NO: 1245357
aaguuuccugaccagaagu

SEQ ID NO: 1556369 - RNA, 19 nt, Artificial Sequence
  Description of Artificial Sequence: Synthetic oligonucleotide
  Antisense strand to SEQ ID NO: 1556368
acuucuggucaggaaacuu

SEQ ID NO: 1556370 - RNA, 19 nt, Artificial Sequence
  Description of Artificial Sequence: Synthetic oligonucleotide
  Sense strand starting at position 151 of SEQ ID NO: 1245357
accagaaguucuccuuuga

SEQ ID NO: 1556371 - RNA, 19 nt, Artificial Sequence
  Description of Artificial Sequence: Synthetic oligonucleotide
  Antisense strand to SEQ ID NO: 1556370
ucaaaggagaacuucuggu

SEQ ID NO: 1556372 - RNA, 19 nt, Artificial Sequence
  Description of Artificial Sequence: Synthetic oligonucleotide
  Sense strand starting at position 155 of SEQ ID NO: 1245357
gaaguucuccuuugagcug

SEQ ID NO: 1556373 - RNA, 19 nt, Artificial Sequence
  Description of Artificial Sequence: Synthetic oligonucleotide
  Antisense strand to SEQ ID NO: 1556372
cagcucaaaggagaacuuc

SEQ ID NO: 1556374 - RNA, 19 nt, Artificial Sequence
  Description of Artificial Sequence: Synthetic oligonucleotide
  Sense strand starting at position 174 of SEQ ID NO: 1245357
ggagcaaugucucuugccu

SEQ ID NO: 1556375 - RNA, 19 nt, Artificial Sequence
  Description of Artificial Sequence: Synthetic oligonucleotide
  Antisense strand to SEQ ID NO: 1556374
aggcaagagacauugcucc

SEQ ID NO: 1556376 - RNA, 19 nt, Artificial Sequence
  Description of Artificial Sequence: Synthetic oligonucleotide
  Sense strand starting at position 276 of SEQ ID NO: 1245357
cccggucuccaggaacaaa

SEQ ID NO: 1556377 - RNA, 19 nt, Artificial Sequence
  Description of Artificial Sequence: Synthetic oligonucleotide
  Antisense strand to SEQ ID NO: 1556376
uuuguuccuggagaccggg

SEQ ID NO: 1556378 - RNA, 19 nt, Artificial Sequence
  Description of Artificial Sequence: Synthetic oligonucleotide
  Sense strand starting at position 307 of SEQ ID NO: 1245357
ucaguaucuccuugggaga

SEQ ID NO: 1556379 - RNA, 19 nt, Artificial Sequence
  Description of Artificial Sequence: Synthetic oligonucleotide
  Antisense strand to SEQ ID NO: 1556378
ucucccaaggagauacuga

SEQ ID NO: 1556380 - RNA, 19 nt, Artificial Sequence
  Description of Artificial Sequence: Synthetic oligonucleotide
  Sense strand starting at position 308 of SEQ ID NO: 1245357
caguaucuccuugggagaa

SEQ ID NO: 1556381 - RNA, 19 nt, Artificial Sequence
  Description of Artificial Sequence: Synthetic oligonucleotide
  Antisense strand to SEQ ID NO: 1556380
uucucccaaggagauacug

SEQ ID NO: 1556382 - RNA, 19 nt, Artificial Sequence
  Description of Artificial Sequence: Synthetic oligonucleotide
  Sense strand starting at position 309 of SEQ ID NO: 1245357
aguaucuccuugggagaag

SEQ ID NO: 1556383 - RNA, 19 nt, Artificial Sequence
  Description of Artificial Sequence: Synthetic oligonucleotide
  Antisense strand to SEQ ID NO: 1556382
cuucucccaaggagauacu

SEQ ID NO: 1556384 - RNA, 19 nt, Artificial Sequence
  Description of Artificial Sequence: Synthetic oligonucleotide
  Sense strand starting at position 509 of SEQ ID NO: 1245357
ucagcuuucugggaggaca

SEQ ID NO: 1556385 - RNA, 19 nt, Artificial Sequence
  Description of Artificial Sequence: Synthetic oligonucleotide
  Antisense strand to SEQ ID NO: 1556384
uguccucccagaaagcuga

SEQ ID NO: 1556386 - RNA, 19 nt, Artificial Sequence
  Description of Artificial Sequence: Synthetic oligonucleotide
  Sense strand starting at position 643 of SEQ ID NO: 1245357
gcccgacuuccucaggagu

SEQ ID NO: 1556387 - RNA, 19 nt, Artificial Sequence
  Description of Artificial Sequence: Synthetic oligonucleotide
  Antisense strand to SEQ ID NO: 1556386
acuccugaggaagucgggc

SEQ ID NO: 1556388 - RNA, 19 nt, Artificial Sequence
  Description of Artificial Sequence: Synthetic oligonucleotide
  Sense strand starting at position 645 of SEQ ID NO: 1245357
ccgacuuccucaggagucu

SEQ ID NO: 1556389 - RNA, 19 nt, Artificial Sequence
  Description of Artificial Sequence: Synthetic oligonucleotide
  Antisense strand to SEQ ID NO: 1556388
agacuccugaggaagucgg

SEQ ID NO: 1556390 - RNA, 19 nt, Artificial Sequence
  Description of Artificial Sequence: Synthetic oligonucleotide
  Sense strand starting at position 646 of SEQ ID NO: 1245357
cgacuuccucaggagucuu

SEQ ID NO: 1556391 - RNA, 19 nt, Artificial Sequence
  Description of Artificial Sequence: Synthetic oligonucleotide
  Antisense strand to SEQ ID NO: 1556390
aagacuccugaggaagucg

SEQ ID NO: 1556392 - RNA, 19 nt, Artificial Sequence
  Description of Artificial Sequence: Synthetic oligonucleotide
  Sense strand starting at position 657 of SEQ ID NO: 1245357
ggagucuuuccagagccga

SEQ ID NO: 1556393 - RNA, 19 nt, Artificial Sequence
  Description of Artificial Sequence: Synthetic oligonucleotide
  Antisense strand to SEQ ID NO: 1556392
ucggcucuggaaagacucc

SEQ ID NO: 1556394 - RNA, 19 nt, Artificial Sequence
  Description of Artificial Sequence: Synthetic oligonucleotide
  Sense strand starting at position 778 of SEQ ID NO: 1245357
gagaguuccucggccucaa

SEQ ID NO: 1556395 - RNA, 19 nt, Artificial Sequence
  Description of Artificial Sequence: Synthetic oligonucleotide
  Antisense strand to SEQ ID NO: 1556394
uugaggccgaggaacucuc

SEQ ID NO: 1556396 - RNA, 19 nt, Artificial Sequence
  Description of Artificial Sequence: Synthetic oligonucleotide
  Sense strand starting at position 864 of SEQ ID NO: 1245357
uagaaaugaggccgugaau

SEQ ID NO: 1556397 - RNA, 19 nt, Artificial Sequence
  Description of Artificial Sequence: Synthetic oligonucleotide
  Antisense strand to SEQ ID NO: 1556396
auucacggccucauuucua

SEQ ID NO: 1556398 - RNA, 19 nt, Artificial Sequence
  Description of Artificial Sequence: Synthetic oligonucleotide
  Sense strand starting at position 2105 of SEQ ID NO: 1245357
uuguaaagcuuccagaaca

SEQ ID NO: 1556399 - RNA, 19 nt, Artificial Sequence
  Description of Artificial Sequence: Synthetic oligonucleotide
  Antisense strand to SEQ ID NO: 1556398
uguucuggaagcuuuacaa

SEQ ID NO: 1556400 - RNA, 19 nt, Artificial Sequence
  Description of Artificial Sequence: Synthetic oligonucleotide
  Sense strand starting at position 2115 of SEQ ID NO: 1245357
uccagaacacuucguggaa

SEQ ID NO: 1556401 - RNA, 19 nt, Artificial Sequence
  Description of Artificial Sequence: Synthetic oligonucleotide
  Antisense strand to SEQ ID NO: 1556400
uuccacgaaguguucugga

SEQ ID NO: 1556402 - RNA, 19 nt, Artificial Sequence
  Description of Artificial Sequence: Synthetic oligonucleotide
  Sense strand starting at position 2116 of SEQ ID NO: 1245357
ccagaacacuucguggaaa

SEQ ID NO: 1556403 - RNA, 19 nt, Artificial Sequence
  Description of Artificial Sequence: Synthetic oligonucleotide
  Antisense strand to SEQ ID NO: 1556402
uuuccacgaaguguucugg

SEQ ID NO: 1556404 - RNA, 19 nt, Artificial Sequence
  Description of Artificial Sequence: Synthetic oligonucleotide
  Sense strand starting at position 2118 of SEQ ID NO: 1245357
agaacacuucguggaaaca

SEQ ID NO: 1556405 - RNA, 19 nt, Artificial Sequence
  Description of Artificial Sequence: Synthetic oligonucleotide
  Antisense strand to SEQ ID NO: 1556404
uguuuccacgaaguguucu

SEQ ID NO: 1556406 - RNA, 19 nt, Artificial Sequence
  Description of Artificial Sequence: Synthetic oligonucleotide
  Sense strand starting at position 2348 of SEQ ID NO: 1245357
ucgcauuccuucgaucgua

SEQ ID NO: 1556407 - RNA, 19 nt, Artificial Sequence
  Description of Artificial Sequence: Synthetic oligonucleotide
  Antisense strand to SEQ ID NO: 1556406
uacgaucgaaggaaugcga

SEQ ID NO: 1556408 - RNA, 19 nt, Artificial Sequence
  Description of Artificial Sequence: Synthetic oligonucleotide
  Sense strand starting at position 2605 of SEQ ID NO: 1245357
gggugucggcggagacaau

SEQ ID NO: 1556409 - RNA, 19 nt, Artificial Sequence
  Description of Artificial Sequence: Synthetic oligonucleotide
  Antisense strand to SEQ ID NO: 1556408
auugucuccgccgacaccc

SEQ ID NO: 1556410 - RNA, 19 nt, Artificial Sequence
  Description of Artificial Sequence: Synthetic oligonucleotide
  Sense strand starting at position 2649 of SEQ ID NO: 1245357
cgcugagcguguuucuuga

SEQ ID NO: 1556411 - RNA, 19 nt, Artificial Sequence
  Description of Artificial Sequence: Synthetic oligonucleotide
  Antisense strand to SEQ ID NO: 1556410
ucaagaaacacgcucagcg

SEQ ID NO: 1556412 - RNA, 19 nt, Artificial Sequence
  Description of Artificial Sequence: Synthetic oligonucleotide
  Sense strand starting at position 2651 of SEQ ID NO: 1245357
cugagcguguuucuugaca

SEQ ID NO: 1556413 - RNA, 19 nt, Artificial Sequence
  Description of Artificial Sequence: Synthetic oligonucleotide
  Antisense strand to SEQ ID NO: 1556412
ugucaagaaacacgcucag

SEQ ID NO: 1556414 - RNA, 19 nt, Artificial Sequence
  Description of Artificial Sequence: Synthetic oligonucleotide
  Sense strand starting at position 2653 of SEQ ID NO: 1245357
gagcguguuucuugacaac

SEQ ID NO: 1556415 - RNA, 19 nt, Artificial Sequence
  Description of Artificial Sequence: Synthetic oligonucleotide
  Antisense strand to SEQ ID NO: 1556414
guugucaagaaacacgcuc

SEQ ID NO: 1556416 - RNA, 19 nt, Artificial Sequence
  Description of Artificial Sequence: Synthetic oligonucleotide
  Sense strand starting at position 2709 of SEQ ID NO: 1245357
ccucguguugugucuagca

SEQ ID NO: 1556417 - RNA, 19 nt, Artificial Sequence
  Description of Artificial Sequence: Synthetic oligonucleotide
  Antisense strand to SEQ ID NO: 1556416
ugcuagacacaacacgagg

SEQ ID NO: 1556418 - RNA, 19 nt, Artificial Sequence
  Description of Artificial Sequence: Synthetic oligonucleotide
  Sense strand starting at position 2712 of SEQ ID NO: 1245357
cguguugugucuagcagga

SEQ ID NO: 1556419 - RNA, 19 nt, Artificial Sequence
  Description of Artificial Sequence: Synthetic oligonucleotide
  Antisense strand to SEQ ID NO: 1556418
uccugcuagacacaacacg

SEQ ID NO: 1556420 - RNA, 19 nt, Artificial Sequence
  Description of Artificial Sequence: Synthetic oligonucleotide
  Sense strand starting at position 2714 of SEQ ID NO: 1245357
uguugugucuagcaggaaa

SEQ ID NO: 1556421 - RNA, 19 nt, Artificial Sequence
  Description of Artificial Sequence: Synthetic oligonucleotide
  Antisense strand to SEQ ID NO: 1556420
uuuccugcuagacacaaca

SEQ ID NO: 1556422 - RNA, 19 nt, Artificial Sequence
  Description of Artificial Sequence: Synthetic oligonucleotide
  Sense strand starting at position 3220 of SEQ ID NO: 1245357
cggcgcugucagagugaga

SEQ ID NO: 1556423 - RNA, 19 nt, Artificial Sequence
  Description of Artificial Sequence: Synthetic oligonucleotide
  Antisense strand to SEQ ID NO: 1556422
ucucacucugacagcgccg

SEQ ID NO: 1556424 - RNA, 19 nt, Artificial Sequence
  Description of Artificial Sequence: Synthetic oligonucleotide
  Sense strand starting at position 3222 of SEQ ID NO: 1245357
gcgcugucagagugagaga

SEQ ID NO: 1556425 - RNA, 19 nt, Artificial Sequence
  Description of Artificial Sequence: Synthetic oligonucleotide
  Antisense strand to SEQ ID NO: 1556424
ucucucacucugacagcgc

SEQ ID NO: 1556426 - RNA, 19 nt, Artificial Sequence
  Description of Artificial Sequence: Synthetic oligonucleotide
  Sense strand starting at position 3981 of SEQ ID NO: 1245357
acgcucacaugcucuuuaa

SEQ ID NO: 1556427 - RNA, 19 nt, Artificial Sequence
  Description of Artificial Sequence: Synthetic oligonucleotide
  Antisense strand to SEQ ID NO: 1556426
uuaaagagcaugugagcgu

SEQ ID NO: 1556428 - RNA, 19 nt, Artificial Sequence
  Description of Artificial Sequence: Synthetic oligonucleotide
  Sense strand starting at position 166 of SEQ ID NO: 1245358
ucacaugcucuuuaaacgu

SEQ ID NO: 1556429 - RNA, 19 nt, Artificial Sequence
  Description of Artificial Sequence: Synthetic oligonucleotide
  Antisense strand to SEQ ID NO: 1556428
acguuuaaagagcauguga

SEQ ID NO: 1556430 - RNA, 19 nt, Artificial Sequence
  Description of Artificial Sequence: Synthetic oligonucleotide
  Sense strand starting at position 543 of SEQ ID NO: 1245358
ugguuacguccuguuguuu

SEQ ID NO: 1556431 - RNA, 19 nt, Artificial Sequence
  Description of Artificial Sequence: Synthetic oligonucleotide
  Antisense strand to SEQ ID NO: 1556430
aaacaacaggacguaacca

SEQ ID NO: 1556432 - RNA, 19 nt, Artificial Sequence
  Description of Artificial Sequence: Synthetic oligonucleotide
  Sense strand starting at position 639 of SEQ ID NO: 1245358
cguaaauaagccuagcaga

SEQ ID NO: 1556433 - RNA, 19 nt, Artificial Sequence
  Description of Artificial Sequence: Synthetic oligonucleotide
  Antisense strand to SEQ ID NO: 1556432
ucugcuaggcuuauuuacg

SEQ ID NO: 1556434 - RNA, 19 nt, Artificial Sequence
  Description of Artificial Sequence: Synthetic oligonucleotide
  Sense strand starting at position 716 of SEQ ID NO: 1245358
gguggagaucccggcagaa

SEQ ID NO: 1556435 - RNA, 19 nt, Artificial Sequence
  Description of Artificial Sequence: Synthetic oligonucleotide
  Antisense strand to SEQ ID NO: 1556434
uucugccgggaucuccacc

SEQ ID NO: 1556436 - RNA, 19 nt, Artificial Sequence
  Description of Artificial Sequence: Synthetic oligonucleotide
  Sense strand starting at position 753 of SEQ ID NO: 1245358
gauuaaacccgaggaguac

SEQ ID NO: 1556437 - RNA, 19 nt, Artificial Sequence
  Description of Artificial Sequence: Synthetic oligonucleotide
  Antisense strand to SEQ ID NO: 1556436
guacuccucggguuuaauc

SEQ ID NO: 1556438 - RNA, 19 nt, Artificial Sequence
  Description of Artificial Sequence: Synthetic oligonucleotide
  Sense strand starting at position 783 of SEQ ID NO: 1245358
agggauaacuaacucgacu

SEQ ID NO: 1556439 - RNA, 19 nt, Artificial Sequence
  Description of Artificial Sequence: Synthetic oligonucleotide
  Antisense strand to SEQ ID NO: 1556438
agucgaguuaguuaucccu

SEQ ID NO: 1556440 - RNA, 19 nt, Artificial Sequence
  Description of Artificial Sequence: Synthetic oligonucleotide
  Sense strand starting at position 1017 of SEQ ID NO: 1245358
cugacugcucgggacagaa

SEQ ID NO: 1556441 - RNA, 19 nt, Artificial Sequence
  Description of Artificial Sequence: Synthetic oligonucleotide
  Antisense strand to SEQ ID NO: 1556440
uucugucccgagcagucag

SEQ ID NO: 1556442 - RNA, 19 nt, Artificial Sequence
  Description of Artificial Sequence: Synthetic oligonucleotide
  Sense strand starting at position 1233 of SEQ ID NO: 1245358
ccucgcuauuucguuugaa

SEQ ID NO: 1556443 - RNA, 19 nt, Artificial Sequence
  Description of Artificial Sequence: Synthetic oligonucleotide
  Antisense strand to SEQ ID NO: 1556442
uucaaacgaaauagcgagg

SEQ ID NO: 1556444 - RNA, 19 nt, Artificial Sequence
  Description of Artificial Sequence: Synthetic oligonucleotide
  Sense strand starting at position 1234 of SEQ ID NO: 1245358
cucgcuauuucguuugaag

SEQ ID NO: 1556445 - RNA, 19 nt, Artificial Sequence
  Description of Artificial Sequence: Synthetic oligonucleotide
  Antisense strand to SEQ ID NO: 1556444
cuucaaacgaaauagcgag

SEQ ID NO: 1556446 - RNA, 19 nt, Artificial Sequence
  Description of Artificial Sequence: Synthetic oligonucleotide
  Sense strand starting at position 1266 of SEQ ID NO: 1245358
ugggauugguggcuccuau

SEQ ID NO: 1556447 - RNA, 19 nt, Artificial Sequence
  Description of Artificial Sequence: Synthetic oligonucleotide
  Antisense strand to SEQ ID NO: 1556446
auaggagccaccaauccca

SEQ ID NO: 1556448 - RNA, 19 nt, Artificial Sequence
  Description of Artificial Sequence: Synthetic oligonucleotide
  Sense strand starting at position 1517 of SEQ ID NO: 1245358
cgcuuuagccagcucgaga

SEQ ID NO: 1556449 - RNA, 19 nt, Artificial Sequence
  Description of Artificial Sequence: Synthetic oligonucleotide
  Antisense strand to SEQ ID NO: 1556448
ucucgagcuggcuaaagcg

SEQ ID NO: 1556450 - RNA, 19 nt, Artificial Sequence
  Description of Artificial Sequence: Synthetic oligonucleotide
  Sense strand starting at position 1581 of SEQ ID NO: 1245358
ggcucucauuauguacaca

SEQ ID NO: 1556451 - RNA, 19 nt, Artificial Sequence
  Description of Artificial Sequence: Synthetic oligonucleotide
  Antisense strand to SEQ ID NO: 1556450
uguguacauaaugagagcc

SEQ ID NO: 1556452 - RNA, 19 nt, Artificial Sequence
  Description of Artificial Sequence: Synthetic oligonucleotide
  Sense strand starting at position 1619 of SEQ ID NO: 1245358
ccaaguggacuuggcuaau

SEQ ID NO: 1556453 - RNA, 19 nt, Artificial Sequence
  Description of Artificial Sequence: Synthetic oligonucleotide
  Antisense strand to SEQ ID NO: 1556452
auuagccaaguccacuugg

SEQ ID NO: 1556454 - RNA, 19 nt, Artificial Sequence
  Description of Artificial Sequence: Synthetic oligonucleotide
  Sense strand starting at position 1681 of SEQ ID NO: 1245358
aaggguuuauagcuugaaa

SEQ ID NO: 1556455 - RNA, 19 nt, Artificial Sequence
  Description of Artificial Sequence: Synthetic oligonucleotide
  Antisense strand to SEQ ID NO: 1556454
uuucaagcuauaaacccuu

SEQ ID NO: 1556456 - RNA, 19 nt, Artificial Sequence
  Description of Artificial Sequence: Synthetic oligonucleotide
  Sense strand starting at position 1738 of SEQ ID NO: 1245358
uugaaagccucuuucgaau

SEQ ID NO: 1556457 - RNA, 19 nt, Artificial Sequence
  Description of Artificial Sequence: Synthetic oligonucleotide
  Antisense strand to SEQ ID NO: 1556456
auucgaaagaggcuuucaa

SEQ ID NO: 1556458 - RNA, 19 nt, Artificial Sequence
  Description of Artificial Sequence: Synthetic oligonucleotide
  Sense strand starting at position 1786 of SEQ ID NO: 1245358
ucaccuuggcuagaaguca

SEQ ID NO: 1556459 - RNA, 19 nt, Artificial Sequence
  Description of Artificial Sequence: Synthetic oligonucleotide
  Antisense strand to SEQ ID NO: 1556458
ugacuucuagccaagguga

SEQ ID NO: 1556460 - RNA, 19 nt, Artificial Sequence
  Description of Artificial Sequence: Synthetic oligonucleotide
  Sense strand starting at position 2009 of SEQ ID NO: 1245358
uggugcauucugggaagaa

SEQ ID NO: 1556461 - RNA, 19 nt, Artificial Sequence
  Description of Artificial Sequence: Synthetic oligonucleotide
  Antisense strand to SEQ ID NO: 1556460
uucuucccagaaugcacca

SEQ ID NO: 1556462 - RNA, 19 nt, Artificial Sequence
  Description of Artificial Sequence: Synthetic oligonucleotide
  Sense strand starting at position 2089 of SEQ ID NO: 1245358
ccagcaauugcuuagggua

SEQ ID NO: 1556463 - RNA, 19 nt, Artificial Sequence
  Description of Artificial Sequence: Synthetic oligonucleotide
  Antisense strand to SEQ ID NO: 1556462
uacccuaagcaauugcugg

SEQ ID NO: 1556464 - RNA, 19 nt, Artificial Sequence
  Description of Artificial Sequence: Synthetic oligonucleotide
  Sense strand starting at position 2298 of SEQ ID NO: 1245358
uguuacuugaauugggaaa

SEQ ID NO: 1556465 - RNA, 19 nt, Artificial Sequence
  Description of Artificial Sequence: Synthetic oligonucleotide
  Antisense strand to SEQ ID NO: 1556464
uuucccaauucaaguaaca

SEQ ID NO: 1556466 - RNA, 19 nt, Artificial Sequence
  Description of Artificial Sequence: Synthetic oligonucleotide
  Sense strand starting at position 2299 of SEQ ID NO: 1245358
guuacuugaauugggaaau

SEQ ID NO: 1556467 - RNA, 19 nt, Artificial Sequence
  Description of Artificial Sequence: Synthetic oligonucleotide
  Antisense strand to SEQ ID NO: 1556466
auuucccaauucaaguaac

SEQ ID NO: 1556468 - RNA, 19 nt, Artificial Sequence
  Description of Artificial Sequence: Synthetic oligonucleotide
  Sense strand starting at position 2309 of SEQ ID NO: 1245358
uugggaaauugcuugagua

SEQ ID NO: 1556469 - RNA, 19 nt, Artificial Sequence
  Description of Artificial Sequence: Synthetic oligonucleotide
  Antisense strand to SEQ ID NO: 1556468
uacucaagcaauuucccaa

SEQ ID NO: 1556470 - RNA, 19 nt, Artificial Sequence
  Description of Artificial Sequence: Synthetic oligonucleotide
  Sense strand starting at position 2310 of SEQ ID NO: 1245358
ugggaaauugcuugaguaa

SEQ ID NO: 1556471 - RNA, 19 nt, Artificial Sequence
  Description of Artificial Sequence: Synthetic oligonucleotide
  Antisense strand to SEQ ID NO: 1556470
uuacucaagcaauuuccca

SEQ ID NO: 1556472 - RNA, 19 nt, Artificial Sequence
  Description of Artificial Sequence: Synthetic oligonucleotide
  Sense strand starting at position 2620 of SEQ ID NO: 1245358
ggauguauuuguuucuucu

SEQ ID NO: 1556473 - RNA, 19 nt, Artificial Sequence
  Description of Artificial Sequence: Synthetic oligonucleotide
  Antisense strand to SEQ ID NO: 1556472
agaagaaacaaauacaucc

SEQ ID NO: 1556474 - RNA, 19 nt, Artificial Sequence
  Description of Artificial Sequence: Synthetic oligonucleotide
  Sense strand starting at position 2623 of SEQ ID NO: 1245358
uguauuuguuucuucuacu

SEQ ID NO: 1556475 - RNA, 19 nt, Artificial Sequence
  Description of Artificial Sequence: Synthetic oligonucleotide
  Antisense strand to SEQ ID NO: 1556474
aguagaagaaacaaauaca

SEQ ID NO: 1556476 - RNA, 19 nt, Artificial Sequence
  Description of Artificial Sequence: Synthetic oligonucleotide
  Sense strand starting at position 2624 of SEQ ID NO: 1245358
guauuuguuucuucuacuc

SEQ ID NO: 1556477 - RNA, 19 nt, Artificial Sequence
  Description of Artificial Sequence: Synthetic oligonucleotide
  Antisense strand to SEQ ID NO: 1556476
gaguagaagaaacaaauac

SEQ ID NO: 1556478 - RNA, 19 nt, Artificial Sequence
  Description of Artificial Sequence: Synthetic oligonucleotide
  Sense strand starting at position 2653 of SEQ ID NO: 1245358
gauaaagcaugaguuccau

SEQ ID NO: 1556479 - RNA, 19 nt, Artificial Sequence
  Description of Artificial Sequence: Synthetic oligonucleotide
  Antisense strand to SEQ ID NO: 1556478
auggaacucaugcuuuauc

SEQ ID NO: 1556480 - RNA, 19 nt, Artificial Sequence
  Description of Artificial Sequence: Synthetic oligonucleotide
  Sense strand starting at position 2669 of SEQ ID NO: 1245358
caucaaggacuguguucua

SEQ ID NO: 1556481 - RNA, 19 nt, Artificial Sequence
  Description of Artificial Sequence: Synthetic oligonucleotide
  Antisense strand to SEQ ID NO: 1556480
uagaacacaguccuugaug

SEQ ID NO: 1556482 - RNA, 19 nt, Artificial Sequence
  Description of Artificial Sequence: Synthetic oligonucleotide
  Sense strand starting at position 2678 of SEQ ID NO: 1245358
cuguguucuagguggagaa

SEQ ID NO: 1556483 - RNA, 19 nt, Artificial Sequence
  Description of Artificial Sequence: Synthetic oligonucleotide
  Antisense strand to SEQ ID NO: 1556482
uucuccaccuagaacacag

SEQ ID NO: 1556484 - RNA, 19 nt, Artificial Sequence
  Description of Artificial Sequence: Synthetic oligonucleotide
  Sense strand starting at position 2679 of SEQ ID NO: 1245358
uguguucuagguggagaaa

SEQ ID NO: 1556485 - RNA, 19 nt, Artificial Sequence
  Description of Artificial Sequence: Synthetic oligonucleotide
  Antisense strand to SEQ ID NO: 1556484
uuucuccaccuagaacaca

SEQ ID NO: 1556486 - RNA, 19 nt, Artificial Sequence
  Description of Artificial Sequence: Synthetic oligonucleotide
  Sense strand starting at position 2698 of SEQ ID NO: 1245358
gggugacucacccagucau

SEQ ID NO: 1556487 - RNA, 19 nt, Artificial Sequence
  Description of Artificial Sequence: Synthetic oligonucleotide
  Antisense strand to SEQ ID NO: 1556486
augacugggugagucaccc

SEQ ID NO: 1556488 - RNA, 19 nt, Artificial Sequence
  Description of Artificial Sequence: Synthetic oligonucleotide
  Sense strand starting at position 2779 of SEQ ID NO: 1245358
ggcucuaaacacuggacaa

SEQ ID NO: 1556489 - RNA, 19 nt, Artificial Sequence
  Description of Artificial Sequence: Synthetic oligonucleotide
  Antisense strand to SEQ ID NO: 1556488
uuguccaguguuuagagcc

SEQ ID NO: 1556490 - RNA, 19 nt, Artificial Sequence
  Description of Artificial Sequence: Synthetic oligonucleotide
  Sense strand starting at position 2792 of SEQ ID NO: 1245358
ggacaagaggucuguaauc

SEQ ID NO: 1556491 - RNA, 19 nt, Artificial Sequence
  Description of Artificial Sequence: Synthetic oligonucleotide
  Antisense strand to SEQ ID NO: 1556490
gauuacagaccucuugucc

SEQ ID NO: 1556492 - RNA, 19 nt, Artificial Sequence
  Description of Artificial Sequence: Synthetic oligonucleotide
  Sense strand starting at position 2797 of SEQ ID NO: 1245358
agaggucuguaaucaucca

SEQ ID NO: 1556493 - RNA, 19 nt, Artificial Sequence
  Description of Artificial Sequence: Synthetic oligonucleotide
  Antisense strand to SEQ ID NO: 1556492
uggaugauuacagaccucu

SEQ ID NO: 1556494 - RNA, 19 nt, Artificial Sequence
  Description of Artificial Sequence: Synthetic oligonucleotide
  Sense strand starting at position 2833 of SEQ ID NO: 1245358
agggucuuggacugcuuaa

SEQ ID NO: 1556495 - RNA, 19 nt, Artificial Sequence
  Description of Artificial Sequence: Synthetic oligonucleotide
  Antisense strand to SEQ ID NO: 1556494
uuaagcaguccaagacccu

SEQ ID NO: 1556496 - RNA, 19 nt, Artificial Sequence
  Description of Artificial Sequence: Synthetic oligonucleotide
  Sense strand starting at position 2855 of SEQ ID NO: 1245358
agagcugaccauugucuua

SEQ ID NO: 1556497 - RNA, 19 nt, Artificial Sequence
  Description of Artificial Sequence: Synthetic oligonucleotide
  Antisense strand to SEQ ID NO: 1556496
uaagacaauggucagcucu

SEQ ID NO: 1556498 - RNA, 19 nt, Artificial Sequence
  Description of Artificial Sequence: Synthetic oligonucleotide
  Sense strand starting at position 2858 of SEQ ID NO: 1245358
gcugaccauugucuuaaga

SEQ ID NO: 1556499 - RNA, 19 nt, Artificial Sequence
  Description of Artificial Sequence: Synthetic oligonucleotide
  Antisense strand to SEQ ID NO: 1556498
ucuuaagacaauggucagc

SEQ ID NO: 1556500 - RNA, 19 nt, Artificial Sequence
  Description of Artificial Sequence: Synthetic oligonucleotide
  Sense strand starting at position 2926 of SEQ ID NO: 1245358
ggauaauucuccucagcuu

SEQ ID NO: 1556501 - RNA, 19 nt, Artificial Sequence
  Description of Artificial Sequence: Synthetic oligonucleotide
  Antisense strand to SEQ ID NO: 1556500
aagcugaggagaauuaucc

SEQ ID NO: 1556502 - RNA, 19 nt, Artificial Sequence
  Description of Artificial Sequence: Synthetic oligonucleotide
  Sense strand starting at position 2941 of SEQ ID NO: 1245358
gcuuccuugcaugaauagu

SEQ ID NO: 1556503 - RNA, 19 nt, Artificial Sequence
  Description of Artificial Sequence: Synthetic oligonucleotide
  Antisense strand to SEQ ID NO: 1556502
acuauucaugcaaggaagc

SEQ ID NO: 1556504 - RNA, 19 nt, Artificial Sequence
  Description of Artificial Sequence: Synthetic oligonucleotide
  Sense strand starting at position 3460 of SEQ ID NO: 1245358
ucuguauuauucuuuacag

SEQ ID NO: 1556505 - RNA, 19 nt, Artificial Sequence
  Description of Artificial Sequence: Synthetic oligonucleotide
  Antisense strand to SEQ ID NO: 1556504
cuguaaagaauaauacaga

SEQ ID NO: 1556506 - RNA, 19 nt, Artificial Sequence
  Description of Artificial Sequence: Synthetic oligonucleotide
  Sense strand starting at position 3629 of SEQ ID NO: 1245358
ucaaguggucucugggaaa

SEQ ID NO: 1556507 - RNA, 19 nt, Artificial Sequence
  Description of Artificial Sequence: Synthetic oligonucleotide
  Antisense strand to SEQ ID NO: 1556506
uuucccagagaccacuuga

SEQ ID NO: 1556508 - RNA, 19 nt, Artificial Sequence
  Description of Artificial Sequence: Synthetic oligonucleotide
  Sense strand starting at position 234 of SEQ ID NO: 1245359
ccaguuugagcucaaccua

SEQ ID NO: 1556509 - RNA, 19 nt, Artificial Sequence
  Description of Artificial Sequence: Synthetic oligonucleotide
  Antisense strand to SEQ ID NO: 1556508
uagguugagcucaaacugg

SEQ ID NO: 1556510 - RNA, 19 nt, Artificial Sequence
  Description of Artificial Sequence: Synthetic oligonucleotide
  Sense strand starting at position 286 of SEQ ID NO: 1245359
agucuuaaaugauuacaug

SEQ ID NO: 1556511 - RNA, 19 nt, Artificial Sequence
  Description of Artificial Sequence: Synthetic oligonucleotide
  Antisense strand to SEQ ID NO: 1556510
cauguaaucauuuaagacu

SEQ ID NO: 1556512 - RNA, 19 nt, Artificial Sequence
  Description of Artificial Sequence: Synthetic oligonucleotide
  Sense strand starting at position 294 of SEQ ID NO: 1245359
augauuacaugacaaagga

SEQ ID NO: 1556513 - RNA, 19 nt, Artificial Sequence
  Description of Artificial Sequence: Synthetic oligonucleotide
  Antisense strand to SEQ ID NO: 1556512
uccuuugucauguaaucau

SEQ ID NO: 1556514 - RNA, 19 nt, Artificial Sequence
  Description of Artificial Sequence: Synthetic oligonucleotide
  Sense strand starting at position 347 of SEQ ID NO: 1245359
ggcuguaaguacuuuaauc

SEQ ID NO: 1556515 - RNA, 19 nt, Artificial Sequence
  Description of Artificial Sequence: Synthetic oligonucleotide
  Antisense strand to SEQ ID NO: 1556514
gauuaaaguacuuacagcc

SEQ ID NO: 1556516 - RNA, 19 nt, Artificial Sequence
  Description of Artificial Sequence: Synthetic oligonucleotide
  Sense strand starting at position 349 of SEQ ID NO: 1245359
cuguaaguacuuuaauccu

SEQ ID NO: 1556517 - RNA, 19 nt, Artificial Sequence
  Description of Artificial Sequence: Synthetic oligonucleotide
  Antisense strand to SEQ ID NO: 1556516
aggauuaaaguacuuacag

SEQ ID NO: 1556518 - RNA, 19 nt, Artificial Sequence
  Description of Artificial Sequence: Synthetic oligonucleotide
  Sense strand starting at position 535 of SEQ ID NO: 1245359
ggcuacuccgaaugacuaa

SEQ ID NO: 1556519 - RNA, 19 nt, Artificial Sequence
  Description of Artificial Sequence: Synthetic oligonucleotide
  Antisense strand to SEQ ID NO: 1556518
uuagucauucggaguagcc

SEQ ID NO: 1556520 - RNA, 19 nt, Artificial Sequence
  Description of Artificial Sequence: Synthetic oligonucleotide
  Sense strand starting at position 753 of SEQ ID NO: 1245359
gaccuuaauugagccaguu

SEQ ID NO: 1556521 - RNA, 19 nt, Artificial Sequence
  Description of Artificial Sequence: Synthetic oligonucleotide
  Antisense strand to SEQ ID NO: 1556520
aacuggcucaauuaagguc

SEQ ID NO: 1556522 - RNA, 19 nt, Artificial Sequence
  Description of Artificial Sequence: Synthetic oligonucleotide
  Sense strand starting at position 792 of SEQ ID NO: 1245359
acggaauauuccucuuaag

SEQ ID NO: 1556523 - RNA, 19 nt, Artificial Sequence
  Description of Artificial Sequence: Synthetic oligonucleotide
  Antisense strand to SEQ ID NO: 1556522
cuuaagaggaauauuccgu

SEQ ID NO: 1556524 - RNA, 19 nt, Artificial Sequence
  Description of Artificial Sequence: Synthetic oligonucleotide
  Sense strand starting at position 854 of SEQ ID NO: 1245359
ugacucugacuuggugaca

SEQ ID NO: 1556525 - RNA, 19 nt, Artificial Sequence
  Description of Artificial Sequence: Synthetic oligonucleotide
  Antisense strand to SEQ ID NO: 1556524
ugucaccaagucagaguca

SEQ ID NO: 1556526 - RNA, 19 nt, Artificial Sequence
  Description of Artificial Sequence: Synthetic oligonucleotide
  Sense strand starting at position 857 of SEQ ID NO: 1245359
cucugacuuggugacacau

SEQ ID NO: 1556527 - RNA, 19 nt, Artificial Sequence
  Description of Artificial Sequence: Synthetic oligonucleotide
  Antisense strand to SEQ ID NO: 1556526
augugucaccaagucagag

SEQ ID NO: 1556528 - RNA, 19 nt, Artificial Sequence
  Description of Artificial Sequence: Synthetic oligonucleotide
  Sense strand starting at position 859 of SEQ ID NO: 1245359
cugacuuggugacacauuu

SEQ ID NO: 1556529 - RNA, 19 nt, Artificial Sequence
  Description of Artificial Sequence: Synthetic oligonucleotide
  Antisense strand to SEQ ID NO: 1556528
aaaugugucaccaagucag

SEQ ID NO: 1556530 - RNA, 19 nt, Artificial Sequence
  Description of Artificial Sequence: Synthetic oligonucleotide
  Sense strand starting at position 1171 of SEQ ID NO: 1245359
uauugaaauuugggugaag

SEQ ID NO: 1556531 - RNA, 19 nt, Artificial Sequence
  Description of Artificial Sequence: Synthetic oligonucleotide
  Antisense strand to SEQ ID NO: 1556530
cuucacccaaauuucaaua

SEQ ID NO: 1556532 - RNA, 19 nt, Artificial Sequence
  Description of Artificial Sequence: Synthetic oligonucleotide
  Sense strand starting at position 1211 of SEQ ID NO: 1245359
aagaaauuauagcugaguu

SEQ ID NO: 1556533 - RNA, 19 nt, Artificial Sequence
  Description of Artificial Sequence: Synthetic oligonucleotide
  Antisense strand to SEQ ID NO: 1556532
aacucagcuauaauuucuu

SEQ ID NO: 1556534 - RNA, 19 nt, Artificial Sequence
  Description of Artificial Sequence: Synthetic oligonucleotide
  Sense strand starting at position 1223 of SEQ ID NO: 1245359
cugaguuccugucucacau

SEQ ID NO: 1556535 - RNA, 19 nt, Artificial Sequence
  Description of Artificial Sequence: Synthetic oligonucleotide
  Antisense strand to SEQ ID NO: 1556534
augugagacaggaacucag

SEQ ID NO: 1556536 - RNA, 19 nt, Artificial Sequence
  Description of Artificial Sequence: Synthetic oligonucleotide
  Sense strand starting at position 1233 of SEQ ID NO: 1245359
gucucacauuggcuuuaau

SEQ ID NO: 1556537 - RNA, 19 nt, Artificial Sequence
  Description of Artificial Sequence: Synthetic oligonucleotide
  Antisense strand to SEQ ID NO: 1556536
auuaaagccaaugugagac

SEQ ID NO: 1556538 - RNA, 19 nt, Artificial Sequence
  Description of Artificial Sequence: Synthetic oligonucleotide
  Sense strand starting at position 1352 of SEQ ID NO: 1245359
gccagacauucuucucaag

SEQ ID NO: 1556539 - RNA, 19 nt, Artificial Sequence
  Description of Artificial Sequence: Synthetic oligonucleotide
  Antisense strand to SEQ ID NO: 1556538
cuugagaagaaugucuggc

SEQ ID NO: 1556540 - RNA, 19 nt, Artificial Sequence
  Description of Artificial Sequence: Synthetic oligonucleotide
  Sense strand starting at position 1419 of SEQ ID NO: 1245359
cucauugaacagugaauuc

SEQ ID NO: 1556541 - RNA, 19 nt, Artificial Sequence
  Description of Artificial Sequence: Synthetic oligonucleotide
  Antisense strand to SEQ ID NO: 1556540
gaauucacuguucaaugag

SEQ ID NO: 1556542 - RNA, 19 nt, Artificial Sequence
  Description of Artificial Sequence: Synthetic oligonucleotide
  Sense strand starting at position 1440 of SEQ ID NO: 1245359
aacuguaaguugguaauca

SEQ ID NO: 1556543 - RNA, 19 nt, Artificial Sequence
  Description of Artificial Sequence: Synthetic oligonucleotide
  Antisense strand to SEQ ID NO: 1556542
ugauuaccaacuuacaguu

SEQ ID NO: 1556544 - RNA, 19 nt, Artificial Sequence
  Description of Artificial Sequence: Synthetic oligonucleotide
  Sense strand starting at position 1444 of SEQ ID NO: 1245359
guaaguugguaaucacaaa

SEQ ID NO: 1556545 - RNA, 19 nt, Artificial Sequence
  Description of Artificial Sequence: Synthetic oligonucleotide
  Antisense strand to SEQ ID NO: 1556544
uuugugauuaccaacuuac

SEQ ID NO: 1556546 - RNA, 19 nt, Artificial Sequence
  Description of Artificial Sequence: Synthetic oligonucleotide
  Sense strand starting at position 1518 of SEQ ID NO: 1245359
ugacaagaagccugaucuu

SEQ ID NO: 1556547 - RNA, 19 nt, Artificial Sequence
  Description of Artificial Sequence: Synthetic oligonucleotide
  Antisense strand to SEQ ID NO: 1556546
aagaucaggcuucuuguca

SEQ ID NO: 1556548 - RNA, 19 nt, Artificial Sequence
  Description of Artificial Sequence: Synthetic oligonucleotide
  Sense strand starting at position 1634 of SEQ ID NO: 1245359
augccagaccucuggaacu

SEQ ID NO: 1556549 - RNA, 19 nt, Artificial Sequence
  Description of Artificial Sequence: Synthetic oligonucleotide
  Antisense strand to SEQ ID NO: 1556548
aguuccagaggucuggcau

SEQ ID NO: 1556550 - RNA, 19 nt, Artificial Sequence
  Description of Artificial Sequence: Synthetic oligonucleotide
  Sense strand starting at position 1873 of SEQ ID NO: 1245359
aaguuucccgguuaagacu

SEQ ID NO: 1556551 - RNA, 19 nt, Artificial Sequence
  Description of Artificial Sequence: Synthetic oligonucleotide
  Antisense strand to SEQ ID NO: 1556550
agucuuaaccgggaaacuu

SEQ ID NO: 1556552 - RNA, 19 nt, Artificial Sequence
  Description of Artificial Sequence: Synthetic oligonucleotide
  Sense strand starting at position 1882 of SEQ ID NO: 1245359
gguuaagacuuguuuccaa

SEQ ID NO: 1556553 - RNA, 19 nt, Artificial Sequence
  Description of Artificial Sequence: Synthetic oligonucleotide
  Antisense strand to SEQ ID NO: 1556552
uuggaaacaagucuuaacc

SEQ ID NO: 1556554 - RNA, 19 nt, Artificial Sequence
  Description of Artificial Sequence: Synthetic oligonucleotide
  Sense strand starting at position 2383 of SEQ ID NO: 1245359
uucugaauagcucgguaac

SEQ ID NO: 1556555 - RNA, 19 nt, Artificial Sequence
  Description of Artificial Sequence: Synthetic oligonucleotide
  Antisense strand to SEQ ID NO: 1556554
guuaccgagcuauucagaa

SEQ ID NO: 1556556 - RNA, 19 nt, Artificial Sequence
  Description of Artificial Sequence: Synthetic oligonucleotide
  Sense strand starting at position 2384 of SEQ ID NO: 1245359
ucugaauagcucgguaaca

SEQ ID NO: 1556557 - RNA, 19 nt, Artificial Sequence
  Description of Artificial Sequence: Synthetic oligonucleotide
  Antisense strand to SEQ ID NO: 1556556
uguuaccgagcuauucaga

SEQ ID NO: 1556558 - RNA, 19 nt, Artificial Sequence
  Description of Artificial Sequence: Synthetic oligonucleotide
  Sense strand starting at position 2385 of SEQ ID NO: 1245359
cugaauagcucgguaacau

SEQ ID NO: 1556559 - RNA, 19 nt, Artificial Sequence
  Description of Artificial Sequence: Synthetic oligonucleotide
  Antisense strand to SEQ ID NO: 1556558
auguuaccgagcuauucag

SEQ ID NO: 1556560 - RNA, 19 nt, Artificial Sequence
  Description of Artificial Sequence: Synthetic oligonucleotide
  Sense strand starting at position 2386 of SEQ ID NO: 1245359
ugaauagcucgguaacauc

SEQ ID NO: 1556561 - RNA, 19 nt, Artificial Sequence
  Description of Artificial Sequence: Synthetic oligonucleotide
  Antisense strand to SEQ ID NO: 1556560
gauguuaccgagcuauuca

SEQ ID NO: 1556562 - RNA, 19 nt, Artificial Sequence
  Description of Artificial Sequence: Synthetic oligonucleotide
  Sense strand starting at position 2450 of SEQ ID NO: 1245359
aaauaagauugaugggaaa

SEQ ID NO: 1556563 - RNA, 19 nt, Artificial Sequence
  Description of Artificial Sequence: Synthetic oligonucleotide
  Antisense strand to SEQ ID NO: 1556562
uuucccaucaaucuuauuu

SEQ ID NO: 1556564 - RNA, 19 nt, Artificial Sequence
  Description of Artificial Sequence: Synthetic oligonucleotide
  Sense strand starting at position 2509 of SEQ ID NO: 1245359
caaguuuccugaccagaag

SEQ ID NO: 1556565 - RNA, 19 nt, Artificial Sequence
  Description of Artificial Sequence: Synthetic oligonucleotide
  Antisense strand to SEQ ID NO: 1556564
cuucuggucaggaaacuug

SEQ ID NO: 1556566 - RNA, 19 nt, Artificial Sequence
  Description of Artificial Sequence: Synthetic oligonucleotide
  Sense strand starting at position 2510 of SEQ ID NO: 1245359
aaguuuccugaccagaagu

SEQ ID NO: 1556567 - RNA, 19 nt, Artificial Sequence
  Description of Artificial Sequence: Synthetic oligonucleotide
  Antisense strand to SEQ ID NO: 1556566
acuucuggucaggaaacuu

SEQ ID NO: 1556568 - RNA, 19 nt, Artificial Sequence
  Description of Artificial Sequence: Synthetic oligonucleotide
  Sense strand starting at position 2520 of SEQ ID NO: 1245359
accagaaguucuccuuuga

SEQ ID NO: 1556569 - RNA, 19 nt, Artificial Sequence
  Description of Artificial Sequence: Synthetic oligonucleotide
  Antisense strand to SEQ ID NO: 1556568
ucaaaggagaacuucuggu

SEQ ID NO: 1556570 - RNA, 19 nt, Artificial Sequence
  Description of Artificial Sequence: Synthetic oligonucleotide
  Sense strand starting at position 2524 of SEQ ID NO: 1245359
gaaguucuccuuugagcug

SEQ ID NO: 1556571 - RNA, 19 nt, Artificial Sequence
  Description of Artificial Sequence: Synthetic oligonucleotide
  Antisense strand to SEQ ID NO: 1556570
cagcucaaaggagaacuuc

SEQ ID NO: 1556572 - RNA, 19 nt, Artificial Sequence
  Description of Artificial Sequence: Synthetic oligonucleotide
  Sense strand starting at position 2645 of SEQ ID NO: 1245359
cccggucuccaggaacaaa

SEQ ID NO: 1556573 - RNA, 19 nt, Artificial Sequence
  Description of Artificial Sequence: Synthetic oligonucleotide
  Antisense strand to SEQ ID NO: 1556572
uuuguuccuggagaccggg

SEQ ID NO: 1556574 - RNA, 19 nt, Artificial Sequence
  Description of Artificial Sequence: Synthetic oligonucleotide
  Sense strand starting at position 2676 of SEQ ID NO: 1245359
ucaguaucuccuugggaga

SEQ ID NO: 1556575 - RNA, 19 nt, Artificial Sequence
  Description of Artificial Sequence: Synthetic oligonucleotide
  Antisense strand to SEQ ID NO: 1556574
ucucccaaggagauacuga

SEQ ID NO: 1556576 - RNA, 19 nt, Artificial Sequence
  Description of Artificial Sequence: Synthetic oligonucleotide
  Sense strand starting at position 2677 of SEQ ID NO: 1245359
caguaucuccuugggagaa

SEQ ID NO: 1556577 - RNA, 19 nt, Artificial Sequence
  Description of Artificial Sequence: Synthetic oligonucleotide
  Antisense strand to SEQ ID NO: 1556576
uucucccaaggagauacug

SEQ ID NO: 1556578 - RNA, 19 nt, Artificial Sequence
  Description of Artificial Sequence: Synthetic oligonucleotide
  Sense strand starting at position 3012 of SEQ ID NO: 1245359
gcccgacuuccucaggagu

SEQ ID NO: 1556579 - RNA, 19 nt, Artificial Sequence
  Description of Artificial Sequence: Synthetic oligonucleotide
  Antisense strand to SEQ ID NO: 1556578
acuccugaggaagucgggc

SEQ ID NO: 1556580 - RNA, 19 nt, Artificial Sequence
  Description of Artificial Sequence: Synthetic oligonucleotide
  Sense strand starting at position 3015 of SEQ ID NO: 1245359
cgacuuccucaggagucuu

SEQ ID NO: 1556581 - RNA, 19 nt, Artificial Sequence
  Description of Artificial Sequence: Synthetic oligonucleotide
  Antisense strand to SEQ ID NO: 1556580
aagacuccugaggaagucg

SEQ ID NO: 1556582 - RNA, 19 nt, Artificial Sequence
  Description of Artificial Sequence: Synthetic oligonucleotide
  Sense strand starting at position 3026 of SEQ ID NO: 1245359
ggagucuuuccagagccga

SEQ ID NO: 1556583 - RNA, 19 nt, Artificial Sequence
  Description of Artificial Sequence: Synthetic oligonucleotide
  Antisense strand to SEQ ID NO: 1556582
ucggcucuggaaagacucc

SEQ ID NO: 1556584 - RNA, 19 nt, Artificial Sequence
  Description of Artificial Sequence: Synthetic oligonucleotide
  Sense strand starting at position 3147 of SEQ ID NO: 1245359
gagaguuccucggccucaa

SEQ ID NO: 1556585 - RNA, 19 nt, Artificial Sequence
  Description of Artificial Sequence: Synthetic oligonucleotide
  Antisense strand to SEQ ID NO: 1556584
uugaggccgaggaacucuc

SEQ ID NO: 1556586 - RNA, 19 nt, Artificial Sequence
  Description of Artificial Sequence: Synthetic oligonucleotide
  Sense strand starting at position 3233 of SEQ ID NO: 1245359
uagaaaugaggccgugaau

SEQ ID NO: 1556587 - RNA, 19 nt, Artificial Sequence
  Description of Artificial Sequence: Synthetic oligonucleotide
  Antisense strand to SEQ ID NO: 1556586
auucacggccucauuucua

SEQ ID NO: 1556588 - RNA, 19 nt, Artificial Sequence
  Description of Artificial Sequence: Synthetic oligonucleotide
  Sense strand starting at position 27 of SEQ ID NO: 1245360
uuggcaacugcucaauacu

SEQ ID NO: 1556589 - RNA, 19 nt, Artificial Sequence
  Description of Artificial Sequence: Synthetic oligonucleotide
  Antisense strand to SEQ ID NO: 1556588
aguauugagcaguugccaa

SEQ ID NO: 1556590 - RNA, 19 nt, Artificial Sequence
  Description of Artificial Sequence: Synthetic oligonucleotide
  Sense strand starting at position 123 of SEQ ID NO: 1245360
uucccuugacgauauaucu

SEQ ID NO: 1556591 - RNA, 19 nt, Artificial Sequence
  Description of Artificial Sequence: Synthetic oligonucleotide
  Antisense strand to SEQ ID NO: 1556590
agauauaucgucaagggaa

SEQ ID NO: 1556592 - RNA, 19 nt, Artificial Sequence
  Description of Artificial Sequence: Synthetic oligonucleotide
  Sense strand starting at position 386 of SEQ ID NO: 1245360
acuagacucuaugaagaga

SEQ ID NO: 1556593 - RNA, 19 nt, Artificial Sequence
  Description of Artificial Sequence: Synthetic oligonucleotide
  Antisense strand to SEQ ID NO: 1556592
ucucuucauagagucuagu

SEQ ID NO: 1556594 - RNA, 19 nt, Artificial Sequence
  Description of Artificial Sequence: Synthetic oligonucleotide
  Sense strand starting at position 569 of SEQ ID NO: 1245360
cuggauuaaugaguggcaa

SEQ ID NO: 1556595 - RNA, 19 nt, Artificial Sequence
  Description of Artificial Sequence: Synthetic oligonucleotide
  Antisense strand to SEQ ID NO: 1556594
uugccacucauuaauccag

SEQ ID NO: 1556596 - RNA, 19 nt, Artificial Sequence
  Description of Artificial Sequence: Synthetic oligonucleotide
  Sense strand starting at position 570 of SEQ ID NO: 1245360
uggauuaaugaguggcaaa

SEQ ID NO: 1556597 - RNA, 19 nt, Artificial Sequence
  Description of Artificial Sequence: Synthetic oligonucleotide
  Antisense strand to SEQ ID NO: 1556596
uuugccacucauuaaucca

SEQ ID NO: 1556598 - RNA, 19 nt, Artificial Sequence
  Description of Artificial Sequence: Synthetic oligonucleotide
  Sense strand starting at position 571 of SEQ ID NO: 1245360
ggauuaaugaguggcaaau

SEQ ID NO: 1556599 - RNA, 19 nt, Artificial Sequence
  Description of Artificial Sequence: Synthetic oligonucleotide
  Antisense strand to SEQ ID NO: 1556598
auuugccacucauuaaucc

SEQ ID NO: 1556600 - RNA, 19 nt, Artificial Sequence
  Description of Artificial Sequence: Synthetic oligonucleotide
  Sense strand starting at position 577 of SEQ ID NO: 1245360
augaguggcaaaugagaua

SEQ ID NO: 1556601 - RNA, 19 nt, Artificial Sequence
  Description of Artificial Sequence: Synthetic oligonucleotide
  Antisense strand to SEQ ID NO: 1556600
uaucucauuugccacucau

SEQ ID NO: 1556602 - RNA, 19 nt, Artificial Sequence
  Description of Artificial Sequence: Synthetic oligonucleotide
  Sense strand starting at position 591 of SEQ ID NO: 1245360
agauaaugguaguuagcaa

SEQ ID NO: 1556603 - RNA, 19 nt, Artificial Sequence
  Description of Artificial Sequence: Synthetic oligonucleotide
  Antisense strand to SEQ ID NO: 1556602
uugcuaacuaccauuaucu

SEQ ID NO: 1556604 - RNA, 19 nt, Artificial Sequence
  Description of Artificial Sequence: Synthetic oligonucleotide
  Sense strand starting at position 602 of SEQ ID NO: 1245360
guuagcaaacuuuauugua

SEQ ID NO: 1556605 - RNA, 19 nt, Artificial Sequence
  Description of Artificial Sequence: Synthetic oligonucleotide
  Antisense strand to SEQ ID NO: 1556604
uacaauaaaguuugcuaac

SEQ ID NO: 1556606 - RNA, 19 nt, Artificial Sequence
  Description of Artificial Sequence: Synthetic oligonucleotide
  Sense strand starting at position 788 of SEQ ID NO: 1245360
auuaauaauccggauguau

SEQ ID NO: 1556607 - RNA, 19 nt, Artificial Sequence
  Description of Artificial Sequence: Synthetic oligonucleotide
  Antisense strand to SEQ ID NO: 1556606
auacauccggauuauuaau

SEQ ID NO: 1556608 - RNA, 19 nt, Artificial Sequence
  Description of Artificial Sequence: Synthetic oligonucleotide
  Sense strand starting at position 797 of SEQ ID NO: 1245360
ccggauguauuugagauuu

SEQ ID NO: 1556609 - RNA, 19 nt, Artificial Sequence
  Description of Artificial Sequence: Synthetic oligonucleotide
  Antisense strand to SEQ ID NO: 1556608
aaaucucaaauacauccgg

SEQ ID NO: 1556610 - RNA, 19 nt, Artificial Sequence
  Description of Artificial Sequence: Synthetic oligonucleotide
  Sense strand starting at position 1191 of SEQ ID NO: 1245360
gaaugagucaacggcaaag

SEQ ID NO: 1556611 - RNA, 19 nt, Artificial Sequence
  Description of Artificial Sequence: Synthetic oligonucleotide
  Antisense strand to SEQ ID NO: 1556610
cuuugccguugacucauuc

SEQ ID NO: 1556612 - RNA, 19 nt, Artificial Sequence
  Description of Artificial Sequence: Synthetic oligonucleotide
  Sense strand starting at position 1267 of SEQ ID NO: 1245360
gggcccacuuaaucuuaaa

SEQ ID NO: 1556613 - RNA, 19 nt, Artificial Sequence
  Description of Artificial Sequence: Synthetic oligonucleotide
  Antisense strand to SEQ ID NO: 1556612
uuuaagauuaagugggccc

SEQ ID NO: 1556614 - RNA, 19 nt, Artificial Sequence
  Description of Artificial Sequence: Synthetic oligonucleotide
  Sense strand starting at position 1355 of SEQ ID NO: 1245360
cucccagaugugcaaagaa

SEQ ID NO: 1556615 - RNA, 19 nt, Artificial Sequence
  Description of Artificial Sequence: Synthetic oligonucleotide
  Antisense strand to SEQ ID NO: 1556614
uucuuugcacaucugggag

SEQ ID NO: 1556616 - RNA, 19 nt, Artificial Sequence
  Description of Artificial Sequence: Synthetic oligonucleotide
  Sense strand starting at position 1391 of SEQ ID NO: 1245360
cuaugcgugcucguuuaga

SEQ ID NO: 1556617 - RNA, 19 nt, Artificial Sequence
  Description of Artificial Sequence: Synthetic oligonucleotide
  Antisense strand to SEQ ID NO: 1556616
ucuaaacgagcacgcauag

SEQ ID NO: 1556618 - RNA, 19 nt, Artificial Sequence
  Description of Artificial Sequence: Synthetic oligonucleotide
  Sense strand starting at position 1393 of SEQ ID NO: 1245360
augcgugcucguuuagaag

SEQ ID NO: 1556619 - RNA, 19 nt, Artificial Sequence
  Description of Artificial Sequence: Synthetic oligonucleotide
  Antisense strand to SEQ ID NO: 1556618
cuucuaaacgagcacgcau

SEQ ID NO: 1556620 - RNA, 19 nt, Artificial Sequence
  Description of Artificial Sequence: Synthetic oligonucleotide
  Sense strand starting at position 1510 of SEQ ID NO: 1245360
aguguaaacauguggucca

SEQ ID NO: 1556621 - RNA, 19 nt, Artificial Sequence
  Description of Artificial Sequence: Synthetic oligonucleotide
  Antisense strand to SEQ ID NO: 1556620
uggaccacauguuuacacu

SEQ ID NO: 1556622 - RNA, 19 nt, Artificial Sequence
  Description of Artificial Sequence: Synthetic oligonucleotide
  Sense strand starting at position 1572 of SEQ ID NO: 1245360
aucuuuaccugguugagua

SEQ ID NO: 1556623 - RNA, 19 nt, Artificial Sequence
  Description of Artificial Sequence: Synthetic oligonucleotide
  Antisense strand to SEQ ID NO: 1556622
uacucaaccagguaaagau

SEQ ID NO: 1556624 - RNA, 19 nt, Artificial Sequence
  Description of Artificial Sequence: Synthetic oligonucleotide
  Sense strand starting at position 1573 of SEQ ID NO: 1245360
ucuuuaccugguugaguaa

SEQ ID NO: 1556625 - RNA, 19 nt, Artificial Sequence
  Description of Artificial Sequence: Synthetic oligonucleotide
  Antisense strand to SEQ ID NO: 1556624
uuacucaaccagguaaaga

SEQ ID NO: 1556626 - RNA, 19 nt, Artificial Sequence
  Description of Artificial Sequence: Synthetic oligonucleotide
  Sense strand starting at position 1574 of SEQ ID NO: 1245360
cuuuaccugguugaguaaa

SEQ ID NO: 1556627 - RNA, 19 nt, Artificial Sequence
  Description of Artificial Sequence: Synthetic oligonucleotide
  Antisense strand to SEQ ID NO: 1556626
uuuacucaaccagguaaag

SEQ ID NO: 1556628 - RNA, 19 nt, Artificial Sequence
  Description of Artificial Sequence: Synthetic oligonucleotide
  Sense strand starting at position 1641 of SEQ ID NO: 1245360
cuuccuugaccugguagaa

SEQ ID NO: 1556629 - RNA, 19 nt, Artificial Sequence
  Description of Artificial Sequence: Synthetic oligonucleotide
  Antisense strand to SEQ ID NO: 1556628
uucuaccaggucaaggaag

SEQ ID NO: 1556630 - RNA, 19 nt, Artificial Sequence
  Description of Artificial Sequence: Synthetic oligonucleotide
  Sense strand starting at position 1663 of SEQ ID NO: 1245360
gcaggacuuaccuggguuu

SEQ ID NO: 1556631 - RNA, 19 nt, Artificial Sequence
  Description of Artificial Sequence: Synthetic oligonucleotide
  Antisense strand to SEQ ID NO: 1556630
aaacccagguaaguccugc

SEQ ID NO: 1556632 - RNA, 19 nt, Artificial Sequence
  Description of Artificial Sequence: Synthetic oligonucleotide
  Sense strand starting at position 2120 of SEQ ID NO: 1245360
auggucagauguucccaau

SEQ ID NO: 1556633 - RNA, 19 nt, Artificial Sequence
  Description of Artificial Sequence: Synthetic oligonucleotide
  Antisense strand to SEQ ID NO: 1556632
auugggaacaucugaccau

SEQ ID NO: 1556634 - RNA, 19 nt, Artificial Sequence
  Description of Artificial Sequence: Synthetic oligonucleotide
  Sense strand starting at position 2742 of SEQ ID NO: 1245360
cugaaacaagccuguauca

SEQ ID NO: 1556635 - RNA, 19 nt, Artificial Sequence
  Description of Artificial Sequence: Synthetic oligonucleotide
  Antisense strand to SEQ ID NO: 1556634
ugauacaggcuuguuucag

SEQ ID NO: 1556636 - RNA, 19 nt, Artificial Sequence
  Description of Artificial Sequence: Synthetic oligonucleotide
  Sense strand starting at position 2771 of SEQ ID NO: 1245360
auggaaauauuguaacaag

SEQ ID NO: 1556637 - RNA, 19 nt, Artificial Sequence
  Description of Artificial Sequence: Synthetic oligonucleotide
  Antisense strand to SEQ ID NO: 1556636
cuuguuacaauauuuccau

SEQ ID NO: 1556638 - RNA, 19 nt, Artificial Sequence
  Description of Artificial Sequence: Synthetic oligonucleotide
  Sense strand starting at position 2893 of SEQ ID NO: 1245360
ugggaggugguaugaguaa

SEQ ID NO: 1556639 - RNA, 19 nt, Artificial Sequence
  Description of Artificial Sequence: Synthetic oligonucleotide
  Antisense strand to SEQ ID NO: 1556638
uuacucauaccaccuccca

SEQ ID NO: 1556640 - RNA, 19 nt, Artificial Sequence
  Description of Artificial Sequence: Synthetic oligonucleotide
  Sense strand starting at position 2944 of SEQ ID NO: 1245360
uguuguaugaagugaaaga

SEQ ID NO: 1556641 - RNA, 19 nt, Artificial Sequence
  Description of Artificial Sequence: Synthetic oligonucleotide
  Antisense strand to SEQ ID NO: 1556640
ucuuucacuucauacaaca

SEQ ID NO: 1556642 - RNA, 19 nt, Artificial Sequence
  Description of Artificial Sequence: Synthetic oligonucleotide
  Sense strand starting at position 2945 of SEQ ID NO: 1245360
guuguaugaagugaaagac

SEQ ID NO: 1556643 - RNA, 19 nt, Artificial Sequence
  Description of Artificial Sequence: Synthetic oligonucleotide
  Antisense strand to SEQ ID NO: 1556642
gucuuucacuucauacaac

SEQ ID NO: 1556644 - RNA, 19 nt, Artificial Sequence
  Description of Artificial Sequence: Synthetic oligonucleotide
  Sense strand starting at position 3173 of SEQ ID NO: 1245360
gaggcugacacaugagagu

SEQ ID NO: 1556645 - RNA, 19 nt, Artificial Sequence
  Description of Artificial Sequence: Synthetic oligonucleotide
  Antisense strand to SEQ ID NO: 1556644
acucucaugugucagccuc

SEQ ID NO: 1556646 - RNA, 19 nt, Artificial Sequence
  Description of Artificial Sequence: Synthetic oligonucleotide
  Sense strand starting at position 3180 of SEQ ID NO: 1245360
acacaugagaguugcuuga

SEQ ID NO: 1556647 - RNA, 19 nt, Artificial Sequence
  Description of Artificial Sequence: Synthetic oligonucleotide
  Antisense strand to SEQ ID NO: 1556646
ucaagcaacucucaugugu

SEQ ID NO: 1556648 - RNA, 19 nt, Artificial Sequence
  Description of Artificial Sequence: Synthetic oligonucleotide
  Sense strand starting at position 3338 of SEQ ID NO: 1245360
cggaccaaucccugggaca

SEQ ID NO: 1556649 - RNA, 19 nt, Artificial Sequence
  Description of Artificial Sequence: Synthetic oligonucleotide
  Antisense strand to SEQ ID NO: 1556648
ugucccagggauugguccg

SEQ ID NO: 1556650 - RNA, 19 nt, Artificial Sequence
  Description of Artificial Sequence: Synthetic oligonucleotide
  Sense strand starting at position 3341 of SEQ ID NO: 1245360
accaaucccugggacauuu

SEQ ID NO: 1556651 - RNA, 19 nt, Artificial Sequence
  Description of Artificial Sequence: Synthetic oligonucleotide
  Antisense strand to SEQ ID NO: 1556650
aaaugucccagggauuggu

SEQ ID NO: 1556652 - RNA, 19 nt, Artificial Sequence
  Description of Artificial Sequence: Synthetic oligonucleotide
  Sense strand starting at position 3395 of SEQ ID NO: 1245360
ccggaaaugaucugaaagc

SEQ ID NO: 1556653 - RNA, 19 nt, Artificial Sequence
  Description of Artificial Sequence: Synthetic oligonucleotide
  Antisense strand to SEQ ID NO: 1556652
gcuuucagaucauuuccgg

SEQ ID NO: 1556654 - RNA, 19 nt, Artificial Sequence
  Description of Artificial Sequence: Synthetic oligonucleotide
  Sense strand starting at position 3470 of SEQ ID NO: 1245360
cauaauuacuugguguuga

SEQ ID NO: 1556655 - RNA, 19 nt, Artificial Sequence
  Description of Artificial Sequence: Synthetic oligonucleotide
  Antisense strand to SEQ ID NO: 1556654
ucaacaccaaguaauuaug

SEQ ID NO: 1556656 - RNA, 19 nt, Artificial Sequence
  Description of Artificial Sequence: Synthetic oligonucleotide
  Sense strand starting at position 3588 of SEQ ID NO: 1245360
ugguuuaacugaucuucuu

SEQ ID NO: 1556657 - RNA, 19 nt, Artificial Sequence
  Description of Artificial Sequence: Synthetic oligonucleotide
  Antisense strand to SEQ ID NO: 1556656
aagaagaucaguuaaacca

SEQ ID NO: 1556658 - RNA, 19 nt, Artificial Sequence
  Description of Artificial Sequence: Synthetic oligonucleotide
  Sense strand starting at position 3649 of SEQ ID NO: 1245360
ggccaaugauuguugaaau

SEQ ID NO: 1556659 - RNA, 19 nt, Artificial Sequence
  Description of Artificial Sequence: Synthetic oligonucleotide
  Antisense strand to SEQ ID NO: 1556658
auuucaacaaucauuggcc

SEQ ID NO: 1556660 - RNA, 19 nt, Artificial Sequence
  Description of Artificial Sequence: Synthetic oligonucleotide
  Sense strand starting at position 3718 of SEQ ID NO: 1245360
ggcuaaugaggaggauucu

SEQ ID NO: 1556661 - RNA, 19 nt, Artificial Sequence
  Description of Artificial Sequence: Synthetic oligonucleotide
  Antisense strand to SEQ ID NO: 1556660
agaauccuccucauuagcc

SEQ ID NO: 1556662 - RNA, 19 nt, Artificial Sequence
  Description of Artificial Sequence: Synthetic oligonucleotide
  Sense strand starting at position 3877 of SEQ ID NO: 1245360
gguacagcugucuaaagga

SEQ ID NO: 1556663 - RNA, 19 nt, Artificial Sequence
  Description of Artificial Sequence: Synthetic oligonucleotide
  Antisense strand to SEQ ID NO: 1556662
uccuuuagacagcuguacc

SEQ ID NO: 1556664 - RNA, 19 nt, Artificial Sequence
  Description of Artificial Sequence: Synthetic oligonucleotide
  Sense strand starting at position 3885 of SEQ ID NO: 1245360
ugucuaaaggauuaugcca

SEQ ID NO: 1556665 - RNA, 19 nt, Artificial Sequence
  Description of Artificial Sequence: Synthetic oligonucleotide
  Antisense strand to SEQ ID NO: 1556664
uggcauaauccuuuagaca

SEQ ID NO: 1556666 - RNA, 19 nt, Artificial Sequence
  Description of Artificial Sequence: Synthetic oligonucleotide
  Sense strand starting at position 3893 of SEQ ID NO: 1245360
ggauuaugccaaugaggag

SEQ ID NO: 1556667 - RNA, 19 nt, Artificial Sequence
  Description of Artificial Sequence: Synthetic oligonucleotide
  Antisense strand to SEQ ID NO: 1556666
cuccucauuggcauaaucc

SEQ ID NO: 1556668 - RNA, 19 nt, Artificial Sequence
  Description of Artificial Sequence: Synthetic oligonucleotide
  Sense strand starting at position 64 of SEQ ID NO: 1245361
ugcugacaaucuguagauu

SEQ ID NO: 1556669 - RNA, 19 nt, Artificial Sequence
  Description of Artificial Sequence: Synthetic oligonucleotide
  Antisense strand to SEQ ID NO: 1556668
aaucuacagauugucagca

SEQ ID NO: 1556670 - RNA, 19 nt, Artificial Sequence
  Description of Artificial Sequence: Synthetic oligonucleotide
  Sense strand starting at position 67 of SEQ ID NO: 1245361
ugacaaucuguagauuguu

SEQ ID NO: 1556671 - RNA, 19 nt, Artificial Sequence
  Description of Artificial Sequence: Synthetic oligonucleotide
  Antisense strand to SEQ ID NO: 1556670
aacaaucuacagauuguca

SEQ ID NO: 1556672 - RNA, 19 nt, Artificial Sequence
  Description of Artificial Sequence: Synthetic oligonucleotide
  Sense strand starting at position 221 of SEQ ID NO: 1245361
ccacuaacaggcugaguaa

SEQ ID NO: 1556673 - RNA, 19 nt, Artificial Sequence
  Description of Artificial Sequence: Synthetic oligonucleotide
  Antisense strand to SEQ ID NO: 1556672
uuacucagccuguuagugg

SEQ ID NO: 1556674 - RNA, 19 nt, Artificial Sequence
  Description of Artificial Sequence: Synthetic oligonucleotide
  Sense strand starting at position 222 of SEQ ID NO: 1245361
cacuaacaggcugaguaau

SEQ ID NO: 1556675 - RNA, 19 nt, Artificial Sequence
  Description of Artificial Sequence: Synthetic oligonucleotide
  Antisense strand to SEQ ID NO: 1556674
auuacucagccuguuagug

SEQ ID NO: 1556676 - RNA, 19 nt, Artificial Sequence
  Description of Artificial Sequence: Synthetic oligonucleotide
  Sense strand starting at position 776 of SEQ ID NO: 1245361
ccgccaauaugaucuugga

SEQ ID NO: 1556677 - RNA, 19 nt, Artificial Sequence
  Description of Artificial Sequence: Synthetic oligonucleotide
  Antisense strand to SEQ ID NO: 1556676
uccaagaucauauuggcgg

SEQ ID NO: 1556678 - RNA, 19 nt, Artificial Sequence
  Description of Artificial Sequence: Synthetic oligonucleotide
  Sense strand starting at position 780 of SEQ ID NO: 1245361
caauaugaucuuggauagu

SEQ ID NO: 1556679 - RNA, 19 nt, Artificial Sequence
  Description of Artificial Sequence: Synthetic oligonucleotide
  Antisense strand to SEQ ID NO: 1556678
acuauccaagaucauauug

SEQ ID NO: 1556680 - RNA, 19 nt, Artificial Sequence
  Description of Artificial Sequence: Synthetic oligonucleotide
  Sense strand starting at position 1075 of SEQ ID NO: 1245361
auaucugagaaauguuggu

SEQ ID NO: 1556681 - RNA, 19 nt, Artificial Sequence
  Description of Artificial Sequence: Synthetic oligonucleotide
  Antisense strand to SEQ ID NO: 1556680
accaacauuucucagauau

SEQ ID NO: 1556682 - RNA, 19 nt, Artificial Sequence
  Description of Artificial Sequence: Synthetic oligonucleotide
  Sense strand starting at position 1080 of SEQ ID NO: 1245361
ugagaaauguuggugcaaa

SEQ ID NO: 1556683 - RNA, 19 nt, Artificial Sequence
  Description of Artificial Sequence: Synthetic oligonucleotide
  Antisense strand to SEQ ID NO: 1556682
uuugcaccaacauuucuca

SEQ ID NO: 1556684 - RNA, 19 nt, Artificial Sequence
  Description of Artificial Sequence: Synthetic oligonucleotide
  Sense strand starting at position 1094 of SEQ ID NO: 1245361
gcaaaugcuagagacgaau

SEQ ID NO: 1556685 - RNA, 19 nt, Artificial Sequence
  Description of Artificial Sequence: Synthetic oligonucleotide
  Antisense strand to SEQ ID NO: 1556684
auucgucucuagcauuugc

SEQ ID NO: 1556686 - RNA, 19 nt, Artificial Sequence
  Description of Artificial Sequence: Synthetic oligonucleotide
  Sense strand starting at position 1151 of SEQ ID NO: 1245361
ugcugugacgagcaacaua

SEQ ID NO: 1556687 - RNA, 19 nt, Artificial Sequence
  Description of Artificial Sequence: Synthetic oligonucleotide
  Antisense strand to SEQ ID NO: 1556686
uauguugcucgucacagca

SEQ ID NO: 1556688 - RNA, 19 nt, Artificial Sequence
  Description of Artificial Sequence: Synthetic oligonucleotide
  Sense strand starting at position 1173 of SEQ ID NO: 1245361
agaacagagugucuaaagu

SEQ ID NO: 1556689 - RNA, 19 nt, Artificial Sequence
  Description of Artificial Sequence: Synthetic oligonucleotide
  Antisense strand to SEQ ID NO: 1556688
acuuuagacacucuguucu

SEQ ID NO: 1556690 - RNA, 19 nt, Artificial Sequence
  Description of Artificial Sequence: Synthetic oligonucleotide
  Sense strand starting at position 1239 of SEQ ID NO: 1245361
ccucauguaccaggaauaa

SEQ ID NO: 1556691 - RNA, 19 nt, Artificial Sequence
  Description of Artificial Sequence: Synthetic oligonucleotide
  Antisense strand to SEQ ID NO: 1556690
uuauuccugguacaugagg

SEQ ID NO: 1556692 - RNA, 19 nt, Artificial Sequence
  Description of Artificial Sequence: Synthetic oligonucleotide
  Sense strand starting at position 1297 of SEQ ID NO: 1245361
augagaaagugaucuguca

SEQ ID NO: 1556693 - RNA, 19 nt, Artificial Sequence
  Description of Artificial Sequence: Synthetic oligonucleotide
  Antisense strand to SEQ ID NO: 1556692
ugacagaucacuuucucau

SEQ ID NO: 1556694 - RNA, 19 nt, Artificial Sequence
  Description of Artificial Sequence: Synthetic oligonucleotide
  Sense strand starting at position 2530 of SEQ ID NO: 1245361
ugaaauaaugaccgcaagu

SEQ ID NO: 1556695 - RNA, 19 nt, Artificial Sequence
  Description of Artificial Sequence: Synthetic oligonucleotide
  Antisense strand to SEQ ID NO: 1556694
acuugcggucauuauuuca

SEQ ID NO: 1556696 - RNA, 19 nt, Artificial Sequence
  Description of Artificial Sequence: Synthetic oligonucleotide
  Sense strand starting at position 2532 of SEQ ID NO: 1245361
aaauaaugaccgcaagugu

SEQ ID NO: 1556697 - RNA, 19 nt, Artificial Sequence
  Description of Artificial Sequence: Synthetic oligonucleotide
  Antisense strand to SEQ ID NO: 1556696
acacuugcggucauuauuu

SEQ ID NO: 1556698 - RNA, 19 nt, Artificial Sequence
  Description of Artificial Sequence: Synthetic oligonucleotide
  Sense strand starting at position 2543 of SEQ ID NO: 1245361
gcaagugugaacuguaaag

SEQ ID NO: 1556699 - RNA, 19 nt, Artificial Sequence
  Description of Artificial Sequence: Synthetic oligonucleotide
  Antisense strand to SEQ ID NO: 1556698
cuuuacaguucacacuugc

SEQ ID NO: 1556700 - RNA, 19 nt, Artificial Sequence
  Description of Artificial Sequence: Synthetic oligonucleotide
  Sense strand starting at position 2545 of SEQ ID NO: 1245361
aagugugaacuguaaagca

SEQ ID NO: 1556701 - RNA, 19 nt, Artificial Sequence
  Description of Artificial Sequence: Synthetic oligonucleotide
  Antisense strand to SEQ ID NO: 1556700
ugcuuuacaguucacacuu

SEQ ID NO: 1556702 - RNA, 19 nt, Artificial Sequence
  Description of Artificial Sequence: Synthetic oligonucleotide
  Sense strand starting at position 2717 of SEQ ID NO: 1245361
ccugccuucccaggagaga

SEQ ID NO: 1556703 - RNA, 19 nt, Artificial Sequence
  Description of Artificial Sequence: Synthetic oligonucleotide
  Antisense strand to SEQ ID NO: 1556702
ucucuccugggaaggcagg

SEQ ID NO: 1556704 - RNA, 19 nt, Artificial Sequence
  Description of Artificial Sequence: Synthetic oligonucleotide
  Sense strand starting at position 2730 of SEQ ID NO: 1245361
gagagacguggccgauaga

SEQ ID NO: 1556705 - RNA, 19 nt, Artificial Sequence
  Description of Artificial Sequence: Synthetic oligonucleotide
  Antisense strand to SEQ ID NO: 1556704
ucuaucggccacgucucuc

SEQ ID NO: 1556706 - RNA, 19 nt, Artificial Sequence
  Description of Artificial Sequence: Synthetic oligonucleotide
  Sense strand starting at position 2731 of SEQ ID NO: 1245361
agagacguggccgauagaa

SEQ ID NO: 1556707 - RNA, 19 nt, Artificial Sequence
  Description of Artificial Sequence: Synthetic oligonucleotide
  Antisense strand to SEQ ID NO: 1556706
uucuaucggccacgucucu

SEQ ID NO: 1556708 - RNA, 19 nt, Artificial Sequence
  Description of Artificial Sequence: Synthetic oligonucleotide
  Sense strand starting at position 2761 of SEQ ID NO: 1245361
guaacucuaaguuggaguu

SEQ ID NO: 1556709 - RNA, 19 nt, Artificial Sequence
  Description of Artificial Sequence: Synthetic oligonucleotide
  Antisense strand to SEQ ID NO: 1556708
aacuccaacuuagaguuac

SEQ ID NO: 1556710 - RNA, 19 nt, Artificial Sequence
  Description of Artificial Sequence: Synthetic oligonucleotide
  Sense strand starting at position 2762 of SEQ ID NO: 1245361
uaacucuaaguuggaguua

SEQ ID NO: 1556711 - RNA, 19 nt, Artificial Sequence
  Description of Artificial Sequence: Synthetic oligonucleotide
  Antisense strand to SEQ ID NO: 1556710
uaacuccaacuuagaguua

SEQ ID NO: 1556712 - RNA, 19 nt, Artificial Sequence
  Description of Artificial Sequence: Synthetic oligonucleotide
  Sense strand starting at position 2774 of SEQ ID NO: 1245361
ggaguuacacgguggagaa

SEQ ID NO: 1556713 - RNA, 19 nt, Artificial Sequence
  Description of Artificial Sequence: Synthetic oligonucleotide
  Antisense strand to SEQ ID NO: 1556712
uucuccaccguguaacucc

SEQ ID NO: 1556714 - RNA, 19 nt, Artificial Sequence
  Description of Artificial Sequence: Synthetic oligonucleotide
  Sense strand starting at position 2823 of SEQ ID NO: 1245361
cucuuauucccucacacgu

SEQ ID NO: 1556715 - RNA, 19 nt, Artificial Sequence
  Description of Artificial Sequence: Synthetic oligonucleotide
  Antisense strand to SEQ ID NO: 1556714
acgugugagggaauaagag

SEQ ID NO: 1556716 - RNA, 19 nt, Artificial Sequence
  Description of Artificial Sequence: Synthetic oligonucleotide
  Sense strand starting at position 2977 of SEQ ID NO: 1245361
ucagacggaccugguuaua

SEQ ID NO: 1556717 - RNA, 19 nt, Artificial Sequence
  Description of Artificial Sequence: Synthetic oligonucleotide
  Antisense strand to SEQ ID NO: 1556716
uauaaccagguccgucuga

SEQ ID NO: 1556718 - RNA, 19 nt, Artificial Sequence
  Description of Artificial Sequence: Synthetic oligonucleotide
  Sense strand starting at position 3023 of SEQ ID NO: 1245361
auagcugacuggccauaaa

SEQ ID NO: 1556719 - RNA, 19 nt, Artificial Sequence
  Description of Artificial Sequence: Synthetic oligonucleotide
  Antisense strand to SEQ ID NO: 1556718
uuuauggccagucagcuau

SEQ ID NO: 1556720 - RNA, 19 nt, Artificial Sequence
  Description of Artificial Sequence: Synthetic oligonucleotide
  Sense strand starting at position 3026 of SEQ ID NO: 1245361
gcugacuggccauaaaguu

SEQ ID NO: 1556721 - RNA, 19 nt, Artificial Sequence
  Description of Artificial Sequence: Synthetic oligonucleotide
  Antisense strand to SEQ ID NO: 1556720
aacuuuauggccagucagc

SEQ ID NO: 1556722 - RNA, 19 nt, Artificial Sequence
  Description of Artificial Sequence: Synthetic oligonucleotide
  Sense strand starting at position 3128 of SEQ ID NO: 1245361
aguggaucaccugagguau

SEQ ID NO: 1556723 - RNA, 19 nt, Artificial Sequence
  Description of Artificial Sequence: Synthetic oligonucleotide
  Antisense strand to SEQ ID NO: 1556722
auaccucaggugauccacu

SEQ ID NO: 1556724 - RNA, 19 nt, Artificial Sequence
  Description of Artificial Sequence: Synthetic oligonucleotide
  Sense strand starting at position 3134 of SEQ ID NO: 1245361
ucaccugagguauggcaaa

SEQ ID NO: 1556725 - RNA, 19 nt, Artificial Sequence
  Description of Artificial Sequence: Synthetic oligonucleotide
  Antisense strand to SEQ ID NO: 1556724
uuugccauaccucagguga

SEQ ID NO: 1556726 - RNA, 19 nt, Artificial Sequence
  Description of Artificial Sequence: Synthetic oligonucleotide
  Sense strand starting at position 3368 of SEQ ID NO: 1245361
cggaauugacuccauggca

SEQ ID NO: 1556727 - RNA, 19 nt, Artificial Sequence
  Description of Artificial Sequence: Synthetic oligonucleotide
  Antisense strand to SEQ ID NO: 1556726
ugccauggagucaauuccg

SEQ ID NO: 1556728 - RNA, 19 nt, Artificial Sequence
  Description of Artificial Sequence: Synthetic oligonucleotide
  Sense strand starting at position 3519 of SEQ ID NO: 1245361
cuggccucacaguauuaaa

SEQ ID NO: 1556729 - RNA, 19 nt, Artificial Sequence
  Description of Artificial Sequence: Synthetic oligonucleotide
  Antisense strand to SEQ ID NO: 1556728
uuuaauacugugaggccag

SEQ ID NO: 1556730 - RNA, 19 nt, Artificial Sequence
  Description of Artificial Sequence: Synthetic oligonucleotide
  Sense strand starting at position 3612 of SEQ ID NO: 1245361
ucaguuacuuucuccugau

SEQ ID NO: 1556731 - RNA, 19 nt, Artificial Sequence
  Description of Artificial Sequence: Synthetic oligonucleotide
  Antisense strand to SEQ ID NO: 1556730
aucaggagaaaguaacuga

SEQ ID NO: 1556732 - RNA, 19 nt, Artificial Sequence
  Description of Artificial Sequence: Synthetic oligonucleotide
  Sense strand starting at position 3630 of SEQ ID NO: 1245361
uaagaaggucacugaccau

SEQ ID NO: 1556733 - RNA, 19 nt, Artificial Sequence
  Description of Artificial Sequence: Synthetic oligonucleotide
  Antisense strand to SEQ ID NO: 1556732
auggucagugaccuucuua

SEQ ID NO: 1556734 - RNA, 19 nt, Artificial Sequence
  Description of Artificial Sequence: Synthetic oligonucleotide
  Sense strand starting at position 3766 of SEQ ID NO: 1245361
gaacauggauugucuguua

SEQ ID NO: 1556735 - RNA, 19 nt, Artificial Sequence
  Description of Artificial Sequence: Synthetic oligonucleotide
  Antisense strand to SEQ ID NO: 1556734
uaacagacaauccauguuc

SEQ ID NO: 1556736 - RNA, 19 nt, Artificial Sequence
  Description of Artificial Sequence: Synthetic oligonucleotide
  Sense strand starting at position 3769 of SEQ ID NO: 1245361
cauggauugucuguuaaac

SEQ ID NO: 1556737 - RNA, 19 nt, Artificial Sequence
  Description of Artificial Sequence: Synthetic oligonucleotide
  Antisense strand to SEQ ID NO: 1556736
guuuaacagacaauccaug

SEQ ID NO: 1556738 - RNA, 19 nt, Artificial Sequence
  Description of Artificial Sequence: Synthetic oligonucleotide
  Sense strand starting at position 3801 of SEQ ID NO: 1245361
uaauaugcaugugucaaga

SEQ ID NO: 1556739 - RNA, 19 nt, Artificial Sequence
  Description of Artificial Sequence: Synthetic oligonucleotide
  Antisense strand to SEQ ID NO: 1556738
ucuugacacaugcauauua

SEQ ID NO: 1556740 - RNA, 19 nt, Artificial Sequence
  Description of Artificial Sequence: Synthetic oligonucleotide
  Sense strand starting at position 3879 of SEQ ID NO: 1245361
accaguuaagcauaaaguu

SEQ ID NO: 1556741 - RNA, 19 nt, Artificial Sequence
  Description of Artificial Sequence: Synthetic oligonucleotide
  Antisense strand to SEQ ID NO: 1556740
aacuuuaugcuuaacuggu

SEQ ID NO: 1556742 - RNA, 19 nt, Artificial Sequence
  Description of Artificial Sequence: Synthetic oligonucleotide
  Sense strand starting at position 3917 of SEQ ID NO: 1245361
ugaagugucuguauguggu

SEQ ID NO: 1556743 - RNA, 19 nt, Artificial Sequence
  Description of Artificial Sequence: Synthetic oligonucleotide
  Antisense strand to SEQ ID NO: 1556742
accacauacagacacuuca

SEQ ID NO: 1556744 - RNA, 19 nt, Artificial Sequence
  Description of Artificial Sequence: Synthetic oligonucleotide
  Sense strand starting at position 3982 of SEQ ID NO: 1245361
ggcuguaacuccuuauaag

SEQ ID NO: 1556745 - RNA, 19 nt, Artificial Sequence
  Description of Artificial Sequence: Synthetic oligonucleotide
  Antisense strand to SEQ ID NO: 1556744
cuuauaaggaguuacagcc

SEQ ID NO: 1556746 - RNA, 19 nt, Artificial Sequence
  Description of Artificial Sequence: Synthetic oligonucleotide
  Sense strand starting at position 3983 of SEQ ID NO: 1245361
gcuguaacuccuuauaaga

SEQ ID NO: 1556747 - RNA, 19 nt, Artificial Sequence
  Description of Artificial Sequence: Synthetic oligonucleotide
  Antisense strand to SEQ ID NO: 1556746
ucuuauaaggaguuacagc

SEQ ID NO: 1556748 - RNA, 19 nt, Artificial Sequence
  Description of Artificial Sequence: Synthetic oligonucleotide
  Sense strand starting at position 237 of SEQ ID NO: 1245362
gaauaaugcuguucuggac

SEQ ID NO: 1556749 - RNA, 19 nt, Artificial Sequence
  Description of Artificial Sequence: Synthetic oligonucleotide
  Antisense strand to SEQ ID NO: 1556748
guccagaacagcauuauuc

SEQ ID NO: 1556750 - RNA, 19 nt, Artificial Sequence
  Description of Artificial Sequence: Synthetic oligonucleotide
  Sense strand starting at position 258 of SEQ ID NO: 1245362
ucaggagaauaucacauuu

SEQ ID NO: 1556751 - RNA, 19 nt, Artificial Sequence
  Description of Artificial Sequence: Synthetic oligonucleotide
  Antisense strand to SEQ ID NO: 1556750
aaaugugauauucuccuga

SEQ ID NO: 1556752 - RNA, 19 nt, Artificial Sequence
  Description of Artificial Sequence: Synthetic oligonucleotide
  Sense strand starting at position 260 of SEQ ID NO: 1245362
aggagaauaucacauuugu

SEQ ID NO: 1556753 - RNA, 19 nt, Artificial Sequence
  Description of Artificial Sequence: Synthetic oligonucleotide
  Antisense strand to SEQ ID NO: 1556752
acaaaugugauauucuccu

SEQ ID NO: 1556754 - RNA, 19 nt, Artificial Sequence
  Description of Artificial Sequence: Synthetic oligonucleotide
  Sense strand starting at position 297 of SEQ ID NO: 1245362
cauguuagagcccauaagu

SEQ ID NO: 1556755 - RNA, 19 nt, Artificial Sequence
  Description of Artificial Sequence: Synthetic oligonucleotide
  Antisense strand to SEQ ID NO: 1556754
acuuaugggcucuaacaug

SEQ ID NO: 1556756 - RNA, 19 nt, Artificial Sequence
  Description of Artificial Sequence: Synthetic oligonucleotide
  Sense strand starting at position 332 of SEQ ID NO: 1245362
guuagaaggcuuggucaga

SEQ ID NO: 1556757 - RNA, 19 nt, Artificial Sequence
  Description of Artificial Sequence: Synthetic oligonucleotide
  Antisense strand to SEQ ID NO: 1556756
ucugaccaagccuucuaac

SEQ ID NO: 1556758 - RNA, 19 nt, Artificial Sequence
  Description of Artificial Sequence: Synthetic oligonucleotide
  Sense strand starting at position 508 of SEQ ID NO: 1245362
guuugaauucuggacgcag

SEQ ID NO: 1556759 - RNA, 19 nt, Artificial Sequence
  Description of Artificial Sequence: Synthetic oligonucleotide
  Antisense strand to SEQ ID NO: 1556758
cugcguccagaauucaaac

SEQ ID NO: 1556760 - RNA, 19 nt, Artificial Sequence
  Description of Artificial Sequence: Synthetic oligonucleotide
  Sense strand starting at position 531 of SEQ ID NO: 1245362
uuccauauuugggaauguu

SEQ ID NO: 1556761 - RNA, 19 nt, Artificial Sequence
  Description of Artificial Sequence: Synthetic oligonucleotide
  Antisense strand to SEQ ID NO: 1556760
aacauucccaaauauggaa

SEQ ID NO: 1556762 - RNA, 19 nt, Artificial Sequence
  Description of Artificial Sequence: Synthetic oligonucleotide
  Sense strand starting at position 539 of SEQ ID NO: 1245362
uugggaauguugcucccau

SEQ ID NO: 1556763 - RNA, 19 nt, Artificial Sequence
  Description of Artificial Sequence: Synthetic oligonucleotide
  Antisense strand to SEQ ID NO: 1556762
augggagcaacauucccaa

SEQ ID NO: 1556764 - RNA, 19 nt, Artificial Sequence
  Description of Artificial Sequence: Synthetic oligonucleotide
  Sense strand starting at position 540 of SEQ ID NO: 1245362
ugggaauguugcucccauc

SEQ ID NO: 1556765 - RNA, 19 nt, Artificial Sequence
  Description of Artificial Sequence: Synthetic oligonucleotide
  Antisense strand to SEQ ID NO: 1556764
gaugggagcaacauuccca

SEQ ID NO: 1556766 - RNA, 19 nt, Artificial Sequence
  Description of Artificial Sequence: Synthetic oligonucleotide
  Sense strand starting at position 738 of SEQ ID NO: 1245362
gcugaacuaguaugaauga

SEQ ID NO: 1556767 - RNA, 19 nt, Artificial Sequence
  Description of Artificial Sequence: Synthetic oligonucleotide
  Antisense strand to SEQ ID NO: 1556766
ucauucauacuaguucagc

SEQ ID NO: 1556768 - RNA, 19 nt, Artificial Sequence
  Description of Artificial Sequence: Synthetic oligonucleotide
  Sense strand starting at position 834 of SEQ ID NO: 1245362
aagguauguguaugaaagu

SEQ ID NO: 1556769 - RNA, 19 nt, Artificial Sequence
  Description of Artificial Sequence: Synthetic oligonucleotide
  Antisense strand to SEQ ID NO: 1556768
acuuucauacacauaccuu

SEQ ID NO: 1556770 - RNA, 19 nt, Artificial Sequence
  Description of Artificial Sequence: Synthetic oligonucleotide
  Sense strand starting at position 885 of SEQ ID NO: 1245362
uauaaucauggcggucuaa

SEQ ID NO: 1556771 - RNA, 19 nt, Artificial Sequence
  Description of Artificial Sequence: Synthetic oligonucleotide
  Antisense strand to SEQ ID NO: 1556770
uuagaccgccaugauuaua

SEQ ID NO: 1556772 - RNA, 19 nt, Artificial Sequence
  Description of Artificial Sequence: Synthetic oligonucleotide
  Sense strand starting at position 976 of SEQ ID NO: 1245362
gugaauacaucucugacuu

SEQ ID NO: 1556773 - RNA, 19 nt, Artificial Sequence
  Description of Artificial Sequence: Synthetic oligonucleotide
  Antisense strand to SEQ ID NO: 1556772
aagucagagauguauucac

SEQ ID NO: 1556774 - RNA, 19 nt, Artificial Sequence
  Description of Artificial Sequence: Synthetic oligonucleotide
  Sense strand starting at position 1034 of SEQ ID NO: 1245362
uuucuauuacugcagguaa

SEQ ID NO: 1556775 - RNA, 19 nt, Artificial Sequence
  Description of Artificial Sequence: Synthetic oligonucleotide
  Antisense strand to SEQ ID NO: 1556774
uuaccugcaguaauagaaa

SEQ ID NO: 1556776 - RNA, 19 nt, Artificial Sequence
  Description of Artificial Sequence: Synthetic oligonucleotide
  Sense strand starting at position 1036 of SEQ ID NO: 1245362
ucuauuacugcagguaaca

SEQ ID NO: 1556777 - RNA, 19 nt, Artificial Sequence
  Description of Artificial Sequence: Synthetic oligonucleotide
  Antisense strand to SEQ ID NO: 1556776
uguuaccugcaguaauaga

SEQ ID NO: 1556778 - RNA, 19 nt, Artificial Sequence
  Description of Artificial Sequence: Synthetic oligonucleotide
  Sense strand starting at position 1220 of SEQ ID NO: 1245362
ugaguuccaaucugugaag

SEQ ID NO: 1556779 - RNA, 19 nt, Artificial Sequence
  Description of Artificial Sequence: Synthetic oligonucleotide
  Antisense strand to SEQ ID NO: 1556778
cuucacagauuggaacuca

SEQ ID NO: 1556780 - RNA, 19 nt, Artificial Sequence
  Description of Artificial Sequence: Synthetic oligonucleotide
  Sense strand starting at position 1221 of SEQ ID NO: 1245362
gaguuccaaucugugaaga

SEQ ID NO: 1556781 - RNA, 19 nt, Artificial Sequence
  Description of Artificial Sequence: Synthetic oligonucleotide
  Antisense strand to SEQ ID NO: 1556780
ucuucacagauuggaacuc

SEQ ID NO: 1556782 - RNA, 19 nt, Artificial Sequence
  Description of Artificial Sequence: Synthetic oligonucleotide
  Sense strand starting at position 1222 of SEQ ID NO: 1245362
aguuccaaucugugaagaa

SEQ ID NO: 1556783 - RNA, 19 nt, Artificial Sequence
  Description of Artificial Sequence: Synthetic oligonucleotide
  Antisense strand to SEQ ID NO: 1556782
uucuucacagauuggaacu

SEQ ID NO: 1556784 - RNA, 19 nt, Artificial Sequence
  Description of Artificial Sequence: Synthetic oligonucleotide
  Sense strand starting at position 1242 of SEQ ID NO: 1245362
acuguagaucuauauguuc

SEQ ID NO: 1556785 - RNA, 19 nt, Artificial Sequence
  Description of Artificial Sequence: Synthetic oligonucleotide
  Antisense strand to SEQ ID NO: 1556784
gaacauauagaucuacagu

SEQ ID NO: 1556786 - RNA, 19 nt, Artificial Sequence
  Description of Artificial Sequence: Synthetic oligonucleotide
  Sense strand starting at position 1247 of SEQ ID NO: 1245362
agaucuauauguucuaguu

SEQ ID NO: 1556787 - RNA, 19 nt, Artificial Sequence
  Description of Artificial Sequence: Synthetic oligonucleotide
  Antisense strand to SEQ ID NO: 1556786
aacuagaacauauagaucu

SEQ ID NO: 1556788 - RNA, 19 nt, Artificial Sequence
  Description of Artificial Sequence: Synthetic oligonucleotide
  Sense strand starting at position 1321 of SEQ ID NO: 1245362
agcagugaacuugguauaa

SEQ ID NO: 1556789 - RNA, 19 nt, Artificial Sequence
  Description of Artificial Sequence: Synthetic oligonucleotide
  Antisense strand to SEQ ID NO: 1556788
uuauaccaaguucacugcu

SEQ ID NO: 1556790 - RNA, 19 nt, Artificial Sequence
  Description of Artificial Sequence: Synthetic oligonucleotide
  Sense strand starting at position 1998 of SEQ ID NO: 1245362
cccgucuuccugggaauag

SEQ ID NO: 1556791 - RNA, 19 nt, Artificial Sequence
  Description of Artificial Sequence: Synthetic oligonucleotide
  Antisense strand to SEQ ID NO: 1556790
cuauucccaggaagacggg

SEQ ID NO: 1556792 - RNA, 19 nt, Artificial Sequence
  Description of Artificial Sequence: Synthetic oligonucleotide
  Sense strand starting at position 2008 of SEQ ID NO: 1245362
ugggaauaguaguuugaaa

SEQ ID NO: 1556793 - RNA, 19 nt, Artificial Sequence
  Description of Artificial Sequence: Synthetic oligonucleotide
  Antisense strand to SEQ ID NO: 1556792
uuucaaacuacuauuccca

SEQ ID NO: 1556794 - RNA, 19 nt, Artificial Sequence
  Description of Artificial Sequence: Synthetic oligonucleotide
  Sense strand starting at position 2029 of SEQ ID NO: 1245362
cucgcucuuaacugggaua

SEQ ID NO: 1556795 - RNA, 19 nt, Artificial Sequence
  Description of Artificial Sequence: Synthetic oligonucleotide
  Antisense strand to SEQ ID NO: 1556794
uaucccaguuaagagcgag

SEQ ID NO: 1556796 - RNA, 19 nt, Artificial Sequence
  Description of Artificial Sequence: Synthetic oligonucleotide
  Sense strand starting at position 3191 of SEQ ID NO: 1245362
gcucuucuguaaccaagaa

SEQ ID NO: 1556797 - RNA, 19 nt, Artificial Sequence
  Description of Artificial Sequence: Synthetic oligonucleotide
  Antisense strand to SEQ ID NO: 1556796
uucuugguuacagaagagc

SEQ ID NO: 1556798 - RNA, 19 nt, Artificial Sequence
  Description of Artificial Sequence: Synthetic oligonucleotide
  Sense strand starting at position 3203 of SEQ ID NO: 1245362
ccaagaaucucccuucgug

SEQ ID NO: 1556799 - RNA, 19 nt, Artificial Sequence
  Description of Artificial Sequence: Synthetic oligonucleotide
  Antisense strand to SEQ ID NO: 1556798
cacgaagggagauucuugg

SEQ ID NO: 1556800 - RNA, 19 nt, Artificial Sequence
  Description of Artificial Sequence: Synthetic oligonucleotide
  Sense strand starting at position 3245 of SEQ ID NO: 1245362
ggaaguagagucuguucau

SEQ ID NO: 1556801 - RNA, 19 nt, Artificial Sequence
  Description of Artificial Sequence: Synthetic oligonucleotide
  Antisense strand to SEQ ID NO: 1556800
augaacagacucuacuucc

SEQ ID NO: 1556802 - RNA, 19 nt, Artificial Sequence
  Description of Artificial Sequence: Synthetic oligonucleotide
  Sense strand starting at position 3443 of SEQ ID NO: 1245362
gagccagugcaucagaagu

SEQ ID NO: 1556803 - RNA, 19 nt, Artificial Sequence
  Description of Artificial Sequence: Synthetic oligonucleotide
  Antisense strand to SEQ ID NO: 1556802
acuucugaugcacuggcuc

SEQ ID NO: 1556804 - RNA, 19 nt, Artificial Sequence
  Description of Artificial Sequence: Synthetic oligonucleotide
  Sense strand starting at position 3457 of SEQ ID NO: 1245362
gaaguaucagcaugcauaa

SEQ ID NO: 1556805 - RNA, 19 nt, Artificial Sequence
  Description of Artificial Sequence: Synthetic oligonucleotide
  Antisense strand to SEQ ID NO: 1556804
uuaugcaugcugauacuuc

SEQ ID NO: 1556806 - RNA, 19 nt, Artificial Sequence
  Description of Artificial Sequence: Synthetic oligonucleotide
  Sense strand starting at position 3470 of SEQ ID NO: 1245362
gcauaaugguaccuuauga

SEQ ID NO: 1556807 - RNA, 19 nt, Artificial Sequence
  Description of Artificial Sequence: Synthetic oligonucleotide
  Antisense strand to SEQ ID NO: 1556806
ucauaagguaccauuaugc

SEQ ID NO: 1556808 - RNA, 19 nt, Artificial Sequence
  Description of Artificial Sequence: Synthetic oligonucleotide
  Sense strand starting at position 3566 of SEQ ID NO: 1245362
ugccaagaaugguuuacau

SEQ ID NO: 1556809 - RNA, 19 nt, Artificial Sequence
  Description of Artificial Sequence: Synthetic oligonucleotide
  Antisense strand to SEQ ID NO: 1556808
auguaaaccauucuuggca

SEQ ID NO: 1556810 - RNA, 19 nt, Artificial Sequence
  Description of Artificial Sequence: Synthetic oligonucleotide
  Sense strand starting at position 3575 of SEQ ID NO: 1245362
ugguuuacauucuugagga

SEQ ID NO: 1556811 - RNA, 19 nt, Artificial Sequence
  Description of Artificial Sequence: Synthetic oligonucleotide
  Antisense strand to SEQ ID NO: 1556810
uccucaagaauguaaacca

SEQ ID NO: 1556812 - RNA, 19 nt, Artificial Sequence
  Description of Artificial Sequence: Synthetic oligonucleotide
  Sense strand starting at position 3577 of SEQ ID NO: 1245362
guuuacauucuugaggauu

SEQ ID NO: 1556813 - RNA, 19 nt, Artificial Sequence
  Description of Artificial Sequence: Synthetic oligonucleotide
  Antisense strand to SEQ ID NO: 1556812
aauccucaagaauguaaac

SEQ ID NO: 1556814 - RNA, 19 nt, Artificial Sequence
  Description of Artificial Sequence: Synthetic oligonucleotide
  Sense strand starting at position 3588 of SEQ ID NO: 1245362
ugaggauuaucuuucugcu

SEQ ID NO: 1556815 - RNA, 19 nt, Artificial Sequence
  Description of Artificial Sequence: Synthetic oligonucleotide
  Antisense strand to SEQ ID NO: 1556814
agcagaaagauaauccuca

SEQ ID NO: 1556816 - RNA, 19 nt, Artificial Sequence
  Description of Artificial Sequence: Synthetic oligonucleotide
  Sense strand starting at position 3664 of SEQ ID NO: 1245362
accaauggucuauguuuaa

SEQ ID NO: 1556817 - RNA, 19 nt, Artificial Sequence
  Description of Artificial Sequence: Synthetic oligonucleotide
  Antisense strand to SEQ ID NO: 1556816
uuaaacauagaccauuggu

SEQ ID NO: 1556818 - RNA, 19 nt, Artificial Sequence
  Description of Artificial Sequence: Synthetic oligonucleotide
  Sense strand starting at position 3667 of SEQ ID NO: 1245362
aauggucuauguuuaagca

SEQ ID NO: 1556819 - RNA, 19 nt, Artificial Sequence
  Description of Artificial Sequence: Synthetic oligonucleotide
  Antisense strand to SEQ ID NO: 1556818
ugcuuaaacauagaccauu

SEQ ID NO: 1556820 - RNA, 19 nt, Artificial Sequence
  Description of Artificial Sequence: Synthetic oligonucleotide
  Sense strand starting at position 3763 of SEQ ID NO: 1245362
ucucuaggucuccauuacu

SEQ ID NO: 1556821 - RNA, 19 nt, Artificial Sequence
  Description of Artificial Sequence: Synthetic oligonucleotide
  Antisense strand to SEQ ID NO: 1556820
aguaauggagaccuagaga

SEQ ID NO: 1556822 - RNA, 19 nt, Artificial Sequence
  Description of Artificial Sequence: Synthetic oligonucleotide
  Sense strand starting at position 3812 of SEQ ID NO: 1245362
uguugcuuagugcugugau

SEQ ID NO: 1556823 - RNA, 19 nt, Artificial Sequence
  Description of Artificial Sequence: Synthetic oligonucleotide
  Antisense strand to SEQ ID NO: 1556822
aucacagcacuaagcaaca

SEQ ID NO: 1556824 - RNA, 19 nt, Artificial Sequence
  Description of Artificial Sequence: Synthetic oligonucleotide
  Sense strand starting at position 3824 of SEQ ID NO: 1245362
cugugauaauaguucuuaa

SEQ ID NO: 1556825 - RNA, 19 nt, Artificial Sequence
  Description of Artificial Sequence: Synthetic oligonucleotide
  Antisense strand to SEQ ID NO: 1556824
uuaagaacuauuaucacag

SEQ ID NO: 1556826 - RNA, 19 nt, Artificial Sequence
  Description of Artificial Sequence: Synthetic oligonucleotide
  Sense strand starting at position 3892 of SEQ ID NO: 1245362
uggugacaaugccugcaaa

SEQ ID NO: 1556827 - RNA, 19 nt, Artificial Sequence
  Description of Artificial Sequence: Synthetic oligonucleotide
  Antisense strand to SEQ ID NO: 1556826
uuugcaggcauugucacca

SEQ ID NO: 1556828 - RNA, 19 nt, Artificial Sequence
  Description of Artificial Sequence: Synthetic oligonucleotide
  Sense strand starting at position 132 of SEQ ID NO: 1245363
uggcaugagaccuggaaau

SEQ ID NO: 1556829 - RNA, 19 nt, Artificial Sequence
  Description of Artificial Sequence: Synthetic oligonucleotide
  Antisense strand to SEQ ID NO: 1556828
auuuccaggucucaugcca

SEQ ID NO: 1556830 - RNA, 19 nt, Artificial Sequence
  Description of Artificial Sequence: Synthetic oligonucleotide
  Sense strand starting at position 153 of SEQ ID NO: 1245363
ugaugaguuucuccuuguu

SEQ ID NO: 1556831 - RNA, 19 nt, Artificial Sequence
  Description of Artificial Sequence: Synthetic oligonucleotide
  Antisense strand to SEQ ID NO: 1556830
aacaaggagaaacucauca

SEQ ID NO: 1556832 - RNA, 19 nt, Artificial Sequence
  Description of Artificial Sequence: Synthetic oligonucleotide
  Sense strand starting at position 155 of SEQ ID NO: 1245363
augaguuucuccuuguuug

SEQ ID NO: 1556833 - RNA, 19 nt, Artificial Sequence
  Description of Artificial Sequence: Synthetic oligonucleotide
  Antisense strand to SEQ ID NO: 1556832
caaacaaggagaaacucau

SEQ ID NO: 1556834 - RNA, 19 nt, Artificial Sequence
  Description of Artificial Sequence: Synthetic oligonucleotide
  Sense strand starting at position 1404 of SEQ ID NO: 1245363
ccgcguuugcgcagaugaa

SEQ ID NO: 1556835 - RNA, 19 nt, Artificial Sequence
  Description of Artificial Sequence: Synthetic oligonucleotide
  Antisense strand to SEQ ID NO: 1556834
uucaucugcgcaaacgcgg

SEQ ID NO: 1556836 - RNA, 19 nt, Artificial Sequence
  Description of Artificial Sequence: Synthetic oligonucleotide
  Sense strand starting at position 1452 of SEQ ID NO: 1245363
gcccgaagaccuugagcuu

SEQ ID NO: 1556837 - RNA, 19 nt, Artificial Sequence
  Description of Artificial Sequence: Synthetic oligonucleotide
  Antisense strand to SEQ ID NO: 1556836
aagcucaaggucuucgggc

SEQ ID NO: 1556838 - RNA, 19 nt, Artificial Sequence
  Description of Artificial Sequence: Synthetic oligonucleotide
  Sense strand starting at position 1458 of SEQ ID NO: 1245363
agaccuugagcuugucaga

SEQ ID NO: 1556839 - RNA, 19 nt, Artificial Sequence
  Description of Artificial Sequence: Synthetic oligonucleotide
  Antisense strand to SEQ ID NO: 1556838
ucugacaagcucaaggucu

SEQ ID NO: 1556840 - RNA, 19 nt, Artificial Sequence
  Description of Artificial Sequence: Synthetic oligonucleotide
  Sense strand starting at position 1792 of SEQ ID NO: 1245363
ggcgaugagcccugagaug

SEQ ID NO: 1556841 - RNA, 19 nt, Artificial Sequence
  Description of Artificial Sequence: Synthetic oligonucleotide
  Antisense strand to SEQ ID NO: 1556840
caucucagggcucaucgcc

SEQ ID NO: 1556842 - RNA, 19 nt, Artificial Sequence
  Description of Artificial Sequence: Synthetic oligonucleotide
  Sense strand starting at position 2245 of SEQ ID NO: 1245363
caacuaauaggugguuaua

SEQ ID NO: 1556843 - RNA, 19 nt, Artificial Sequence
  Description of Artificial Sequence: Synthetic oligonucleotide
  Antisense strand to SEQ ID NO: 1556842
uauaaccaccuauuaguug

SEQ ID NO: 1556844 - RNA, 19 nt, Artificial Sequence
  Description of Artificial Sequence: Synthetic oligonucleotide
  Sense strand starting at position 2247 of SEQ ID NO: 1245363
acuaauaggugguuauaaa

SEQ ID NO: 1556845 - RNA, 19 nt, Artificial Sequence
  Description of Artificial Sequence: Synthetic oligonucleotide
  Antisense strand to SEQ ID NO: 1556844
uuuauaaccaccuauuagu

SEQ ID NO: 1556846 - RNA, 19 nt, Artificial Sequence
  Description of Artificial Sequence: Synthetic oligonucleotide
  Sense strand starting at position 2301 of SEQ ID NO: 1245363
cugagaauaugccuucuuc

SEQ ID NO: 1556847 - RNA, 19 nt, Artificial Sequence
  Description of Artificial Sequence: Synthetic oligonucleotide
  Antisense strand to SEQ ID NO: 1556846
gaagaaggcauauucucag

SEQ ID NO: 1556848 - RNA, 19 nt, Artificial Sequence
  Description of Artificial Sequence: Synthetic oligonucleotide
  Sense strand starting at position 2355 of SEQ ID NO: 1245363
ugguaauaugaggguuuga

SEQ ID NO: 1556849 - RNA, 19 nt, Artificial Sequence
  Description of Artificial Sequence: Synthetic oligonucleotide
  Antisense strand to SEQ ID NO: 1556848
ucaaacccucauauuacca

SEQ ID NO: 1556850 - RNA, 19 nt, Artificial Sequence
  Description of Artificial Sequence: Synthetic oligonucleotide
  Sense strand starting at position 2360 of SEQ ID NO: 1245363
auaugaggguuugaaauga

SEQ ID NO: 1556851 - RNA, 19 nt, Artificial Sequence
  Description of Artificial Sequence: Synthetic oligonucleotide
  Antisense strand to SEQ ID NO: 1556850
ucauuucaaacccucauau

SEQ ID NO: 1556852 - RNA, 19 nt, Artificial Sequence
  Description of Artificial Sequence: Synthetic oligonucleotide
  Sense strand starting at position 2495 of SEQ ID NO: 1245363
ggagcugucacaggaguuu

SEQ ID NO: 1556853 - RNA, 19 nt, Artificial Sequence
  Description of Artificial Sequence: Synthetic oligonucleotide
  Antisense strand to SEQ ID NO: 1556852
aaacuccugugacagcucc

SEQ ID NO: 1556854 - RNA, 19 nt, Artificial Sequence
  Description of Artificial Sequence: Synthetic oligonucleotide
  Sense strand starting at position 2578 of SEQ ID NO: 1245363
guuacuacuguauaaagac

SEQ ID NO: 1556855 - RNA, 19 nt, Artificial Sequence
  Description of Artificial Sequence: Synthetic oligonucleotide
  Antisense strand to SEQ ID NO: 1556854
gucuuuauacaguaguaac

SEQ ID NO: 1556856 - RNA, 19 nt, Artificial Sequence
  Description of Artificial Sequence: Synthetic oligonucleotide
  Sense strand starting at position 2663 of SEQ ID NO: 1245363
ucagauaauuaauagagag

SEQ ID NO: 1556857 - RNA, 19 nt, Artificial Sequence
  Description of Artificial Sequence: Synthetic oligonucleotide
  Antisense strand to SEQ ID NO: 1556856
cucucuauuaauuaucuga

SEQ ID NO: 1556858 - RNA, 19 nt, Artificial Sequence
  Description of Artificial Sequence: Synthetic oligonucleotide
  Sense strand starting at position 2856 of SEQ ID NO: 1245363
uuagguaacugcuuaugua

SEQ ID NO: 1556859 - RNA, 19 nt, Artificial Sequence
  Description of Artificial Sequence: Synthetic oligonucleotide
  Antisense strand to SEQ ID NO: 1556858
uacauaagcaguuaccuaa

SEQ ID NO: 1556860 - RNA, 19 nt, Artificial Sequence
  Description of Artificial Sequence: Synthetic oligonucleotide
  Sense strand starting at position 2857 of SEQ ID NO: 1245363
uagguaacugcuuauguaa

SEQ ID NO: 1556861 - RNA, 19 nt, Artificial Sequence
  Description of Artificial Sequence: Synthetic oligonucleotide
  Antisense strand to SEQ ID NO: 1556860
uuacauaagcaguuaccua

SEQ ID NO: 1556862 - RNA, 19 nt, Artificial Sequence
  Description of Artificial Sequence: Synthetic oligonucleotide
  Sense strand starting at position 2925 of SEQ ID NO: 1245363
aagguaucaugugucagau

SEQ ID NO: 1556863 - RNA, 19 nt, Artificial Sequence
  Description of Artificial Sequence: Synthetic oligonucleotide
  Antisense strand to SEQ ID NO: 1556862
aucugacacaugauaccuu

SEQ ID NO: 1556864 - RNA, 19 nt, Artificial Sequence
  Description of Artificial Sequence: Synthetic oligonucleotide
  Sense strand starting at position 3097 of SEQ ID NO: 1245363
ucaaaugaguaggcaacua

SEQ ID NO: 1556865 - RNA, 19 nt, Artificial Sequence
  Description of Artificial Sequence: Synthetic oligonucleotide
  Antisense strand to SEQ ID NO: 1556864
uaguugccuacucauuuga

SEQ ID NO: 1556866 - RNA, 19 nt, Artificial Sequence
  Description of Artificial Sequence: Synthetic oligonucleotide
  Sense strand starting at position 3120 of SEQ ID NO: 1245363
gguaaagcagucuacauaa

SEQ ID NO: 1556867 - RNA, 19 nt, Artificial Sequence
  Description of Artificial Sequence: Synthetic oligonucleotide
  Antisense strand to SEQ ID NO: 1556866
uuauguagacugcuuuacc

SEQ ID NO: 1556868 - RNA, 19 nt, Artificial Sequence
  Description of Artificial Sequence: Synthetic oligonucleotide
  Sense strand starting at position 3139 of SEQ ID NO: 1245363
uaugaugauuuguagaaug

SEQ ID NO: 1556869 - RNA, 19 nt, Artificial Sequence
  Description of Artificial Sequence: Synthetic oligonucleotide
  Antisense strand to SEQ ID NO: 1556868
cauucuacaaaucaucaua

SEQ ID NO: 1556870 - RNA, 19 nt, Artificial Sequence
  Description of Artificial Sequence: Synthetic oligonucleotide
  Sense strand starting at position 3209 of SEQ ID NO: 1245363
ucccuuucucaugagguca

SEQ ID NO: 1556871 - RNA, 19 nt, Artificial Sequence
  Description of Artificial Sequence: Synthetic oligonucleotide
  Antisense strand to SEQ ID NO: 1556870
ugaccucaugagaaaggga

SEQ ID NO: 1556872 - RNA, 19 nt, Artificial Sequence
  Description of Artificial Sequence: Synthetic oligonucleotide
  Sense strand starting at position 3246 of SEQ ID NO: 1245363
ggcaacaaucaauggacua

SEQ ID NO: 1556873 - RNA, 19 nt, Artificial Sequence
  Description of Artificial Sequence: Synthetic oligonucleotide
  Antisense strand to SEQ ID NO: 1556872
uaguccauugauuguugcc

SEQ ID NO: 1556874 - RNA, 19 nt, Artificial Sequence
  Description of Artificial Sequence: Synthetic oligonucleotide
  Sense strand starting at position 3364 of SEQ ID NO: 1245363
gcuguaucuccagaguaga

SEQ ID NO: 1556875 - RNA, 19 nt, Artificial Sequence
  Description of Artificial Sequence: Synthetic oligonucleotide
  Antisense strand to SEQ ID NO: 1556874
ucuacucuggagauacagc

SEQ ID NO: 1556876 - RNA, 19 nt, Artificial Sequence
  Description of Artificial Sequence: Synthetic oligonucleotide
  Sense strand starting at position 3448 of SEQ ID NO: 1245363
cugaaagacuuagauauca

SEQ ID NO: 1556877 - RNA, 19 nt, Artificial Sequence
  Description of Artificial Sequence: Synthetic oligonucleotide
  Antisense strand to SEQ ID NO: 1556876
ugauaucuaagucuuucag

SEQ ID NO: 1556878 - RNA, 19 nt, Artificial Sequence
  Description of Artificial Sequence: Synthetic oligonucleotide
  Sense strand starting at position 3534 of SEQ ID NO: 1245363
aaaugugugguagguagaa

SEQ ID NO: 1556879 - RNA, 19 nt, Artificial Sequence
  Description of Artificial Sequence: Synthetic oligonucleotide
  Antisense strand to SEQ ID NO: 1556878
uucuaccuaccacacauuu

SEQ ID NO: 1556880 - RNA, 19 nt, Artificial Sequence
  Description of Artificial Sequence: Synthetic oligonucleotide
  Sense strand starting at position 3629 of SEQ ID NO: 1245363
uuucuccaucagugggaau

SEQ ID NO: 1556881 - RNA, 19 nt, Artificial Sequence
  Description of Artificial Sequence: Synthetic oligonucleotide
  Antisense strand to SEQ ID NO: 1556880
auucccacugauggagaaa

SEQ ID NO: 1556882 - RNA, 19 nt, Artificial Sequence
  Description of Artificial Sequence: Synthetic oligonucleotide
  Sense strand starting at position 3641 of SEQ ID NO: 1245363
ugggaauguaaaugguaau

SEQ ID NO: 1556883 - RNA, 19 nt, Artificial Sequence
  Description of Artificial Sequence: Synthetic oligonucleotide
  Antisense strand to SEQ ID NO: 1556882
auuaccauuuacauuccca

SEQ ID NO: 1556884 - RNA, 19 nt, Artificial Sequence
  Description of Artificial Sequence: Synthetic oligonucleotide
  Sense strand starting at position 3642 of SEQ ID NO: 1245363
gggaauguaaaugguaauc

SEQ ID NO: 1556885 - RNA, 19 nt, Artificial Sequence
  Description of Artificial Sequence: Synthetic oligonucleotide
  Antisense strand to SEQ ID NO: 1556884
gauuaccauuuacauuccc

SEQ ID NO: 1556886 - RNA, 19 nt, Artificial Sequence
  Description of Artificial Sequence: Synthetic oligonucleotide
  Sense strand starting at position 3682 of SEQ ID NO: 1245363
aucaauaucucuuugggac

SEQ ID NO: 1556887 - RNA, 19 nt, Artificial Sequence
  Description of Artificial Sequence: Synthetic oligonucleotide
  Antisense strand to SEQ ID NO: 1556886
gucccaaagagauauugau

SEQ ID NO: 1556888 - RNA, 19 nt, Artificial Sequence
  Description of Artificial Sequence: Synthetic oligonucleotide
  Sense strand starting at position 3683 of SEQ ID NO: 1245363
ucaauaucucuuugggacu

SEQ ID NO: 1556889 - RNA, 19 nt, Artificial Sequence
  Description of Artificial Sequence: Synthetic oligonucleotide
  Antisense strand to SEQ ID NO: 1556888
agucccaaagagauauuga

SEQ ID NO: 1556890 - RNA, 19 nt, Artificial Sequence
  Description of Artificial Sequence: Synthetic oligonucleotide
  Sense strand starting at position 3696 of SEQ ID NO: 1245363
gggacuuagcuggguuuca

SEQ ID NO: 1556891 - RNA, 19 nt, Artificial Sequence
  Description of Artificial Sequence: Synthetic oligonucleotide
  Antisense strand to SEQ ID NO: 1556890
ugaaacccagcuaaguccc

SEQ ID NO: 1556892 - RNA, 19 nt, Artificial Sequence
  Description of Artificial Sequence: Synthetic oligonucleotide
  Sense strand starting at position 3867 of SEQ ID NO: 1245363
gugguuguaacauagagac

SEQ ID NO: 1556893 - RNA, 19 nt, Artificial Sequence
  Description of Artificial Sequence: Synthetic oligonucleotide
  Antisense strand to SEQ ID NO: 1556892
gucucuauguuacaaccac

SEQ ID NO: 1556894 - RNA, 19 nt, Artificial Sequence
  Description of Artificial Sequence: Synthetic oligonucleotide
  Sense strand starting at position 3893 of SEQ ID NO: 1245363
uuaagugauccuuggaguc

SEQ ID NO: 1556895 - RNA, 19 nt, Artificial Sequence
  Description of Artificial Sequence: Synthetic oligonucleotide
  Antisense strand to SEQ ID NO: 1556894
gacuccaaggaucacuuaa

SEQ ID NO: 1556896 - RNA, 19 nt, Artificial Sequence
  Description of Artificial Sequence: Synthetic oligonucleotide
  Sense strand starting at position 3903 of SEQ ID NO: 1245363
cuuggaguccagcaucuua

SEQ ID NO: 1556897 - RNA, 19 nt, Artificial Sequence
  Description of Artificial Sequence: Synthetic oligonucleotide
  Antisense strand to SEQ ID NO: 1556896
uaagaugcuggacuccaag

SEQ ID NO: 1556898 - RNA, 19 nt, Artificial Sequence
  Description of Artificial Sequence: Synthetic oligonucleotide
  Sense strand starting at position 3927 of SEQ ID NO: 1245363
ucuggagauccgugguuau

SEQ ID NO: 1556899 - RNA, 19 nt, Artificial Sequence
  Description of Artificial Sequence: Synthetic oligonucleotide
  Antisense strand to SEQ ID NO: 1556898
auaaccacggaucuccaga

SEQ ID NO: 1556900 - RNA, 19 nt, Artificial Sequence
  Description of Artificial Sequence: Synthetic oligonucleotide
  Sense strand starting at position 3930 of SEQ ID NO: 1245363
ggagauccgugguuaucuu

SEQ ID NO: 1556901 - RNA, 19 nt, Artificial Sequence
  Description of Artificial Sequence: Synthetic oligonucleotide
  Antisense strand to SEQ ID NO: 1556900
aagauaaccacggaucucc

SEQ ID NO: 1556902 - RNA, 19 nt, Artificial Sequence
  Description of Artificial Sequence: Synthetic oligonucleotide
  Sense strand starting at position 3931 of SEQ ID NO: 1245363
gagauccgugguuaucuua

SEQ ID NO: 1556903 - RNA, 19 nt, Artificial Sequence
  Description of Artificial Sequence: Synthetic oligonucleotide
  Antisense strand to SEQ ID NO: 1556902
uaagauaaccacggaucuc

SEQ ID NO: 1556904 - RNA, 19 nt, Artificial Sequence
  Description of Artificial Sequence: Synthetic oligonucleotide
  Sense strand starting at position 3934 of SEQ ID NO: 1245363
auccgugguuaucuuaaga

SEQ ID NO: 1556905 - RNA, 19 nt, Artificial Sequence
  Description of Artificial Sequence: Synthetic oligonucleotide
  Antisense strand to SEQ ID NO: 1556904
ucuuaagauaaccacggau

SEQ ID NO: 1556906 - RNA, 19 nt, Artificial Sequence
  Description of Artificial Sequence: Synthetic oligonucleotide
  Sense strand starting at position 3942 of SEQ ID NO: 1245363
uuaucuuaagaaggcuuua

SEQ ID NO: 1556907 - RNA, 19 nt, Artificial Sequence
  Description of Artificial Sequence: Synthetic oligonucleotide
  Antisense strand to SEQ ID NO: 1556906
uaaagccuucuuaagauaa

SEQ ID NO: 1556908 - RNA, 19 nt, Artificial Sequence
  Description of Artificial Sequence: Synthetic oligonucleotide
  Sense strand starting at position 383 of SEQ ID NO: 1245364
agaggacucuuugucccau

SEQ ID NO: 1556909 - RNA, 19 nt, Artificial Sequence
  Description of Artificial Sequence: Synthetic oligonucleotide
  Antisense strand to SEQ ID NO: 1556908
augggacaaagaguccucu

SEQ ID NO: 1556910 - RNA, 19 nt, Artificial Sequence
  Description of Artificial Sequence: Synthetic oligonucleotide
  Sense strand starting at position 519 of SEQ ID NO: 1245364
ggcuuaucgccauaacuaa

SEQ ID NO: 1556911 - RNA, 19 nt, Artificial Sequence
  Description of Artificial Sequence: Synthetic oligonucleotide
  Antisense strand to SEQ ID NO: 1556910
uuaguuauggcgauaagcc

SEQ ID NO: 1556912 - RNA, 19 nt, Artificial Sequence
  Description of Artificial Sequence: Synthetic oligonucleotide
  Sense strand starting at position 876 of SEQ ID NO: 1245364
gggagcauccucugaauau

SEQ ID NO: 1556913 - RNA, 19 nt, Artificial Sequence
  Description of Artificial Sequence: Synthetic oligonucleotide
  Antisense strand to SEQ ID NO: 1556912
auauucagaggaugcuccc

SEQ ID NO: 1556914 - RNA, 19 nt, Artificial Sequence
  Description of Artificial Sequence: Synthetic oligonucleotide
  Sense strand starting at position 877 of SEQ ID NO: 1245364
ggagcauccucugaauaua

SEQ ID NO: 1556915 - RNA, 19 nt, Artificial Sequence
  Description of Artificial Sequence: Synthetic oligonucleotide
  Antisense strand to SEQ ID NO: 1556914
uauauucagaggaugcucc

SEQ ID NO: 1556916 - RNA, 19 nt, Artificial Sequence
  Description of Artificial Sequence: Synthetic oligonucleotide
  Sense strand starting at position 931 of SEQ ID NO: 1245364
aggaaaugcuguuugucga

SEQ ID NO: 1556917 - RNA, 19 nt, Artificial Sequence
  Description of Artificial Sequence: Synthetic oligonucleotide
  Antisense strand to SEQ ID NO: 1556916
ucgacaaacagcauuuccu

SEQ ID NO: 1556918 - RNA, 19 nt, Artificial Sequence
  Description of Artificial Sequence: Synthetic oligonucleotide
  Sense strand starting at position 932 of SEQ ID NO: 1245364
ggaaaugcuguuugucgau

SEQ ID NO: 1556919 - RNA, 19 nt, Artificial Sequence
  Description of Artificial Sequence: Synthetic oligonucleotide
  Antisense strand to SEQ ID NO: 1556918
aucgacaaacagcauuucc

SEQ ID NO: 1556920 - RNA, 19 nt, Artificial Sequence
  Description of Artificial Sequence: Synthetic oligonucleotide
  Sense strand starting at position 1246 of SEQ ID NO: 1245364
augucaugacauuaguuua

SEQ ID NO: 1556921 - RNA, 19 nt, Artificial Sequence
  Description of Artificial Sequence: Synthetic oligonucleotide
  Antisense strand to SEQ ID NO: 1556920
uaaacuaaugucaugacau

SEQ ID NO: 1556922 - RNA, 19 nt, Artificial Sequence
  Description of Artificial Sequence: Synthetic oligonucleotide
  Sense strand starting at position 1385 of SEQ ID NO: 1245364
acggcuuaaucucuucuau

SEQ ID NO: 1556923 - RNA, 19 nt, Artificial Sequence
  Description of Artificial Sequence: Synthetic oligonucleotide
  Antisense strand to SEQ ID NO: 1556922
auagaagagauuaagccgu

SEQ ID NO: 1556924 - RNA, 19 nt, Artificial Sequence
  Description of Artificial Sequence: Synthetic oligonucleotide
  Sense strand starting at position 1462 of SEQ ID NO: 1245364
caggaugugucagauuucu

SEQ ID NO: 1556925 - RNA, 19 nt, Artificial Sequence
  Description of Artificial Sequence: Synthetic oligonucleotide
  Antisense strand to SEQ ID NO: 1556924
agaaaucugacacauccug

SEQ ID NO: 1556926 - RNA, 19 nt, Artificial Sequence
  Description of Artificial Sequence: Synthetic oligonucleotide
  Sense strand starting at position 1553 of SEQ ID NO: 1245364
aaccaaguucccgggaaau

SEQ ID NO: 1556927 - RNA, 19 nt, Artificial Sequence
  Description of Artificial Sequence: Synthetic oligonucleotide
  Antisense strand to SEQ ID NO: 1556926
auuucccgggaacuugguu

SEQ ID NO: 1556928 - RNA, 19 nt, Artificial Sequence
  Description of Artificial Sequence: Synthetic oligonucleotide
  Sense strand starting at position 1584 of SEQ ID NO: 1245364
aauccuguuucccuggaga

SEQ ID NO: 1556929 - RNA, 19 nt, Artificial Sequence
  Description of Artificial Sequence: Synthetic oligonucleotide
  Antisense strand to SEQ ID NO: 1556928
ucuccagggaaacaggauu

SEQ ID NO: 1556930 - RNA, 19 nt, Artificial Sequence
  Description of Artificial Sequence: Synthetic oligonucleotide
  Sense strand starting at position 1586 of SEQ ID NO: 1245364
uccuguuucccuggagaug

SEQ ID NO: 1556931 - RNA, 19 nt, Artificial Sequence
  Description of Artificial Sequence: Synthetic oligonucleotide
  Antisense strand to SEQ ID NO: 1556930
caucuccagggaaacagga

SEQ ID NO: 1556932 - RNA, 19 nt, Artificial Sequence
  Description of Artificial Sequence: Synthetic oligonucleotide
  Sense strand starting at position 1587 of SEQ ID NO: 1245364
ccuguuucccuggagaugu

SEQ ID NO: 1556933 - RNA, 19 nt, Artificial Sequence
  Description of Artificial Sequence: Synthetic oligonucleotide
  Antisense strand to SEQ ID NO: 1556932
acaucuccagggaaacagg

SEQ ID NO: 1556934 - RNA, 19 nt, Artificial Sequence
  Description of Artificial Sequence: Synthetic oligonucleotide
  Sense strand starting at position 1598 of SEQ ID NO: 1245364
ggagauguaccgugcuuua

SEQ ID NO: 1556935 - RNA, 19 nt, Artificial Sequence
  Description of Artificial Sequence: Synthetic oligonucleotide
  Antisense strand to SEQ ID NO: 1556934
uaaagcacgguacaucucc

SEQ ID NO: 1556936 - RNA, 19 nt, Artificial Sequence
  Description of Artificial Sequence: Synthetic oligonucleotide
  Sense strand starting at position 1610 of SEQ ID NO: 1245364
ugcuuuacagugcaggaaa

SEQ ID NO: 1556937 - RNA, 19 nt, Artificial Sequence
  Description of Artificial Sequence: Synthetic oligonucleotide
  Antisense strand to SEQ ID NO: 1556936
uuuccugcacuguaaagca

SEQ ID NO: 1556938 - RNA, 19 nt, Artificial Sequence
  Description of Artificial Sequence: Synthetic oligonucleotide
  Sense strand starting at position 1745 of SEQ ID NO: 1245364
uccguuugucacgggaaga

SEQ ID NO: 1556939 - RNA, 19 nt, Artificial Sequence
  Description of Artificial Sequence: Synthetic oligonucleotide
  Antisense strand to SEQ ID NO: 1556938
ucuucccgugacaaacgga

SEQ ID NO: 1556940 - RNA, 19 nt, Artificial Sequence
  Description of Artificial Sequence: Synthetic oligonucleotide
  Sense strand starting at position 1746 of SEQ ID NO: 1245364
ccguuugucacgggaagau

SEQ ID NO: 1556941 - RNA, 19 nt, Artificial Sequence
  Description of Artificial Sequence: Synthetic oligonucleotide
  Antisense strand to SEQ ID NO: 1556940
aucuucccgugacaaacgg

SEQ ID NO: 1556942 - RNA, 19 nt, Artificial Sequence
  Description of Artificial Sequence: Synthetic oligonucleotide
  Sense strand starting at position 1755 of SEQ ID NO: 1245364
acgggaagauucuccgacu

SEQ ID NO: 1556943 - RNA, 19 nt, Artificial Sequence
  Description of Artificial Sequence: Synthetic oligonucleotide
  Antisense strand to SEQ ID NO: 1556942
agucggagaaucuucccgu

SEQ ID NO: 1556944 - RNA, 19 nt, Artificial Sequence
  Description of Artificial Sequence: Synthetic oligonucleotide
  Sense strand starting at position 1758 of SEQ ID NO: 1245364
ggaagauucuccgacucaa

SEQ ID NO: 1556945 - RNA, 19 nt, Artificial Sequence
  Description of Artificial Sequence: Synthetic oligonucleotide
  Antisense strand to SEQ ID NO: 1556944
uugagucggagaaucuucc

SEQ ID NO: 1556946 - RNA, 19 nt, Artificial Sequence
  Description of Artificial Sequence: Synthetic oligonucleotide
  Sense strand starting at position 1817 of SEQ ID NO: 1245364
caccuuguucgugagguaa

SEQ ID NO: 1556947 - RNA, 19 nt, Artificial Sequence
  Description of Artificial Sequence: Synthetic oligonucleotide
  Antisense strand to SEQ ID NO: 1556946
uuaccucacgaacaaggug

SEQ ID NO: 1556948 - RNA, 19 nt, Artificial Sequence
  Description of Artificial Sequence: Synthetic oligonucleotide
  Sense strand starting at position 2046 of SEQ ID NO: 1245364
cggcgucugccuucuuaaa

SEQ ID NO: 1556949 - RNA, 19 nt, Artificial Sequence
  Description of Artificial Sequence: Synthetic oligonucleotide
  Antisense strand to SEQ ID NO: 1556948
uuuaagaaggcagacgccg

SEQ ID NO: 1556950 - RNA, 19 nt, Artificial Sequence
  Description of Artificial Sequence: Synthetic oligonucleotide
  Sense strand starting at position 2185 of SEQ ID NO: 1245364
cccaucaguguuuaaagaa

SEQ ID NO: 1556951 - RNA, 19 nt, Artificial Sequence
  Description of Artificial Sequence: Synthetic oligonucleotide
  Antisense strand to SEQ ID NO: 1556950
uucuuuaaacacugauggg

SEQ ID NO: 1556952 - RNA, 19 nt, Artificial Sequence
  Description of Artificial Sequence: Synthetic oligonucleotide
  Sense strand starting at position 2284 of SEQ ID NO: 1245364
gucuguagcgcuuuggcaa

SEQ ID NO: 1556953 - RNA, 19 nt, Artificial Sequence
  Description of Artificial Sequence: Synthetic oligonucleotide
  Antisense strand to SEQ ID NO: 1556952
uugccaaagcgcuacagac

SEQ ID NO: 1556954 - RNA, 19 nt, Artificial Sequence
  Description of Artificial Sequence: Synthetic oligonucleotide
  Sense strand starting at position 2369 of SEQ ID NO: 1245364
uggaauugaguauagguuu

SEQ ID NO: 1556955 - RNA, 19 nt, Artificial Sequence
  Description of Artificial Sequence: Synthetic oligonucleotide
  Antisense strand to SEQ ID NO: 1556954
aaaccuauacucaauucca

SEQ ID NO: 1556956 - RNA, 19 nt, Artificial Sequence
  Description of Artificial Sequence: Synthetic oligonucleotide
  Sense strand starting at position 2478 of SEQ ID NO: 1245364
uccuauuccuagucuauag

SEQ ID NO: 1556957 - RNA, 19 nt, Artificial Sequence
  Description of Artificial Sequence: Synthetic oligonucleotide
  Antisense strand to SEQ ID NO: 1556956
cuauagacuaggaauagga

SEQ ID NO: 1556958 - RNA, 19 nt, Artificial Sequence
  Description of Artificial Sequence: Synthetic oligonucleotide
  Sense strand starting at position 2515 of SEQ ID NO: 1245364
ugaggcuuccggcaaaugu

SEQ ID NO: 1556959 - RNA, 19 nt, Artificial Sequence
  Description of Artificial Sequence: Synthetic oligonucleotide
  Antisense strand to SEQ ID NO: 1556958
acauuugccggaagccuca

SEQ ID NO: 1556960 - RNA, 19 nt, Artificial Sequence
  Description of Artificial Sequence: Synthetic oligonucleotide
  Sense strand starting at position 2524 of SEQ ID NO: 1245364
cggcaaauguuaguaaaca

SEQ ID NO: 1556961 - RNA, 19 nt, Artificial Sequence
  Description of Artificial Sequence: Synthetic oligonucleotide
  Antisense strand to SEQ ID NO: 1556960
uguuuacuaacauuugccg

SEQ ID NO: 1556962 - RNA, 19 nt, Artificial Sequence
  Description of Artificial Sequence: Synthetic oligonucleotide
  Sense strand starting at position 2588 of SEQ ID NO: 1245364
aguguucucugccuguaga

SEQ ID NO: 1556963 - RNA, 19 nt, Artificial Sequence
  Description of Artificial Sequence: Synthetic oligonucleotide
  Antisense strand to SEQ ID NO: 1556962
ucuacaggcagagaacacu

SEQ ID NO: 1556964 - RNA, 19 nt, Artificial Sequence
  Description of Artificial Sequence: Synthetic oligonucleotide
  Sense strand starting at position 2589 of SEQ ID NO: 1245364
guguucucugccuguagaa

SEQ ID NO: 1556965 - RNA, 19 nt, Artificial Sequence
  Description of Artificial Sequence: Synthetic oligonucleotide
  Antisense strand to SEQ ID NO: 1556964
uucuacaggcagagaacac

SEQ ID NO: 1556966 - RNA, 19 nt, Artificial Sequence
  Description of Artificial Sequence: Synthetic oligonucleotide
  Sense strand starting at position 2591 of SEQ ID NO: 1245364
guucucugccuguagaaac

SEQ ID NO: 1556967 - RNA, 19 nt, Artificial Sequence
  Description of Artificial Sequence: Synthetic oligonucleotide
  Antisense strand to SEQ ID NO: 1556966
guuucuacaggcagagaac

SEQ ID NO: 1556968 - RNA, 19 nt, Artificial Sequence
  Description of Artificial Sequence: Synthetic oligonucleotide
  Sense strand starting at position 2982 of SEQ ID NO: 1245364
acuuguacagauggguaua

SEQ ID NO: 1556969 - RNA, 19 nt, Artificial Sequence
  Description of Artificial Sequence: Synthetic oligonucleotide
  Antisense strand to SEQ ID NO: 1556968
uauacccaucuguacaagu

SEQ ID NO: 1556970 - RNA, 19 nt, Artificial Sequence
  Description of Artificial Sequence: Synthetic oligonucleotide
  Sense strand starting at position 2995 of SEQ ID NO: 1245364
gguauagcuuucucuacca

SEQ ID NO: 1556971 - RNA, 19 nt, Artificial Sequence
  Description of Artificial Sequence: Synthetic oligonucleotide
  Antisense strand to SEQ ID NO: 1556970
ugguagagaaagcuauacc

SEQ ID NO: 1556972 - RNA, 19 nt, Artificial Sequence
  Description of Artificial Sequence: Synthetic oligonucleotide
  Sense strand starting at position 3139 of SEQ ID NO: 1245364
auucgucucgugguaguga

SEQ ID NO: 1556973 - RNA, 19 nt, Artificial Sequence
  Description of Artificial Sequence: Synthetic oligonucleotide
  Antisense strand to SEQ ID NO: 1556972
ucacuaccacgagacgaau

SEQ ID NO: 1556974 - RNA, 19 nt, Artificial Sequence
  Description of Artificial Sequence: Synthetic oligonucleotide
  Sense strand starting at position 3141 of SEQ ID NO: 1245364
ucgucucgugguagugaau

SEQ ID NO: 1556975 - RNA, 19 nt, Artificial Sequence
  Description of Artificial Sequence: Synthetic oligonucleotide
  Antisense strand to SEQ ID NO: 1556974
auucacuaccacgagacga

SEQ ID NO: 1556976 - RNA, 19 nt, Artificial Sequence
  Description of Artificial Sequence: Synthetic oligonucleotide
  Sense strand starting at position 3167 of SEQ ID NO: 1245364
cccagagcugauggucuua

SEQ ID NO: 1556977 - RNA, 19 nt, Artificial Sequence
  Description of Artificial Sequence: Synthetic oligonucleotide
  Antisense strand to SEQ ID NO: 1556976
uaagaccaucagcucuggg

SEQ ID NO: 1556978 - RNA, 19 nt, Artificial Sequence
  Description of Artificial Sequence: Synthetic oligonucleotide
  Sense strand starting at position 3169 of SEQ ID NO: 1245364
cagagcugauggucuuaua

SEQ ID NO: 1556979 - RNA, 19 nt, Artificial Sequence
  Description of Artificial Sequence: Synthetic oligonucleotide
  Antisense strand to SEQ ID NO: 1556978
uauaagaccaucagcucug

SEQ ID NO: 1556980 - RNA, 19 nt, Artificial Sequence
  Description of Artificial Sequence: Synthetic oligonucleotide
  Sense strand starting at position 3335 of SEQ ID NO: 1245364
ccaagucucggguaagucu

SEQ ID NO: 1556981 - RNA, 19 nt, Artificial Sequence
  Description of Artificial Sequence: Synthetic oligonucleotide
  Antisense strand to SEQ ID NO: 1556980
agacuuacccgagacuugg

SEQ ID NO: 1556982 - RNA, 19 nt, Artificial Sequence
  Description of Artificial Sequence: Synthetic oligonucleotide
  Sense strand starting at position 3373 of SEQ ID NO: 1245364
agacuaguacacuggguua

SEQ ID NO: 1556983 - RNA, 19 nt, Artificial Sequence
  Description of Artificial Sequence: Synthetic oligonucleotide
  Antisense strand to SEQ ID NO: 1556982
uaacccaguguacuagucu

SEQ ID NO: 1556984 - RNA, 19 nt, Artificial Sequence
  Description of Artificial Sequence: Synthetic oligonucleotide
  Sense strand starting at position 3375 of SEQ ID NO: 1245364
acuaguacacuggguuauu

SEQ ID NO: 1556985 - RNA, 19 nt, Artificial Sequence
  Description of Artificial Sequence: Synthetic oligonucleotide
  Antisense strand to SEQ ID NO: 1556984
aauaacccaguguacuagu

SEQ ID NO: 1556986 - RNA, 19 nt, Artificial Sequence
  Description of Artificial Sequence: Synthetic oligonucleotide
  Sense strand starting at position 3376 of SEQ ID NO: 1245364
cuaguacacuggguuauua

SEQ ID NO: 1556987 - RNA, 19 nt, Artificial Sequence
  Description of Artificial Sequence: Synthetic oligonucleotide
  Antisense strand to SEQ ID NO: 1556986
uaauaacccaguguacuag

SEQ ID NO: 1556988 - RNA, 19 nt, Artificial Sequence
  Description of Artificial Sequence: Synthetic oligonucleotide
  Sense strand starting at position 79 of SEQ ID NO: 1245365
cgcugacacccucaauaaa

SEQ ID NO: 1556989 - RNA, 19 nt, Artificial Sequence
  Description of Artificial Sequence: Synthetic oligonucleotide
  Antisense strand to SEQ ID NO: 1556988
uuuauugagggugucagcg

SEQ ID NO: 1556990 - RNA, 19 nt, Artificial Sequence
  Description of Artificial Sequence: Synthetic oligonucleotide
  Sense strand starting at position 106 of SEQ ID NO: 1245365
agcagaagugcucaggaaa

SEQ ID NO: 1556991 - RNA, 19 nt, Artificial Sequence
  Description of Artificial Sequence: Synthetic oligonucleotide
  Antisense strand to SEQ ID NO: 1556990
uuuccugagcacuucugcu

SEQ ID NO: 1556992 - RNA, 19 nt, Artificial Sequence
  Description of Artificial Sequence: Synthetic oligonucleotide
  Sense strand starting at position 172 of SEQ ID NO: 1245365
ggguugggaguguagacau

SEQ ID NO: 1556993 - RNA, 19 nt, Artificial Sequence
  Description of Artificial Sequence: Synthetic oligonucleotide
  Antisense strand to SEQ ID NO: 1556992
augucuacacucccaaccc

SEQ ID NO: 1556994 - RNA, 19 nt, Artificial Sequence
  Description of Artificial Sequence: Synthetic oligonucleotide
  Sense strand starting at position 180 of SEQ ID NO: 1245365
aguguagacaugcaaauga

SEQ ID NO: 1556995 - RNA, 19 nt, Artificial Sequence
  Description of Artificial Sequence: Synthetic oligonucleotide
  Antisense strand to SEQ ID NO: 1556994
ucauuugcaugucuacacu

SEQ ID NO: 1556996 - RNA, 19 nt, Artificial Sequence
  Description of Artificial Sequence: Synthetic oligonucleotide
  Sense strand starting at position 214 of SEQ ID NO: 1245365
gaggccgaauccuugacua

SEQ ID NO: 1556997 - RNA, 19 nt, Artificial Sequence
  Description of Artificial Sequence: Synthetic oligonucleotide
  Antisense strand to SEQ ID NO: 1556996
uagucaaggauucggccuc

SEQ ID NO: 1556998 - RNA, 19 nt, Artificial Sequence
  Description of Artificial Sequence: Synthetic oligonucleotide
  Sense strand starting at position 259 of SEQ ID NO: 1245365
ccgguuauacaccaaguuu

SEQ ID NO: 1556999 - RNA, 19 nt, Artificial Sequence
  Description of Artificial Sequence: Synthetic oligonucleotide
  Antisense strand to SEQ ID NO: 1556998
aaacuugguguauaaccgg

SEQ ID NO: 1557000 - RNA, 19 nt, Artificial Sequence
  Description of Artificial Sequence: Synthetic oligonucleotide
  Sense strand starting at position 328 of SEQ ID NO: 1245365
uauggucaagccugaaaga

SEQ ID NO: 1557001 - RNA, 19 nt, Artificial Sequence
  Description of Artificial Sequence: Synthetic oligonucleotide
  Antisense strand to SEQ ID NO: 1557000
ucuuucaggcuugaccaua

SEQ ID NO: 1557002 - RNA, 19 nt, Artificial Sequence
  Description of Artificial Sequence: Synthetic oligonucleotide
  Sense strand starting at position 357 of SEQ ID NO: 1245365
gaauuugggucugaaguga

SEQ ID NO: 1557003 - RNA, 19 nt, Artificial Sequence
  Description of Artificial Sequence: Synthetic oligonucleotide
  Antisense strand to SEQ ID NO: 1557002
ucacuucagacccaaauuc

SEQ ID NO: 1557004 - RNA, 19 nt, Artificial Sequence
  Description of Artificial Sequence: Synthetic oligonucleotide
  Sense strand starting at position 391 of SEQ ID NO: 1245365
auaagcaaggcugauuaau

SEQ ID NO: 1557005 - RNA, 19 nt, Artificial Sequence
  Description of Artificial Sequence: Synthetic oligonucleotide
  Antisense strand to SEQ ID NO: 1557004
auuaaucagccuugcuuau

SEQ ID NO: 1557006 - RNA, 19 nt, Artificial Sequence
  Description of Artificial Sequence: Synthetic oligonucleotide
  Sense strand starting at position 410 of SEQ ID NO: 1245365
gcugucauacuaugaagau

SEQ ID NO: 1557007 - RNA, 19 nt, Artificial Sequence
  Description of Artificial Sequence: Synthetic oligonucleotide
  Antisense strand to SEQ ID NO: 1557006
aucuucauaguaugacagc

SEQ ID NO: 1557008 - RNA, 19 nt, Artificial Sequence
  Description of Artificial Sequence: Synthetic oligonucleotide
  Sense strand starting at position 433 of SEQ ID NO: 1245365
acaguacaguuaccaaauu

SEQ ID NO: 1557009 - RNA, 19 nt, Artificial Sequence
  Description of Artificial Sequence: Synthetic oligonucleotide
  Antisense strand to SEQ ID NO: 1557008
aauuugguaacuguacugu

SEQ ID NO: 1557010 - RNA, 19 nt, Artificial Sequence
  Description of Artificial Sequence: Synthetic oligonucleotide
  Sense strand starting at position 672 of SEQ ID NO: 1245365
ucagauaucugaguuggac

SEQ ID NO: 1557011 - RNA, 19 nt, Artificial Sequence
  Description of Artificial Sequence: Synthetic oligonucleotide
  Antisense strand to SEQ ID NO: 1557010
guccaacucagauaucuga

SEQ ID NO: 1557012 - RNA, 19 nt, Artificial Sequence
  Description of Artificial Sequence: Synthetic oligonucleotide
  Sense strand starting at position 675 of SEQ ID NO: 1245365
gauaucugaguuggacagu

SEQ ID NO: 1557013 - RNA, 19 nt, Artificial Sequence
  Description of Artificial Sequence: Synthetic oligonucleotide
  Antisense strand to SEQ ID NO: 1557012
acuguccaacucagauauc

SEQ ID NO: 1557014 - RNA, 19 nt, Artificial Sequence
  Description of Artificial Sequence: Synthetic oligonucleotide
  Sense strand starting at position 714 of SEQ ID NO: 1245365
auauauguauacucacgau

SEQ ID NO: 1557015 - RNA, 19 nt, Artificial Sequence
  Description of Artificial Sequence: Synthetic oligonucleotide
  Antisense strand to SEQ ID NO: 1557014
aucgugaguauacauauau

SEQ ID NO: 1557016 - RNA, 19 nt, Artificial Sequence
  Description of Artificial Sequence: Synthetic oligonucleotide
  Sense strand starting at position 818 of SEQ ID NO: 1245365
gcugauuauuuggcucaua

SEQ ID NO: 1557017 - RNA, 19 nt, Artificial Sequence
  Description of Artificial Sequence: Synthetic oligonucleotide
  Antisense strand to SEQ ID NO: 1557016
uaugagccaaauaaucagc

SEQ ID NO: 1557018 - RNA, 19 nt, Artificial Sequence
  Description of Artificial Sequence: Synthetic oligonucleotide
  Sense strand starting at position 836 of SEQ ID NO: 1245365
accguauaagcuuagucau

SEQ ID NO: 1557019 - RNA, 19 nt, Artificial Sequence
  Description of Artificial Sequence: Synthetic oligonucleotide
  Antisense strand to SEQ ID NO: 1557018
augacuaagcuuauacggu

SEQ ID NO: 1557020 - RNA, 19 nt, Artificial Sequence
  Description of Artificial Sequence: Synthetic oligonucleotide
  Sense strand starting at position 846 of SEQ ID NO: 1245365
cuuagucaucucugaagug

SEQ ID NO: 1557021 - RNA, 19 nt, Artificial Sequence
  Description of Artificial Sequence: Synthetic oligonucleotide
  Antisense strand to SEQ ID NO: 1557020
cacuucagagaugacuaag

SEQ ID NO: 1557022 - RNA, 19 nt, Artificial Sequence
  Description of Artificial Sequence: Synthetic oligonucleotide
  Sense strand starting at position 903 of SEQ ID NO: 1245365
gaugcaucccagggugcaa

SEQ ID NO: 1557023 - RNA, 19 nt, Artificial Sequence
  Description of Artificial Sequence: Synthetic oligonucleotide
  Antisense strand to SEQ ID NO: 1557022
uugcacccugggaugcauc

SEQ ID NO: 1557024 - RNA, 19 nt, Artificial Sequence
  Description of Artificial Sequence: Synthetic oligonucleotide
  Sense strand starting at position 1392 of SEQ ID NO: 1245365
ccugaucuguccucgacca

SEQ ID NO: 1557025 - RNA, 19 nt, Artificial Sequence
  Description of Artificial Sequence: Synthetic oligonucleotide
  Antisense strand to SEQ ID NO: 1557024
uggucgaggacagaucagg

SEQ ID NO: 1557026 - RNA, 19 nt, Artificial Sequence
  Description of Artificial Sequence: Synthetic oligonucleotide
  Sense strand starting at position 1473 of SEQ ID NO: 1245365
aggcaagauuuggucguua

SEQ ID NO: 1557027 - RNA, 19 nt, Artificial Sequence
  Description of Artificial Sequence: Synthetic oligonucleotide
  Antisense strand to SEQ ID NO: 1557026
uaacgaccaaaucuugccu

SEQ ID NO: 1557028 - RNA, 19 nt, Artificial Sequence
  Description of Artificial Sequence: Synthetic oligonucleotide
  Sense strand starting at position 1475 of SEQ ID NO: 1245365
gcaagauuuggucguuaag

SEQ ID NO: 1557029 - RNA, 19 nt, Artificial Sequence
  Description of Artificial Sequence: Synthetic oligonucleotide
  Antisense strand to SEQ ID NO: 1557028
cuuaacgaccaaaucuugc

SEQ ID NO: 1557030 - RNA, 19 nt, Artificial Sequence
  Description of Artificial Sequence: Synthetic oligonucleotide
  Sense strand starting at position 1477 of SEQ ID NO: 1245365
aagauuuggucguuaagcu

SEQ ID NO: 1557031 - RNA, 19 nt, Artificial Sequence
  Description of Artificial Sequence: Synthetic oligonucleotide
  Antisense strand to SEQ ID NO: 1557030
agcuuaacgaccaaaucuu

SEQ ID NO: 1557032 - RNA, 19 nt, Artificial Sequence
  Description of Artificial Sequence: Synthetic oligonucleotide
  Sense strand starting at position 1518 of SEQ ID NO: 1245365
ccaucaaaggaguaagcuu

SEQ ID NO: 1557033 - RNA, 19 nt, Artificial Sequence
  Description of Artificial Sequence: Synthetic oligonucleotide
  Antisense strand to SEQ ID NO: 1557032
aagcuuacuccuuugaugg

SEQ ID NO: 1557034 - RNA, 19 nt, Artificial Sequence
  Description of Artificial Sequence: Synthetic oligonucleotide
  Sense strand starting at position 1527 of SEQ ID NO: 1245365
gaguaagcuuuauugaaac

SEQ ID NO: 1557035 - RNA, 19 nt, Artificial Sequence
  Description of Artificial Sequence: Synthetic oligonucleotide
  Antisense strand to SEQ ID NO: 1557034
guuucaauaaagcuuacuc

SEQ ID NO: 1557036 - RNA, 19 nt, Artificial Sequence
  Description of Artificial Sequence: Synthetic oligonucleotide
  Sense strand starting at position 2083 of SEQ ID NO: 1245365
cugcgcagucaugucuuaa

SEQ ID NO: 1557037 - RNA, 19 nt, Artificial Sequence
  Description of Artificial Sequence: Synthetic oligonucleotide
  Antisense strand to SEQ ID NO: 1557036
uuaagacaugacugcgcag

SEQ ID NO: 1557038 - RNA, 19 nt, Artificial Sequence
  Description of Artificial Sequence: Synthetic oligonucleotide
  Sense strand starting at position 2084 of SEQ ID NO: 1245365
ugcgcagucaugucuuaag

SEQ ID NO: 1557039 - RNA, 19 nt, Artificial Sequence
  Description of Artificial Sequence: Synthetic oligonucleotide
  Antisense strand to SEQ ID NO: 1557038
cuuaagacaugacugcgca

SEQ ID NO: 1557040 - RNA, 19 nt, Artificial Sequence
  Description of Artificial Sequence: Synthetic oligonucleotide
  Sense strand starting at position 2541 of SEQ ID NO: 1245365
ugaaguuaagcguaggaua

SEQ ID NO: 1557041 - RNA, 19 nt, Artificial Sequence
  Description of Artificial Sequence: Synthetic oligonucleotide
  Antisense strand to SEQ ID NO: 1557040
uauccuacgcuuaacuuca

SEQ ID NO: 1557042 - RNA, 19 nt, Artificial Sequence
  Description of Artificial Sequence: Synthetic oligonucleotide
  Sense strand starting at position 2543 of SEQ ID NO: 1245365
aaguuaagcguaggauauu

SEQ ID NO: 1557043 - RNA, 19 nt, Artificial Sequence
  Description of Artificial Sequence: Synthetic oligonucleotide
  Antisense strand to SEQ ID NO: 1557042
aauauccuacgcuuaacuu

SEQ ID NO: 1557044 - RNA, 19 nt, Artificial Sequence
  Description of Artificial Sequence: Synthetic oligonucleotide
  Sense strand starting at position 2692 of SEQ ID NO: 1245365
agcaaucacuacuuacgaa

SEQ ID NO: 1557045 - RNA, 19 nt, Artificial Sequence
  Description of Artificial Sequence: Synthetic oligonucleotide
  Antisense strand to SEQ ID NO: 1557044
uucguaaguagugauugcu

SEQ ID NO: 1557046 - RNA, 19 nt, Artificial Sequence
  Description of Artificial Sequence: Synthetic oligonucleotide
  Sense strand starting at position 2730 of SEQ ID NO: 1245365
gacauaagguaccagagaa

SEQ ID NO: 1557047 - RNA, 19 nt, Artificial Sequence
  Description of Artificial Sequence: Synthetic oligonucleotide
  Antisense strand to SEQ ID NO: 1557046
uucucugguaccuuauguc

SEQ ID NO: 1557048 - RNA, 19 nt, Artificial Sequence
  Description of Artificial Sequence: Synthetic oligonucleotide
  Sense strand starting at position 2901 of SEQ ID NO: 1245365
gagagcaagcccuaaaugu

SEQ ID NO: 1557049 - RNA, 19 nt, Artificial Sequence
  Description of Artificial Sequence: Synthetic oligonucleotide
  Antisense strand to SEQ ID NO: 1557048
acauuuagggcuugcucuc

SEQ ID NO: 1557050 - RNA, 19 nt, Artificial Sequence
  Description of Artificial Sequence: Synthetic oligonucleotide
  Sense strand starting at position 3048 of SEQ ID NO: 1245365
guugaaaugaugggaaugu

SEQ ID NO: 1557051 - RNA, 19 nt, Artificial Sequence
  Description of Artificial Sequence: Synthetic oligonucleotide
  Antisense strand to SEQ ID NO: 1557050
acauucccaucauuucaac

SEQ ID NO: 1557052 - RNA, 19 nt, Artificial Sequence
  Description of Artificial Sequence: Synthetic oligonucleotide
  Sense strand starting at position 3057 of SEQ ID NO: 1245365
augggaauguucucccggu

SEQ ID NO: 1557053 - RNA, 19 nt, Artificial Sequence
  Description of Artificial Sequence: Synthetic oligonucleotide
  Antisense strand to SEQ ID NO: 1557052
accgggagaacauucccau

SEQ ID NO: 1557054 - RNA, 19 nt, Artificial Sequence
  Description of Artificial Sequence: Synthetic oligonucleotide
  Sense strand starting at position 3080 of SEQ ID NO: 1245365
guggaacagcuuuauaaua

SEQ ID NO: 1557055 - RNA, 19 nt, Artificial Sequence
  Description of Artificial Sequence: Synthetic oligonucleotide
  Antisense strand to SEQ ID NO: 1557054
uauuauaaagcuguuccac

SEQ ID NO: 1557056 - RNA, 19 nt, Artificial Sequence
  Description of Artificial Sequence: Synthetic oligonucleotide
  Sense strand starting at position 3144 of SEQ ID NO: 1245365
uggcaaggucucugaauga

SEQ ID NO: 1557057 - RNA, 19 nt, Artificial Sequence
  Description of Artificial Sequence: Synthetic oligonucleotide
  Antisense strand to SEQ ID NO: 1557056
ucauucagagaccuugcca

SEQ ID NO: 1557058 - RNA, 19 nt, Artificial Sequence
  Description of Artificial Sequence: Synthetic oligonucleotide
  Sense strand starting at position 3151 of SEQ ID NO: 1245365
gucucugaaugacccauau

SEQ ID NO: 1557059 - RNA, 19 nt, Artificial Sequence
  Description of Artificial Sequence: Synthetic oligonucleotide
  Antisense strand to SEQ ID NO: 1557058
auaugggucauucagagac

SEQ ID NO: 1557060 - RNA, 19 nt, Artificial Sequence
  Description of Artificial Sequence: Synthetic oligonucleotide
  Sense strand starting at position 3246 of SEQ ID NO: 1245365
uuauauuugcguuacaguu

SEQ ID NO: 1557061 - RNA, 19 nt, Artificial Sequence
  Description of Artificial Sequence: Synthetic oligonucleotide
  Antisense strand to SEQ ID NO: 1557060
aacuguaacgcaaauauaa

SEQ ID NO: 1557062 - RNA, 19 nt, Artificial Sequence
  Description of Artificial Sequence: Synthetic oligonucleotide
  Sense strand starting at position 3252 of SEQ ID NO: 1245365
uugcguuacaguuuaaguu

SEQ ID NO: 1557063 - RNA, 19 nt, Artificial Sequence
  Description of Artificial Sequence: Synthetic oligonucleotide
  Antisense strand to SEQ ID NO: 1557062
aacuuaaacuguaacgcaa

SEQ ID NO: 1557064 - RNA, 19 nt, Artificial Sequence
  Description of Artificial Sequence: Synthetic oligonucleotide
  Sense strand starting at position 3298 of SEQ ID NO: 1245365
ugaccuagaucugugcuuu

SEQ ID NO: 1557065 - RNA, 19 nt, Artificial Sequence
  Description of Artificial Sequence: Synthetic oligonucleotide
  Antisense strand to SEQ ID NO: 1557064
aaagcacagaucuagguca

SEQ ID NO: 1557066 - RNA, 19 nt, Artificial Sequence
  Description of Artificial Sequence: Synthetic oligonucleotide
  Sense strand starting at position 3470 of SEQ ID NO: 1245365
acaacugagguaugugaau

SEQ ID NO: 1557067 - RNA, 19 nt, Artificial Sequence
  Description of Artificial Sequence: Synthetic oligonucleotide
  Antisense strand to SEQ ID NO: 1557066
auucacauaccucaguugu

SEQ ID NO: 1557068 - RNA, 19 nt, Artificial Sequence
  Description of Artificial Sequence: Synthetic oligonucleotide
  Sense strand starting at position 212 of SEQ ID NO: 1245366
guccuuuacucaccauaug

SEQ ID NO: 1557069 - RNA, 19 nt, Artificial Sequence
  Description of Artificial Sequence: Synthetic oligonucleotide
  Antisense strand to SEQ ID NO: 1557068
cauauggugaguaaaggac

SEQ ID NO: 1557070 - RNA, 19 nt, Artificial Sequence
  Description of Artificial Sequence: Synthetic oligonucleotide
  Sense strand starting at position 359 of SEQ ID NO: 1245366
guauguaauuaaguacagu

SEQ ID NO: 1557071 - RNA, 19 nt, Artificial Sequence
  Description of Artificial Sequence: Synthetic oligonucleotide
  Antisense strand to SEQ ID NO: 1557070
acuguacuuaauuacauac

SEQ ID NO: 1557072 - RNA, 19 nt, Artificial Sequence
  Description of Artificial Sequence: Synthetic oligonucleotide
  Sense strand starting at position 552 of SEQ ID NO: 1245366
guugaaaggucucccugaa

SEQ ID NO: 1557073 - RNA, 19 nt, Artificial Sequence
  Description of Artificial Sequence: Synthetic oligonucleotide
  Antisense strand to SEQ ID NO: 1557072
uucagggagaccuuucaac

SEQ ID NO: 1557074 - RNA, 19 nt, Artificial Sequence
  Description of Artificial Sequence: Synthetic oligonucleotide
  Sense strand starting at position 1205 of SEQ ID NO: 1245366
ggcugcauucgcuugcuaa

SEQ ID NO: 1557075 - RNA, 19 nt, Artificial Sequence
  Description of Artificial Sequence: Synthetic oligonucleotide
  Antisense strand to SEQ ID NO: 1557074
uuagcaagcgaaugcagcc

SEQ ID NO: 1557076 - RNA, 19 nt, Artificial Sequence
  Description of Artificial Sequence: Synthetic oligonucleotide
  Sense strand starting at position 1207 of SEQ ID NO: 1245366
cugcauucgcuugcuaacu

SEQ ID NO: 1557077 - RNA, 19 nt, Artificial Sequence
  Description of Artificial Sequence: Synthetic oligonucleotide
  Antisense strand to SEQ ID NO: 1557076
aguuagcaagcgaaugcag

SEQ ID NO: 1557078 - RNA, 19 nt, Artificial Sequence
  Description of Artificial Sequence: Synthetic oligonucleotide
  Sense strand starting at position 1230 of SEQ ID NO: 1245366
ugagaaaccuguuccgaga

SEQ ID NO: 1557079 - RNA, 19 nt, Artificial Sequence
  Description of Artificial Sequence: Synthetic oligonucleotide
  Antisense strand to SEQ ID NO: 1557078
ucucggaacagguuucuca

SEQ ID NO: 1557080 - RNA, 19 nt, Artificial Sequence
  Description of Artificial Sequence: Synthetic oligonucleotide
  Sense strand starting at position 1417 of SEQ ID NO: 1245366
ucucuuuccggguggaaau

SEQ ID NO: 1557081 - RNA, 19 nt, Artificial Sequence
  Description of Artificial Sequence: Synthetic oligonucleotide
  Antisense strand to SEQ ID NO: 1557080
auuuccacccggaaagaga

SEQ ID NO: 1557082 - RNA, 19 nt, Artificial Sequence
  Description of Artificial Sequence: Synthetic oligonucleotide
  Sense strand starting at position 1418 of SEQ ID NO: 1245366
cucuuuccggguggaaauu

SEQ ID NO: 1557083 - RNA, 19 nt, Artificial Sequence
  Description of Artificial Sequence: Synthetic oligonucleotide
  Antisense strand to SEQ ID NO: 1557082
aauuuccacccggaaagag

SEQ ID NO: 1557084 - RNA, 19 nt, Artificial Sequence
  Description of Artificial Sequence: Synthetic oligonucleotide
  Sense strand starting at position 1542 of SEQ ID NO: 1245366
guaggugcucaagaagcau

SEQ ID NO: 1557085 - RNA, 19 nt, Artificial Sequence
  Description of Artificial Sequence: Synthetic oligonucleotide
  Antisense strand to SEQ ID NO: 1557084
augcuucuugagcaccuac

SEQ ID NO: 1557086 - RNA, 19 nt, Artificial Sequence
  Description of Artificial Sequence: Synthetic oligonucleotide
  Sense strand starting at position 1551 of SEQ ID NO: 1245366
caagaagcauuuggagaaa

SEQ ID NO: 1557087 - RNA, 19 nt, Artificial Sequence
  Description of Artificial Sequence: Synthetic oligonucleotide
  Antisense strand to SEQ ID NO: 1557086
uuucuccaaaugcuucuug

SEQ ID NO: 1557088 - RNA, 19 nt, Artificial Sequence
  Description of Artificial Sequence: Synthetic oligonucleotide
  Sense strand starting at position 2381 of SEQ ID NO: 1245366
cggccuuccgaaaguggau

SEQ ID NO: 1557089 - RNA, 19 nt, Artificial Sequence
  Description of Artificial Sequence: Synthetic oligonucleotide
  Antisense strand to SEQ ID NO: 1557088
auccacuuucggaaggccg

SEQ ID NO: 1557090 - RNA, 19 nt, Artificial Sequence
  Description of Artificial Sequence: Synthetic oligonucleotide
  Sense strand starting at position 2427 of SEQ ID NO: 1245366
aggauccuuccuggagauu

SEQ ID NO: 1557091 - RNA, 19 nt, Artificial Sequence
  Description of Artificial Sequence: Synthetic oligonucleotide
  Antisense strand to SEQ ID NO: 1557090
aaucuccaggaaggauccu

SEQ ID NO: 1557092 - RNA, 19 nt, Artificial Sequence
  Description of Artificial Sequence: Synthetic oligonucleotide
  Sense strand starting at position 2436 of SEQ ID NO: 1245366
ccuggagauuucgucgacu

SEQ ID NO: 1557093 - RNA, 19 nt, Artificial Sequence
  Description of Artificial Sequence: Synthetic oligonucleotide
  Antisense strand to SEQ ID NO: 1557092
agucgacgaaaucuccagg

SEQ ID NO: 1557094 - RNA, 19 nt, Artificial Sequence
  Description of Artificial Sequence: Synthetic oligonucleotide
  Sense strand starting at position 2731 of SEQ ID NO: 1245366
cguucuucuggugcaguaa

SEQ ID NO: 1557095 - RNA, 19 nt, Artificial Sequence
  Description of Artificial Sequence: Synthetic oligonucleotide
  Antisense strand to SEQ ID NO: 1557094
uuacugcaccagaagaacg

SEQ ID NO: 1557096 - RNA, 19 nt, Artificial Sequence
  Description of Artificial Sequence: Synthetic oligonucleotide
  Sense strand starting at position 2767 of SEQ ID NO: 1245366
uaagguuugcacugggaga

SEQ ID NO: 1557097 - RNA, 19 nt, Artificial Sequence
  Description of Artificial Sequence: Synthetic oligonucleotide
  Antisense strand to SEQ ID NO: 1557096
ucucccagugcaaaccuua

SEQ ID NO: 1557098 - RNA, 19 nt, Artificial Sequence
  Description of Artificial Sequence: Synthetic oligonucleotide
  Sense strand starting at position 2768 of SEQ ID NO: 1245366
aagguuugcacugggagaa

SEQ ID NO: 1557099 - RNA, 19 nt, Artificial Sequence
  Description of Artificial Sequence: Synthetic oligonucleotide
  Antisense strand to SEQ ID NO: 1557098
uucucccagugcaaaccuu

SEQ ID NO: 1557100 - RNA, 19 nt, Artificial Sequence
  Description of Artificial Sequence: Synthetic oligonucleotide
  Sense strand starting at position 2769 of SEQ ID NO: 1245366
agguuugcacugggagaaa

SEQ ID NO: 1557101 - RNA, 19 nt, Artificial Sequence
  Description of Artificial Sequence: Synthetic oligonucleotide
  Antisense strand to SEQ ID NO: 1557100
uuucucccagugcaaaccu

SEQ ID NO: 1557102 - RNA, 19 nt, Artificial Sequence
  Description of Artificial Sequence: Synthetic oligonucleotide
  Sense strand starting at position 2858 of SEQ ID NO: 1245366
uuggcuugcaaguaaggau

SEQ ID NO: 1557103 - RNA, 19 nt, Artificial Sequence
  Description of Artificial Sequence: Synthetic oligonucleotide
  Antisense strand to SEQ ID NO: 1557102
auccuuacuugcaagccaa

SEQ ID NO: 1557104 - RNA, 19 nt, Artificial Sequence
  Description of Artificial Sequence: Synthetic oligonucleotide
  Sense strand starting at position 2946 of SEQ ID NO: 1245366
auugguuuggucuaacaag

SEQ ID NO: 1557105 - RNA, 19 nt, Artificial Sequence
  Description of Artificial Sequence: Synthetic oligonucleotide
  Antisense strand to SEQ ID NO: 1557104
cuuguuagaccaaaccaau

SEQ ID NO: 1557106 - RNA, 19 nt, Artificial Sequence
  Description of Artificial Sequence: Synthetic oligonucleotide
  Sense strand starting at position 2954 of SEQ ID NO: 1245366
ggucuaacaagcugggaua

SEQ ID NO: 1557107 - RNA, 19 nt, Artificial Sequence
  Description of Artificial Sequence: Synthetic oligonucleotide
  Antisense strand to SEQ ID NO: 1557106
uaucccagcuuguuagacc

SEQ ID NO: 1557108 - RNA, 19 nt, Artificial Sequence
  Description of Artificial Sequence: Synthetic oligonucleotide
  Sense strand starting at position 2996 of SEQ ID NO: 1245366
gugcuuauagguuauacau

SEQ ID NO: 1557109 - RNA, 19 nt, Artificial Sequence
  Description of Artificial Sequence: Synthetic oligonucleotide
  Antisense strand to SEQ ID NO: 1557108
auguauaaccuauaagcac

SEQ ID NO: 1557110 - RNA, 19 nt, Artificial Sequence
  Description of Artificial Sequence: Synthetic oligonucleotide
  Sense strand starting at position 3026 of SEQ ID NO: 1245366
cugacuugccaucagugaa

SEQ ID NO: 1557111 - RNA, 19 nt, Artificial Sequence
  Description of Artificial Sequence: Synthetic oligonucleotide
  Antisense strand to SEQ ID NO: 1557110
uucacugauggcaagucag

SEQ ID NO: 1557112 - RNA, 19 nt, Artificial Sequence
  Description of Artificial Sequence: Synthetic oligonucleotide
  Sense strand starting at position 3029 of SEQ ID NO: 1245366
acuugccaucagugaagga

SEQ ID NO: 1557113 - RNA, 19 nt, Artificial Sequence
  Description of Artificial Sequence: Synthetic oligonucleotide
  Antisense strand to SEQ ID NO: 1557112
uccuucacugauggcaagu

SEQ ID NO: 1557114 - RNA, 19 nt, Artificial Sequence
  Description of Artificial Sequence: Synthetic oligonucleotide
  Sense strand starting at position 3030 of SEQ ID NO: 1245366
cuugccaucagugaaggaa

SEQ ID NO: 1557115 - RNA, 19 nt, Artificial Sequence
  Description of Artificial Sequence: Synthetic oligonucleotide
  Antisense strand to SEQ ID NO: 1557114
uuccuucacugauggcaag

SEQ ID NO: 1557116 - RNA, 19 nt, Artificial Sequence
  Description of Artificial Sequence: Synthetic oligonucleotide
  Sense strand starting at position 3274 of SEQ ID NO: 1245366
cguuucuauagggaaucua

SEQ ID NO: 1557117 - RNA, 19 nt, Artificial Sequence
  Description of Artificial Sequence: Synthetic oligonucleotide
  Antisense strand to SEQ ID NO: 1557116
uagauucccuauagaaacg

SEQ ID NO: 1557118 - RNA, 19 nt, Artificial Sequence
  Description of Artificial Sequence: Synthetic oligonucleotide
  Sense strand starting at position 3491 of SEQ ID NO: 1245366
ugucauuacuugcuuagga

SEQ ID NO: 1557119 - RNA, 19 nt, Artificial Sequence
  Description of Artificial Sequence: Synthetic oligonucleotide
  Antisense strand to SEQ ID NO: 1557118
uccuaagcaaguaaugaca

SEQ ID NO: 1557120 - RNA, 19 nt, Artificial Sequence
  Description of Artificial Sequence: Synthetic oligonucleotide
  Sense strand starting at position 3492 of SEQ ID NO: 1245366
gucauuacuugcuuaggau

SEQ ID NO: 1557121 - RNA, 19 nt, Artificial Sequence
  Description of Artificial Sequence: Synthetic oligonucleotide
  Antisense strand to SEQ ID NO: 1557120
auccuaagcaaguaaugac

SEQ ID NO: 1557122 - RNA, 19 nt, Artificial Sequence
  Description of Artificial Sequence: Synthetic oligonucleotide
  Sense strand starting at position 3493 of SEQ ID NO: 1245366
ucauuacuugcuuaggauu

SEQ ID NO: 1557123 - RNA, 19 nt, Artificial Sequence
  Description of Artificial Sequence: Synthetic oligonucleotide
  Antisense strand to SEQ ID NO: 1557122
aauccuaagcaaguaauga

SEQ ID NO: 1557124 - RNA, 19 nt, Artificial Sequence
  Description of Artificial Sequence: Synthetic oligonucleotide
  Sense strand starting at position 3506 of SEQ ID NO: 1245366
aggauugugucuuuccuca

SEQ ID NO: 1557125 - RNA, 19 nt, Artificial Sequence
  Description of Artificial Sequence: Synthetic oligonucleotide
  Antisense strand to SEQ ID NO: 1557124
ugaggaaagacacaauccu

SEQ ID NO: 1557126 - RNA, 19 nt, Artificial Sequence
  Description of Artificial Sequence: Synthetic oligonucleotide
  Sense strand starting at position 3535 of SEQ ID NO: 1245366
cgauguuggauccauacgu

SEQ ID NO: 1557127 - RNA, 19 nt, Artificial Sequence
  Description of Artificial Sequence: Synthetic oligonucleotide
  Antisense strand to SEQ ID NO: 1557126
acguauggauccaacaucg

SEQ ID NO: 1557128 - RNA, 19 nt, Artificial Sequence
  Description of Artificial Sequence: Synthetic oligonucleotide
  Sense strand starting at position 3539 of SEQ ID NO: 1245366
guuggauccauacguauaa

SEQ ID NO: 1557129 - RNA, 19 nt, Artificial Sequence
  Description of Artificial Sequence: Synthetic oligonucleotide
  Antisense strand to SEQ ID NO: 1557128
uuauacguauggauccaac

SEQ ID NO: 1557130 - RNA, 19 nt, Artificial Sequence
  Description of Artificial Sequence: Synthetic oligonucleotide
  Sense strand starting at position 3540 of SEQ ID NO: 1245366
uuggauccauacguauaau

SEQ ID NO: 1557131 - RNA, 19 nt, Artificial Sequence
  Description of Artificial Sequence: Synthetic oligonucleotide
  Antisense strand to SEQ ID NO: 1557130
auuauacguauggauccaa

SEQ ID NO: 1557132 - RNA, 19 nt, Artificial Sequence
  Description of Artificial Sequence: Synthetic oligonucleotide
  Sense strand starting at position 3700 of SEQ ID NO: 1245366
agucacaucuuuccuggau

SEQ ID NO: 1557133 - RNA, 19 nt, Artificial Sequence
  Description of Artificial Sequence: Synthetic oligonucleotide
  Antisense strand to SEQ ID NO: 1557132
auccaggaaagaugugacu

SEQ ID NO: 1557134 - RNA, 19 nt, Artificial Sequence
  Description of Artificial Sequence: Synthetic oligonucleotide
  Sense strand starting at position 3704 of SEQ ID NO: 1245366
acaucuuuccuggauggca

SEQ ID NO: 1557135 - RNA, 19 nt, Artificial Sequence
  Description of Artificial Sequence: Synthetic oligonucleotide
  Antisense strand to SEQ ID NO: 1557134
ugccauccaggaaagaugu

SEQ ID NO: 1557136 - RNA, 19 nt, Artificial Sequence
  Description of Artificial Sequence: Synthetic oligonucleotide
  Sense strand starting at position 3913 of SEQ ID NO: 1245366
aucauaagguaacuguuua

SEQ ID NO: 1557137 - RNA, 19 nt, Artificial Sequence
  Description of Artificial Sequence: Synthetic oligonucleotide
  Antisense strand to SEQ ID NO: 1557136
uaaacaguuaccuuaugau

SEQ ID NO: 1557138 - RNA, 19 nt, Artificial Sequence
  Description of Artificial Sequence: Synthetic oligonucleotide
  Sense strand starting at position 3917 of SEQ ID NO: 1245366
uaagguaacuguuuauaug

SEQ ID NO: 1557139 - RNA, 19 nt, Artificial Sequence
  Description of Artificial Sequence: Synthetic oligonucleotide
  Antisense strand to SEQ ID NO: 1557138
cauauaaacaguuaccuua

SEQ ID NO: 1557140 - RNA, 19 nt, Artificial Sequence
  Description of Artificial Sequence: Synthetic oligonucleotide
  Sense strand starting at position 3934 of SEQ ID NO: 1245366
ugaagauacuugucccaug

SEQ ID NO: 1557141 - RNA, 19 nt, Artificial Sequence
  Description of Artificial Sequence: Synthetic oligonucleotide
  Antisense strand to SEQ ID NO: 1557140
caugggacaaguaucuuca

SEQ ID NO: 1557142 - RNA, 19 nt, Artificial Sequence
  Description of Artificial Sequence: Synthetic oligonucleotide
  Sense strand starting at position 3945 of SEQ ID NO: 1245366
gucccaugccaauagaaua

SEQ ID NO: 1557143 - RNA, 19 nt, Artificial Sequence
  Description of Artificial Sequence: Synthetic oligonucleotide
  Antisense strand to SEQ ID NO: 1557142
uauucuauuggcaugggac

SEQ ID NO: 1557144 - RNA, 19 nt, Artificial Sequence
  Description of Artificial Sequence: Synthetic oligonucleotide
  Sense strand starting at position 3975 of SEQ ID NO: 1245366
gaauuccuggauugccaga

SEQ ID NO: 1557145 - RNA, 19 nt, Artificial Sequence
  Description of Artificial Sequence: Synthetic oligonucleotide
  Antisense strand to SEQ ID NO: 1557144
ucuggcaauccaggaauuc

SEQ ID NO: 1557146 - RNA, 19 nt, Artificial Sequence
  Description of Artificial Sequence: Synthetic oligonucleotide
  Sense strand starting at position 3980 of SEQ ID NO: 1245366
ccuggauugccagaacuau

SEQ ID NO: 1557147 - RNA, 19 nt, Artificial Sequence
  Description of Artificial Sequence: Synthetic oligonucleotide
  Antisense strand to SEQ ID NO: 1557146
auaguucuggcaauccagg

SEQ ID NO: 1557148 - RNA, 19 nt, Artificial Sequence
  Description of Artificial Sequence: Synthetic oligonucleotide
  Sense strand starting at position 69 of SEQ ID NO: 1245367
gugaaagugcuauaagaau

SEQ ID NO: 1557149 - RNA, 19 nt, Artificial Sequence
  Description of Artificial Sequence: Synthetic oligonucleotide
  Antisense strand to SEQ ID NO: 1557148
auucuuauagcacuuucac

SEQ ID NO: 1557150 - RNA, 19 nt, Artificial Sequence
  Description of Artificial Sequence: Synthetic oligonucleotide
  Sense strand starting at position 164 of SEQ ID NO: 1245367
cugaaauaaugacauuuga

SEQ ID NO: 1557151 - RNA, 19 nt, Artificial Sequence
  Description of Artificial Sequence: Synthetic oligonucleotide
  Antisense strand to SEQ ID NO: 1557150
ucaaaugucauuauuucag

SEQ ID NO: 1557152 - RNA, 19 nt, Artificial Sequence
  Description of Artificial Sequence: Synthetic oligonucleotide
  Sense strand starting at position 174 of SEQ ID NO: 1245367
gacauuugaucagagaucu

SEQ ID NO: 1557153 - RNA, 19 nt, Artificial Sequence
  Description of Artificial Sequence: Synthetic oligonucleotide
  Antisense strand to SEQ ID NO: 1557152
agaucucugaucaaauguc

SEQ ID NO: 1557154 - RNA, 19 nt, Artificial Sequence
  Description of Artificial Sequence: Synthetic oligonucleotide
  Sense strand starting at position 352 of SEQ ID NO: 1245367
gcagaucuuacagggacuu

SEQ ID NO: 1557155 - RNA, 19 nt, Artificial Sequence
  Description of Artificial Sequence: Synthetic oligonucleotide
  Antisense strand to SEQ ID NO: 1557154
aagucccuguaagaucugc

SEQ ID NO: 1557156 - RNA, 19 nt, Artificial Sequence
  Description of Artificial Sequence: Synthetic oligonucleotide
  Sense strand starting at position 365 of SEQ ID NO: 1245367
ggacuugugggucauggua

SEQ ID NO: 1557157 - RNA, 19 nt, Artificial Sequence
  Description of Artificial Sequence: Synthetic oligonucleotide
  Antisense strand to SEQ ID NO: 1557156
uaccaugacccacaagucc

SEQ ID NO: 1557158 - RNA, 19 nt, Artificial Sequence
  Description of Artificial Sequence: Synthetic oligonucleotide
  Sense strand starting at position 476 of SEQ ID NO: 1245367
ggcuaacuccuauaugucu

SEQ ID NO: 1557159 - RNA, 19 nt, Artificial Sequence
  Description of Artificial Sequence: Synthetic oligonucleotide
  Antisense strand to SEQ ID NO: 1557158
agacauauaggaguuagcc

SEQ ID NO: 1557160 - RNA, 19 nt, Artificial Sequence
  Description of Artificial Sequence: Synthetic oligonucleotide
  Sense strand starting at position 530 of SEQ ID NO: 1245367
cuuuaacuucccugguaag

SEQ ID NO: 1557161 - RNA, 19 nt, Artificial Sequence
  Description of Artificial Sequence: Synthetic oligonucleotide
  Antisense strand to SEQ ID NO: 1557160
cuuaccagggaaguuaaag

SEQ ID NO: 1557162 - RNA, 19 nt, Artificial Sequence
  Description of Artificial Sequence: Synthetic oligonucleotide
  Sense strand starting at position 531 of SEQ ID NO: 1245367
uuuaacuucccugguaaga

SEQ ID NO: 1557163 - RNA, 19 nt, Artificial Sequence
  Description of Artificial Sequence: Synthetic oligonucleotide
  Antisense strand to SEQ ID NO: 1557162
ucuuaccagggaaguuaaa

SEQ ID NO: 1557164 - RNA, 19 nt, Artificial Sequence
  Description of Artificial Sequence: Synthetic oligonucleotide
  Sense strand starting at position 566 of SEQ ID NO: 1245367
ugacaucucugaguaacag

SEQ ID NO: 1557165 - RNA, 19 nt, Artificial Sequence
  Description of Artificial Sequence: Synthetic oligonucleotide
  Antisense strand to SEQ ID NO: 1557164
cuguuacucagagauguca

SEQ ID NO: 1557166 - RNA, 19 nt, Artificial Sequence
  Description of Artificial Sequence: Synthetic oligonucleotide
  Sense strand starting at position 677 of SEQ ID NO: 1245367
cauaguggugaguacuaaa

SEQ ID NO: 1557167 - RNA, 19 nt, Artificial Sequence
  Description of Artificial Sequence: Synthetic oligonucleotide
  Antisense strand to SEQ ID NO: 1557166
uuuaguacucaccacuaug

SEQ ID NO: 1557168 - RNA, 19 nt, Artificial Sequence
  Description of Artificial Sequence: Synthetic oligonucleotide
  Sense strand starting at position 684 of SEQ ID NO: 1245367
gugaguacuaaagaaacgu

SEQ ID NO: 1557169 - RNA, 19 nt, Artificial Sequence
  Description of Artificial Sequence: Synthetic oligonucleotide
  Antisense strand to SEQ ID NO: 1557168
acguuucuuuaguacucac

SEQ ID NO: 1557170 - RNA, 19 nt, Artificial Sequence
  Description of Artificial Sequence: Synthetic oligonucleotide
  Sense strand starting at position 688 of SEQ ID NO: 1245367
guacuaaagaaacguuuga

SEQ ID NO: 1557171 - RNA, 19 nt, Artificial Sequence
  Description of Artificial Sequence: Synthetic oligonucleotide
  Antisense strand to SEQ ID NO: 1557170
ucaaacguuucuuuaguac

SEQ ID NO: 1557172 - RNA, 19 nt, Artificial Sequence
  Description of Artificial Sequence: Synthetic oligonucleotide
  Sense strand starting at position 692 of SEQ ID NO: 1245367
uaaagaaacguuugauagg

SEQ ID NO: 1557173 - RNA, 19 nt, Artificial Sequence
  Description of Artificial Sequence: Synthetic oligonucleotide
  Antisense strand to SEQ ID NO: 1557172
ccuaucaaacguuucuuua

SEQ ID NO: 1557174 - RNA, 19 nt, Artificial Sequence
  Description of Artificial Sequence: Synthetic oligonucleotide
  Sense strand starting at position 1047 of SEQ ID NO: 1245367
cguaguugucgcccuggga

SEQ ID NO: 1557175 - RNA, 19 nt, Artificial Sequence
  Description of Artificial Sequence: Synthetic oligonucleotide
  Antisense strand to SEQ ID NO: 1557174
ucccagggcgacaacuacg

SEQ ID NO: 1557176 - RNA, 19 nt, Artificial Sequence
  Description of Artificial Sequence: Synthetic oligonucleotide
  Sense strand starting at position 1089 of SEQ ID NO: 1245367
gagaaaggucuuggguuuc

SEQ ID NO: 1557177 - RNA, 19 nt, Artificial Sequence
  Description of Artificial Sequence: Synthetic oligonucleotide
  Antisense strand to SEQ ID NO: 1557176
gaaacccaagaccuuucuc

SEQ ID NO: 1557178 - RNA, 19 nt, Artificial Sequence
  Description of Artificial Sequence: Synthetic oligonucleotide
  Sense strand starting at position 1644 of SEQ ID NO: 1245367
guaguucucggcgccugaa

SEQ ID NO: 1557179 - RNA, 19 nt, Artificial Sequence
  Description of Artificial Sequence: Synthetic oligonucleotide
  Antisense strand to SEQ ID NO: 1557178
uucaggcgccgagaacuac

SEQ ID NO: 1557180 - RNA, 19 nt, Artificial Sequence
  Description of Artificial Sequence: Synthetic oligonucleotide
  Sense strand starting at position 1645 of SEQ ID NO: 1245367
uaguucucggcgccugaaa

SEQ ID NO: 1557181 - RNA, 19 nt, Artificial Sequence
  Description of Artificial Sequence: Synthetic oligonucleotide
  Antisense strand to SEQ ID NO: 1557180
uuucaggcgccgagaacua

SEQ ID NO: 1557182 - RNA, 19 nt, Artificial Sequence
  Description of Artificial Sequence: Synthetic oligonucleotide
  Sense strand starting at position 2222 of SEQ ID NO: 1245367
cggugagcucgagaaagau

SEQ ID NO: 1557183 - RNA, 19 nt, Artificial Sequence
  Description of Artificial Sequence: Synthetic oligonucleotide
  Antisense strand to SEQ ID NO: 1557182
aucuuucucgagcucaccg

SEQ ID NO: 1557184 - RNA, 19 nt, Artificial Sequence
  Description of Artificial Sequence: Synthetic oligonucleotide
  Sense strand starting at position 2234 of SEQ ID NO: 1245367
gaaagauagccuugagucc

SEQ ID NO: 1557185 - RNA, 19 nt, Artificial Sequence
  Description of Artificial Sequence: Synthetic oligonucleotide
  Antisense strand to SEQ ID NO: 1557184
ggacucaaggcuaucuuuc

SEQ ID NO: 1557186 - RNA, 19 nt, Artificial Sequence
  Description of Artificial Sequence: Synthetic oligonucleotide
  Sense strand starting at position 2557 of SEQ ID NO: 1245367
gggaaucauugugccugga

SEQ ID NO: 1557187 - RNA, 19 nt, Artificial Sequence
  Description of Artificial Sequence: Synthetic oligonucleotide
  Antisense strand to SEQ ID NO: 1557186
uccaggcacaaugauuccc

SEQ ID NO: 1557188 - RNA, 19 nt, Artificial Sequence
  Description of Artificial Sequence: Synthetic oligonucleotide
  Sense strand starting at position 2559 of SEQ ID NO: 1245367
gaaucauugugccuggaag

SEQ ID NO: 1557189 - RNA, 19 nt, Artificial Sequence
  Description of Artificial Sequence: Synthetic oligonucleotide
  Antisense strand to SEQ ID NO: 1557188
cuuccaggcacaaugauuc

SEQ ID NO: 1557190 - RNA, 19 nt, Artificial Sequence
  Description of Artificial Sequence: Synthetic oligonucleotide
  Sense strand starting at position 2573 of SEQ ID NO: 1245367
ggaaguauuguugacuuac

SEQ ID NO: 1557191 - RNA, 19 nt, Artificial Sequence
  Description of Artificial Sequence: Synthetic oligonucleotide
  Antisense strand to SEQ ID NO: 1557190
guaagucaacaauacuucc

SEQ ID NO: 1557192 - RNA, 19 nt, Artificial Sequence
  Description of Artificial Sequence: Synthetic oligonucleotide
  Sense strand starting at position 2605 of SEQ ID NO: 1245367
gucacuggcagucauugaa

SEQ ID NO: 1557193 - RNA, 19 nt, Artificial Sequence
  Description of Artificial Sequence: Synthetic oligonucleotide
  Antisense strand to SEQ ID NO: 1557192
uucaaugacugccagugac

SEQ ID NO: 1557194 - RNA, 19 nt, Artificial Sequence
  Description of Artificial Sequence: Synthetic oligonucleotide
  Sense strand starting at position 2762 of SEQ ID NO: 1245367
agcuuugguccugauaauu

SEQ ID NO: 1557195 - RNA, 19 nt, Artificial Sequence
  Description of Artificial Sequence: Synthetic oligonucleotide
  Antisense strand to SEQ ID NO: 1557194
aauuaucaggaccaaagcu

SEQ ID NO: 1557196 - RNA, 19 nt, Artificial Sequence
  Description of Artificial Sequence: Synthetic oligonucleotide
  Sense strand starting at position 2871 of SEQ ID NO: 1245367
aggauuggugauggcauua

SEQ ID NO: 1557197 - RNA, 19 nt, Artificial Sequence
  Description of Artificial Sequence: Synthetic oligonucleotide
  Antisense strand to SEQ ID NO: 1557196
uaaugccaucaccaauccu

SEQ ID NO: 1557198 - RNA, 19 nt, Artificial Sequence
  Description of Artificial Sequence: Synthetic oligonucleotide
  Sense strand starting at position 2876 of SEQ ID NO: 1245367
uggugauggcauuaauuga

SEQ ID NO: 1557199 - RNA, 19 nt, Artificial Sequence
  Description of Artificial Sequence: Synthetic oligonucleotide
  Antisense strand to SEQ ID NO: 1557198
ucaauuaaugccaucacca

SEQ ID NO: 1557200 - RNA, 19 nt, Artificial Sequence
  Description of Artificial Sequence: Synthetic oligonucleotide
  Sense strand starting at position 2986 of SEQ ID NO: 1245367
uuacuaggauuagugucau

SEQ ID NO: 1557201 - RNA, 19 nt, Artificial Sequence
  Description of Artificial Sequence: Synthetic oligonucleotide
  Antisense strand to SEQ ID NO: 1557200
augacacuaauccuaguaa

SEQ ID NO: 1557202 - RNA, 19 nt, Artificial Sequence
  Description of Artificial Sequence: Synthetic oligonucleotide
  Sense strand starting at position 3010 of SEQ ID NO: 1245367
gagagagggauauguuugu

SEQ ID NO: 1557203 - RNA, 19 nt, Artificial Sequence
  Description of Artificial Sequence: Synthetic oligonucleotide
  Antisense strand to SEQ ID NO: 1557202
acaaacauaucccucucuc

SEQ ID NO: 1557204 - RNA, 19 nt, Artificial Sequence
  Description of Artificial Sequence: Synthetic oligonucleotide
  Sense strand starting at position 3014 of SEQ ID NO: 1245367
gagggauauguuuguauuc

SEQ ID NO: 1557205 - RNA, 19 nt, Artificial Sequence
  Description of Artificial Sequence: Synthetic oligonucleotide
  Antisense strand to SEQ ID NO: 1557204
gaauacaaacauaucccuc

SEQ ID NO: 1557206 - RNA, 19 nt, Artificial Sequence
  Description of Artificial Sequence: Synthetic oligonucleotide
  Sense strand starting at position 3084 of SEQ ID NO: 1245367
cucugauagguuggugaaa

SEQ ID NO: 1557207 - RNA, 19 nt, Artificial Sequence
  Description of Artificial Sequence: Synthetic oligonucleotide
  Antisense strand to SEQ ID NO: 1557206
uuucaccaaccuaucagag

SEQ ID NO: 1557208 - RNA, 19 nt, Artificial Sequence
  Description of Artificial Sequence: Synthetic oligonucleotide
  Sense strand starting at position 3207 of SEQ ID NO: 1245367
ggacaacugggcugaauua

SEQ ID NO: 1557209 - RNA, 19 nt, Artificial Sequence
  Description of Artificial Sequence: Synthetic oligonucleotide
  Antisense strand to SEQ ID NO: 1557208
uaauucagcccaguugucc

SEQ ID NO: 1557210 - RNA, 19 nt, Artificial Sequence
  Description of Artificial Sequence: Synthetic oligonucleotide
  Sense strand starting at position 3299 of SEQ ID NO: 1245367
gagauacuugaagguuauu

SEQ ID NO: 1557211 - RNA, 19 nt, Artificial Sequence
  Description of Artificial Sequence: Synthetic oligonucleotide
  Antisense strand to SEQ ID NO: 1557210
aauaaccuucaaguaucuc

SEQ ID NO: 1557212 - RNA, 19 nt, Artificial Sequence
  Description of Artificial Sequence: Synthetic oligonucleotide
  Sense strand starting at position 3308 of SEQ ID NO: 1245367
gaagguuauuagcuuauag

SEQ ID NO: 1557213 - RNA, 19 nt, Artificial Sequence
  Description of Artificial Sequence: Synthetic oligonucleotide
  Antisense strand to SEQ ID NO: 1557212
cuauaagcuaauaaccuuc

SEQ ID NO: 1557214 - RNA, 19 nt, Artificial Sequence
  Description of Artificial Sequence: Synthetic oligonucleotide
  Sense strand starting at position 3310 of SEQ ID NO: 1245367
agguuauuagcuuauagca

SEQ ID NO: 1557215 - RNA, 19 nt, Artificial Sequence
  Description of Artificial Sequence: Synthetic oligonucleotide
  Antisense strand to SEQ ID NO: 1557214
ugcuauaagcuaauaaccu

SEQ ID NO: 1557216 - RNA, 19 nt, Artificial Sequence
  Description of Artificial Sequence: Synthetic oligonucleotide
  Sense strand starting at position 3376 of SEQ ID NO: 1245367
aagcuauugcaaugggacu

SEQ ID NO: 1557217 - RNA, 19 nt, Artificial Sequence
  Description of Artificial Sequence: Synthetic oligonucleotide
  Antisense strand to SEQ ID NO: 1557216
agucccauugcaauagcuu

SEQ ID NO: 1557218 - RNA, 19 nt, Artificial Sequence
  Description of Artificial Sequence: Synthetic oligonucleotide
  Sense strand starting at position 3382 of SEQ ID NO: 1245367
uugcaaugggacugaauaa

SEQ ID NO: 1557219 - RNA, 19 nt, Artificial Sequence
  Description of Artificial Sequence: Synthetic oligonucleotide
  Antisense strand to SEQ ID NO: 1557218
uuauucagucccauugcaa

SEQ ID NO: 1557220 - RNA, 19 nt, Artificial Sequence
  Description of Artificial Sequence: Synthetic oligonucleotide
  Sense strand starting at position 3389 of SEQ ID NO: 1245367
gggacugaauaaguguauu

SEQ ID NO: 1557221 - RNA, 19 nt, Artificial Sequence
  Description of Artificial Sequence: Synthetic oligonucleotide
  Antisense strand to SEQ ID NO: 1557220
aauacacuuauucaguccc

SEQ ID NO: 1557222 - RNA, 19 nt, Artificial Sequence
  Description of Artificial Sequence: Synthetic oligonucleotide
  Sense strand starting at position 3683 of SEQ ID NO: 1245367
cagacuauuccacguaaug

SEQ ID NO: 1557223 - RNA, 19 nt, Artificial Sequence
  Description of Artificial Sequence: Synthetic oligonucleotide
  Antisense strand to SEQ ID NO: 1557222
cauuacguggaauagucug

SEQ ID NO: 1557224 - RNA, 19 nt, Artificial Sequence
  Description of Artificial Sequence: Synthetic oligonucleotide
  Sense strand starting at position 3692 of SEQ ID NO: 1245367
ccacguaaugaccaguuaa

SEQ ID NO: 1557225 - RNA, 19 nt, Artificial Sequence
  Description of Artificial Sequence: Synthetic oligonucleotide
  Antisense strand to SEQ ID NO: 1557224
uuaacuggucauuacgugg

SEQ ID NO: 1557226 - RNA, 19 nt, Artificial Sequence
  Description of Artificial Sequence: Synthetic oligonucleotide
  Sense strand starting at position 3746 of SEQ ID NO: 1245367
uagagaaugucacuguaag

SEQ ID NO: 1557227 - RNA, 19 nt, Artificial Sequence
  Description of Artificial Sequence: Synthetic oligonucleotide
  Antisense strand to SEQ ID NO: 1557226
cuuacagugacauucucua

SEQ ID NO: 1557228 - RNA, 19 nt, Artificial Sequence
  Description of Artificial Sequence: Synthetic oligonucleotide
  Sense strand starting at position 399 of SEQ ID NO: 1245368
gacugauggcuacgauaca

SEQ ID NO: 1557229 - RNA, 19 nt, Artificial Sequence
  Description of Artificial Sequence: Synthetic oligonucleotide
  Antisense strand to SEQ ID NO: 1557228
uguaucguagccaucaguc

SEQ ID NO: 1557230 - RNA, 19 nt, Artificial Sequence
  Description of Artificial Sequence: Synthetic oligonucleotide
  Sense strand starting at position 489 of SEQ ID NO: 1245368
gcuaauuuauaauggaacu

SEQ ID NO: 1557231 - RNA, 19 nt, Artificial Sequence
  Description of Artificial Sequence: Synthetic oligonucleotide
  Antisense strand to SEQ ID NO: 1557230
aguuccauuauaaauuagc

SEQ ID NO: 1557232 - RNA, 19 nt, Artificial Sequence
  Description of Artificial Sequence: Synthetic oligonucleotide
  Sense strand starting at position 593 of SEQ ID NO: 1245368
agucguuugccugacacag

SEQ ID NO: 1557233 - RNA, 19 nt, Artificial Sequence
  Description of Artificial Sequence: Synthetic oligonucleotide
  Antisense strand to SEQ ID NO: 1557232
cugugucaggcaaacgacu

SEQ ID NO: 1557234 - RNA, 19 nt, Artificial Sequence
  Description of Artificial Sequence: Synthetic oligonucleotide
  Sense strand starting at position 666 of SEQ ID NO: 1245368
ggacuuuguuguuugcaag

SEQ ID NO: 1557235 - RNA, 19 nt, Artificial Sequence
  Description of Artificial Sequence: Synthetic oligonucleotide
  Antisense strand to SEQ ID NO: 1557234
cuugcaaacaacaaagucc

SEQ ID NO: 1557236 - RNA, 19 nt, Artificial Sequence
  Description of Artificial Sequence: Synthetic oligonucleotide
  Sense strand starting at position 667 of SEQ ID NO: 1245368
gacuuuguuguuugcaaga

SEQ ID NO: 1557237 - RNA, 19 nt, Artificial Sequence
  Description of Artificial Sequence: Synthetic oligonucleotide
  Antisense strand to SEQ ID NO: 1557236
ucuugcaaacaacaaaguc

SEQ ID NO: 1557238 - RNA, 19 nt, Artificial Sequence
  Description of Artificial Sequence: Synthetic oligonucleotide
  Sense strand starting at position 672 of SEQ ID NO: 1245368
uguuguuugcaagauauug

SEQ ID NO: 1557239 - RNA, 19 nt, Artificial Sequence
  Description of Artificial Sequence: Synthetic oligonucleotide
  Antisense strand to SEQ ID NO: 1557238
caauaucuugcaaacaaca

SEQ ID NO: 1557240 - RNA, 19 nt, Artificial Sequence
  Description of Artificial Sequence: Synthetic oligonucleotide
  Sense strand starting at position 757 of SEQ ID NO: 1245368
acggguagcuucuuaacaa

SEQ ID NO: 1557241 - RNA, 19 nt, Artificial Sequence
  Description of Artificial Sequence: Synthetic oligonucleotide
  Antisense strand to SEQ ID NO: 1557240
uuguuaagaagcuacccgu

SEQ ID NO: 1557242 - RNA, 19 nt, Artificial Sequence
  Description of Artificial Sequence: Synthetic oligonucleotide
  Sense strand starting at position 1007 of SEQ ID NO: 1245368
cccucaacgcuacaagaau

SEQ ID NO: 1557243 - RNA, 19 nt, Artificial Sequence
  Description of Artificial Sequence: Synthetic oligonucleotide
  Antisense strand to SEQ ID NO: 1557242
auucuuguagcguugaggg

SEQ ID NO: 1557244 - RNA, 19 nt, Artificial Sequence
  Description of Artificial Sequence: Synthetic oligonucleotide
  Sense strand starting at position 1013 of SEQ ID NO: 1245368
acgcuacaagaauguaaua

SEQ ID NO: 1557245 - RNA, 19 nt, Artificial Sequence
  Description of Artificial Sequence: Synthetic oligonucleotide
  Antisense strand to SEQ ID NO: 1557244
uauuacauucuuguagcgu

SEQ ID NO: 1557246 - RNA, 19 nt, Artificial Sequence
  Description of Artificial Sequence: Synthetic oligonucleotide
  Sense strand starting at position 1182 of SEQ ID NO: 1245368
gucucaaugccguucucga

SEQ ID NO: 1557247 - RNA, 19 nt, Artificial Sequence
  Description of Artificial Sequence: Synthetic oligonucleotide
  Antisense strand to SEQ ID NO: 1557246
ucgagaacggcauugagac

SEQ ID NO: 1557248 - RNA, 19 nt, Artificial Sequence
  Description of Artificial Sequence: Synthetic oligonucleotide
  Sense strand starting at position 1239 of SEQ ID NO: 1245368
uagguuguccgaggaagaa

SEQ ID NO: 1557249 - RNA, 19 nt, Artificial Sequence
  Description of Artificial Sequence: Synthetic oligonucleotide
  Antisense strand to SEQ ID NO: 1557248
uucuuccucggacaaccua

SEQ ID NO: 1557250 - RNA, 19 nt, Artificial Sequence
  Description of Artificial Sequence: Synthetic oligonucleotide
  Sense strand starting at position 1527 of SEQ ID NO: 1245368
aggugauugagacgaguga

SEQ ID NO: 1557251 - RNA, 19 nt, Artificial Sequence
  Description of Artificial Sequence: Synthetic oligonucleotide
  Antisense strand to SEQ ID NO: 1557250
ucacucgucucaaucaccu

SEQ ID NO: 1557252 - RNA, 19 nt, Artificial Sequence
  Description of Artificial Sequence: Synthetic oligonucleotide
  Sense strand starting at position 1586 of SEQ ID NO: 1245368
gacgaaggaguccgggauu

SEQ ID NO: 1557253 - RNA, 19 nt, Artificial Sequence
  Description of Artificial Sequence: Synthetic oligonucleotide
  Antisense strand to SEQ ID NO: 1557252
aaucccggacuccuucguc

SEQ ID NO: 1557254 - RNA, 19 nt, Artificial Sequence
  Description of Artificial Sequence: Synthetic oligonucleotide
  Sense strand starting at position 2024 of SEQ ID NO: 1245368
ucacgugacuguguuaaag

SEQ ID NO: 1557255 - RNA, 19 nt, Artificial Sequence
  Description of Artificial Sequence: Synthetic oligonucleotide
  Antisense strand to SEQ ID NO: 1557254
cuuuaacacagucacguga

SEQ ID NO: 1557256 - RNA, 19 nt, Artificial Sequence
  Description of Artificial Sequence: Synthetic oligonucleotide
  Sense strand starting at position 2445 of SEQ ID NO: 1245368
gggaguggaucucucggaa

SEQ ID NO: 1557257 - RNA, 19 nt, Artificial Sequence
  Description of Artificial Sequence: Synthetic oligonucleotide
  Antisense strand to SEQ ID NO: 1557256
uuccgagagauccacuccc

SEQ ID NO: 1557258 - RNA, 19 nt, Artificial Sequence
  Description of Artificial Sequence: Synthetic oligonucleotide
  Sense strand starting at position 2499 of SEQ ID NO: 1245368
ccauguguccuuuaaauac

SEQ ID NO: 1557259 - RNA, 19 nt, Artificial Sequence
  Description of Artificial Sequence: Synthetic oligonucleotide
  Antisense strand to SEQ ID NO: 1557258
guauuuaaaggacacaugg

SEQ ID NO: 1557260 - RNA, 19 nt, Artificial Sequence
  Description of Artificial Sequence: Synthetic oligonucleotide
  Sense strand starting at position 2542 of SEQ ID NO: 1245368
ucacuuuauguggacucaa

SEQ ID NO: 1557261 - RNA, 19 nt, Artificial Sequence
  Description of Artificial Sequence: Synthetic oligonucleotide
  Antisense strand to SEQ ID NO: 1557260
uugaguccacauaaaguga

SEQ ID NO: 1557262 - RNA, 19 nt, Artificial Sequence
  Description of Artificial Sequence: Synthetic oligonucleotide
  Sense strand starting at position 2609 of SEQ ID NO: 1245368
guaauugcgcuacugcauu

SEQ ID NO: 1557263 - RNA, 19 nt, Artificial Sequence
  Description of Artificial Sequence: Synthetic oligonucleotide
  Antisense strand to SEQ ID NO: 1557262
aaugcaguagcgcaauuac

SEQ ID NO: 1557264 - RNA, 19 nt, Artificial Sequence
  Description of Artificial Sequence: Synthetic oligonucleotide
  Sense strand starting at position 2738 of SEQ ID NO: 1245368
ggaagccaguauuugugua

SEQ ID NO: 1557265 - RNA, 19 nt, Artificial Sequence
  Description of Artificial Sequence: Synthetic oligonucleotide
  Antisense strand to SEQ ID NO: 1557264
uacacaaauacuggcuucc

SEQ ID NO: 1557266 - RNA, 19 nt, Artificial Sequence
  Description of Artificial Sequence: Synthetic oligonucleotide
  Sense strand starting at position 2742 of SEQ ID NO: 1245368
gccaguauuuguguacugu

SEQ ID NO: 1557267 - RNA, 19 nt, Artificial Sequence
  Description of Artificial Sequence: Synthetic oligonucleotide
  Antisense strand to SEQ ID NO: 1557266
acaguacacaaauacuggc

SEQ ID NO: 1557268 - RNA, 19 nt, Artificial Sequence
  Description of Artificial Sequence: Synthetic oligonucleotide
  Sense strand starting at position 2743 of SEQ ID NO: 1245368
ccaguauuuguguacugug

SEQ ID NO: 1557269 - RNA, 19 nt, Artificial Sequence
  Description of Artificial Sequence: Synthetic oligonucleotide
  Antisense strand to SEQ ID NO: 1557268
cacaguacacaaauacugg

SEQ ID NO: 1557270 - RNA, 19 nt, Artificial Sequence
  Description of Artificial Sequence: Synthetic oligonucleotide
  Sense strand starting at position 2872 of SEQ ID NO: 1245368
ugugccuuguaaguagaaa

SEQ ID NO: 1557271 - RNA, 19 nt, Artificial Sequence
  Description of Artificial Sequence: Synthetic oligonucleotide
  Antisense strand to SEQ ID NO: 1557270
uuucuacuuacaaggcaca

SEQ ID NO: 1557272 - RNA, 19 nt, Artificial Sequence
  Description of Artificial Sequence: Synthetic oligonucleotide
  Sense strand starting at position 2873 of SEQ ID NO: 1245368
gugccuuguaaguagaaau

SEQ ID NO: 1557273 - RNA, 19 nt, Artificial Sequence
  Description of Artificial Sequence: Synthetic oligonucleotide
  Antisense strand to SEQ ID NO: 1557272
auuucuacuuacaaggcac

SEQ ID NO: 1557274 - RNA, 19 nt, Artificial Sequence
  Description of Artificial Sequence: Synthetic oligonucleotide
  Sense strand starting at position 2908 of SEQ ID NO: 1245368
acuaaugugucacucaauu

SEQ ID NO: 1557275 - RNA, 19 nt, Artificial Sequence
  Description of Artificial Sequence: Synthetic oligonucleotide
  Antisense strand to SEQ ID NO: 1557274
aauugagugacacauuagu

SEQ ID NO: 1557276 - RNA, 19 nt, Artificial Sequence
  Description of Artificial Sequence: Synthetic oligonucleotide
  Sense strand starting at position 2914 of SEQ ID NO: 1245368
gugucacucaauuguuuga

SEQ ID NO: 1557277 - RNA, 19 nt, Artificial Sequence
  Description of Artificial Sequence: Synthetic oligonucleotide
  Antisense strand to SEQ ID NO: 1557276
ucaaacaauugagugacac

SEQ ID NO: 1557278 - RNA, 19 nt, Artificial Sequence
  Description of Artificial Sequence: Synthetic oligonucleotide
  Sense strand starting at position 3080 of SEQ ID NO: 1245368
gguaauaauuuaugacaag

SEQ ID NO: 1557279 - RNA, 19 nt, Artificial Sequence
  Description of Artificial Sequence: Synthetic oligonucleotide
  Antisense strand to SEQ ID NO: 1557278
cuugucauaaauuauuacc

SEQ ID NO: 1557280 - RNA, 19 nt, Artificial Sequence
  Description of Artificial Sequence: Synthetic oligonucleotide
  Sense strand starting at position 3094 of SEQ ID NO: 1245368
acaaguaagaugugugcuu

SEQ ID NO: 1557281 - RNA, 19 nt, Artificial Sequence
  Description of Artificial Sequence: Synthetic oligonucleotide
  Antisense strand to SEQ ID NO: 1557280
aagcacacaucuuacuugu

SEQ ID NO: 1557282 - RNA, 19 nt, Artificial Sequence
  Description of Artificial Sequence: Synthetic oligonucleotide
  Sense strand starting at position 3110 of SEQ ID NO: 1245368
cuucucauguaaguugaua

SEQ ID NO: 1557283 - RNA, 19 nt, Artificial Sequence
  Description of Artificial Sequence: Synthetic oligonucleotide
  Antisense strand to SEQ ID NO: 1557282
uaucaacuuacaugagaag

SEQ ID NO: 1557284 - RNA, 19 nt, Artificial Sequence
  Description of Artificial Sequence: Synthetic oligonucleotide
  Sense strand starting at position 3121 of SEQ ID NO: 1245368
aguugauaaaugggaggua

SEQ ID NO: 1557285 - RNA, 19 nt, Artificial Sequence
  Description of Artificial Sequence: Synthetic oligonucleotide
  Antisense strand to SEQ ID NO: 1557284
uaccucccauuuaucaacu

SEQ ID NO: 1557286 - RNA, 19 nt, Artificial Sequence
  Description of Artificial Sequence: Synthetic oligonucleotide
  Sense strand starting at position 3168 of SEQ ID NO: 1245368
augccuuggcuacagauua

SEQ ID NO: 1557287 - RNA, 19 nt, Artificial Sequence
  Description of Artificial Sequence: Synthetic oligonucleotide
  Antisense strand to SEQ ID NO: 1557286
uaaucuguagccaaggcau

SEQ ID NO: 1557288 - RNA, 19 nt, Artificial Sequence
  Description of Artificial Sequence: Synthetic oligonucleotide
  Sense strand starting at position 3201 of SEQ ID NO: 1245368
ccaucacuuuaggagauuu

SEQ ID NO: 1557289 - RNA, 19 nt, Artificial Sequence
  Description of Artificial Sequence: Synthetic oligonucleotide
  Antisense strand to SEQ ID NO: 1557288
aaaucuccuaaagugaugg

SEQ ID NO: 1557290 - RNA, 19 nt, Artificial Sequence
  Description of Artificial Sequence: Synthetic oligonucleotide
  Sense strand starting at position 3214 of SEQ ID NO: 1245368
agauuuauuugccgaaguu

SEQ ID NO: 1557291 - RNA, 19 nt, Artificial Sequence
  Description of Artificial Sequence: Synthetic oligonucleotide
  Antisense strand to SEQ ID NO: 1557290
aacuucggcaaauaaaucu

SEQ ID NO: 1557292 - RNA, 19 nt, Artificial Sequence
  Description of Artificial Sequence: Synthetic oligonucleotide
  Sense strand starting at position 3256 of SEQ ID NO: 1245368
cuaugccuuucuucgaaga

SEQ ID NO: 1557293 - RNA, 19 nt, Artificial Sequence
  Description of Artificial Sequence: Synthetic oligonucleotide
  Antisense strand to SEQ ID NO: 1557292
ucuucgaagaaaggcauag

SEQ ID NO: 1557294 - RNA, 19 nt, Artificial Sequence
  Description of Artificial Sequence: Synthetic oligonucleotide
  Sense strand starting at position 3261 of SEQ ID NO: 1245368
ccuuucuucgaagaugauu

SEQ ID NO: 1557295 - RNA, 19 nt, Artificial Sequence
  Description of Artificial Sequence: Synthetic oligonucleotide
  Antisense strand to SEQ ID NO: 1557294
aaucaucuucgaagaaagg

SEQ ID NO: 1557296 - RNA, 19 nt, Artificial Sequence
  Description of Artificial Sequence: Synthetic oligonucleotide
  Sense strand starting at position 3522 of SEQ ID NO: 1245368
gguggccaccuguaaagau

SEQ ID NO: 1557297 - RNA, 19 nt, Artificial Sequence
  Description of Artificial Sequence: Synthetic oligonucleotide
  Antisense strand to SEQ ID NO: 1557296
aucuuuacagguggccacc

SEQ ID NO: 1557298 - RNA, 19 nt, Artificial Sequence
  Description of Artificial Sequence: Synthetic oligonucleotide
  Sense strand starting at position 3552 of SEQ ID NO: 1245368
uugcauugccaugaaguuu

SEQ ID NO: 1557299 - RNA, 19 nt, Artificial Sequence
  Description of Artificial Sequence: Synthetic oligonucleotide
  Antisense strand to SEQ ID NO: 1557298
aaacuucauggcaaugcaa

SEQ ID NO: 1557300 - RNA, 19 nt, Artificial Sequence
  Description of Artificial Sequence: Synthetic oligonucleotide
  Sense strand starting at position 3666 of SEQ ID NO: 1245368
ggcagauuugcgugaccag

SEQ ID NO: 1557301 - RNA, 19 nt, Artificial Sequence
  Description of Artificial Sequence: Synthetic oligonucleotide
  Antisense strand to SEQ ID NO: 1557300
cuggucacgcaaaucugcc

SEQ ID NO: 1557302 - RNA, 19 nt, Artificial Sequence
  Description of Artificial Sequence: Synthetic oligonucleotide
  Sense strand starting at position 3667 of SEQ ID NO: 1245368
gcagauuugcgugaccagu

SEQ ID NO: 1557303 - RNA, 19 nt, Artificial Sequence
  Description of Artificial Sequence: Synthetic oligonucleotide
  Antisense strand to SEQ ID NO: 1557302
acuggucacgcaaaucugc

SEQ ID NO: 1557304 - RNA, 19 nt, Artificial Sequence
  Description of Artificial Sequence: Synthetic oligonucleotide
  Sense strand starting at position 3828 of SEQ ID NO: 1245368
auaauuuagugugacucaa

SEQ ID NO: 1557305 - RNA, 19 nt, Artificial Sequence
  Description of Artificial Sequence: Synthetic oligonucleotide
  Antisense strand to SEQ ID NO: 1557304
uugagucacacuaaauuau

SEQ ID NO: 1557306 - RNA, 19 nt, Artificial Sequence
  Description of Artificial Sequence: Synthetic oligonucleotide
  Sense strand starting at position 3832 of SEQ ID NO: 1245368
uuuagugugacucaaguua

SEQ ID NO: 1557307 - RNA, 19 nt, Artificial Sequence
  Description of Artificial Sequence: Synthetic oligonucleotide
  Antisense strand to SEQ ID NO: 1557306
uaacuugagucacacuaaa

SEQ ID NO: 1557308 - RNA, 19 nt, Artificial Sequence
  Description of Artificial Sequence: Synthetic oligonucleotide
  Sense strand starting at position 88 of SEQ ID NO: 1245369
gagcauguguguuuccaug

SEQ ID NO: 1557309 - RNA, 19 nt, Artificial Sequence
  Description of Artificial Sequence: Synthetic oligonucleotide
  Antisense strand to SEQ ID NO: 1557308
cauggaaacacacaugcuc

SEQ ID NO: 1557310 - RNA, 19 nt, Artificial Sequence
  Description of Artificial Sequence: Synthetic oligonucleotide
  Sense strand starting at position 90 of SEQ ID NO: 1245369
gcauguguguuuccauggu

SEQ ID NO: 1557311 - RNA, 19 nt, Artificial Sequence
  Description of Artificial Sequence: Synthetic oligonucleotide
  Antisense strand to SEQ ID NO: 1557310
accauggaaacacacaugc

SEQ ID NO: 1557312 - RNA, 19 nt, Artificial Sequence
  Description of Artificial Sequence: Synthetic oligonucleotide
  Sense strand starting at position 94 of SEQ ID NO: 1245369
guguguuuccauggugagu

SEQ ID NO: 1557313 - RNA, 19 nt, Artificial Sequence
  Description of Artificial Sequence: Synthetic oligonucleotide
  Antisense strand to SEQ ID NO: 1557312
acucaccauggaaacacac

SEQ ID NO: 1557314 - RNA, 19 nt, Artificial Sequence
  Description of Artificial Sequence: Synthetic oligonucleotide
  Sense strand starting at position 96 of SEQ ID NO: 1245369
guguuuccauggugaguga

SEQ ID NO: 1557315 - RNA, 19 nt, Artificial Sequence
  Description of Artificial Sequence: Synthetic oligonucleotide
  Antisense strand to SEQ ID NO: 1557314
ucacucaccauggaaacac

SEQ ID NO: 1557316 - RNA, 19 nt, Artificial Sequence
  Description of Artificial Sequence: Synthetic oligonucleotide
  Sense strand starting at position 117 of SEQ ID NO: 1245369
uauugauguuuaucaggaa

SEQ ID NO: 1557317 - RNA, 19 nt, Artificial Sequence
  Description of Artificial Sequence: Synthetic oligonucleotide
  Antisense strand to SEQ ID NO: 1557316
uuccugauaaacaucaaua

SEQ ID NO: 1557318 - RNA, 19 nt, Artificial Sequence
  Description of Artificial Sequence: Synthetic oligonucleotide
  Sense strand starting at position 120 of SEQ ID NO: 1245369
ugauguuuaucaggaauga

SEQ ID NO: 1557319 - RNA, 19 nt, Artificial Sequence
  Description of Artificial Sequence: Synthetic oligonucleotide
  Antisense strand to SEQ ID NO: 1557318
ucauuccugauaaacauca

SEQ ID NO: 1557320 - RNA, 19 nt, Artificial Sequence
  Description of Artificial Sequence: Synthetic oligonucleotide
  Sense strand starting at position 164 of SEQ ID NO: 1245369
ggcgaucaaucacacauca

SEQ ID NO: 1557321 - RNA, 19 nt, Artificial Sequence
  Description of Artificial Sequence: Synthetic oligonucleotide
  Antisense strand to SEQ ID NO: 1557320
ugaugugugauugaucgcc

SEQ ID NO: 1557322 - RNA, 19 nt, Artificial Sequence
  Description of Artificial Sequence: Synthetic oligonucleotide
  Sense strand starting at position 317 of SEQ ID NO: 1245369
aagacaucuuuagagguaa

SEQ ID NO: 1557323 - RNA, 19 nt, Artificial Sequence
  Description of Artificial Sequence: Synthetic oligonucleotide
  Antisense strand to SEQ ID NO: 1557322
uuaccucuaaagaugucuu

SEQ ID NO: 1557324 - RNA, 19 nt, Artificial Sequence
  Description of Artificial Sequence: Synthetic oligonucleotide
  Sense strand starting at position 395 of SEQ ID NO: 1245369
agagaaaucuucugaacac

SEQ ID NO: 1557325 - RNA, 19 nt, Artificial Sequence
  Description of Artificial Sequence: Synthetic oligonucleotide
  Antisense strand to SEQ ID NO: 1557324
guguucagaagauuucucu

SEQ ID NO: 1557326 - RNA, 19 nt, Artificial Sequence
  Description of Artificial Sequence: Synthetic oligonucleotide
  Sense strand starting at position 625 of SEQ ID NO: 1245369
gcgaacuuucucugcucca

SEQ ID NO: 1557327 - RNA, 19 nt, Artificial Sequence
  Description of Artificial Sequence: Synthetic oligonucleotide
  Antisense strand to SEQ ID NO: 1557326
uggagcagagaaaguucgc

SEQ ID NO: 1557328 - RNA, 19 nt, Artificial Sequence
  Description of Artificial Sequence: Synthetic oligonucleotide
  Sense strand starting at position 1455 of SEQ ID NO: 1245369
cacuuagucuaagaggaag

SEQ ID NO: 1557329 - RNA, 19 nt, Artificial Sequence
  Description of Artificial Sequence: Synthetic oligonucleotide
  Antisense strand to SEQ ID NO: 1557328
cuuccucuuagacuaagug

SEQ ID NO: 1557330 - RNA, 19 nt, Artificial Sequence
  Description of Artificial Sequence: Synthetic oligonucleotide
  Sense strand starting at position 2154 of SEQ ID NO: 1245369
gauuguacauuggaggaau

SEQ ID NO: 1557331 - RNA, 19 nt, Artificial Sequence
  Description of Artificial Sequence: Synthetic oligonucleotide
  Antisense strand to SEQ ID NO: 1557330
auuccuccaauguacaauc

SEQ ID NO: 1557332 - RNA, 19 nt, Artificial Sequence
  Description of Artificial Sequence: Synthetic oligonucleotide
  Sense strand starting at position 2199 of SEQ ID NO: 1245369
cuggcugauaccggguaaa

SEQ ID NO: 1557333 - RNA, 19 nt, Artificial Sequence
  Description of Artificial Sequence: Synthetic oligonucleotide
  Antisense strand to SEQ ID NO: 1557332
uuuacccgguaucagccag

SEQ ID NO: 1557334 - RNA, 19 nt, Artificial Sequence
  Description of Artificial Sequence: Synthetic oligonucleotide
  Sense strand starting at position 2226 of SEQ ID NO: 1245369
gcucuaaguuaaguagaca

SEQ ID NO: 1557335 - RNA, 19 nt, Artificial Sequence
  Description of Artificial Sequence: Synthetic oligonucleotide
  Antisense strand to SEQ ID NO: 1557334
ugucuacuuaacuuagagc

SEQ ID NO: 1557336 - RNA, 19 nt, Artificial Sequence
  Description of Artificial Sequence: Synthetic oligonucleotide
  Sense strand starting at position 2240 of SEQ ID NO: 1245369
agacauuaguuccugcaga

SEQ ID NO: 1557337 - RNA, 19 nt, Artificial Sequence
  Description of Artificial Sequence: Synthetic oligonucleotide
  Antisense strand to SEQ ID NO: 1557336
ucugcaggaacuaaugucu

SEQ ID NO: 1557338 - RNA, 19 nt, Artificial Sequence
  Description of Artificial Sequence: Synthetic oligonucleotide
  Sense strand starting at position 2241 of SEQ ID NO: 1245369
gacauuaguuccugcagau

SEQ ID NO: 1557339 - RNA, 19 nt, Artificial Sequence
  Description of Artificial Sequence: Synthetic oligonucleotide
  Antisense strand to SEQ ID NO: 1557338
aucugcaggaacuaauguc

SEQ ID NO: 1557340 - RNA, 19 nt, Artificial Sequence
  Description of Artificial Sequence: Synthetic oligonucleotide
  Sense strand starting at position 2354 of SEQ ID NO: 1245369
uugggugaagcauguccua

SEQ ID NO: 1557341 - RNA, 19 nt, Artificial Sequence
  Description of Artificial Sequence: Synthetic oligonucleotide
  Antisense strand to SEQ ID NO: 1557340
uaggacaugcuucacccaa

SEQ ID NO: 1557342 - RNA, 19 nt, Artificial Sequence
  Description of Artificial Sequence: Synthetic oligonucleotide
  Sense strand starting at position 2357 of SEQ ID NO: 1245369
ggugaagcauguccuacau

SEQ ID NO: 1557343 - RNA, 19 nt, Artificial Sequence
  Description of Artificial Sequence: Synthetic oligonucleotide
  Antisense strand to SEQ ID NO: 1557342
auguaggacaugcuucacc

SEQ ID NO: 1557344 - RNA, 19 nt, Artificial Sequence
  Description of Artificial Sequence: Synthetic oligonucleotide
  Sense strand starting at position 2359 of SEQ ID NO: 1245369
ugaagcauguccuacauuu

SEQ ID NO: 1557345 - RNA, 19 nt, Artificial Sequence
  Description of Artificial Sequence: Synthetic oligonucleotide
  Antisense strand to SEQ ID NO: 1557344
aaauguaggacaugcuuca

SEQ ID NO: 1557346 - RNA, 19 nt, Artificial Sequence
  Description of Artificial Sequence: Synthetic oligonucleotide
  Sense strand starting at position 2464 of SEQ ID NO: 1245369
uuugguaauucguggguaa

SEQ ID NO: 1557347 - RNA, 19 nt, Artificial Sequence
  Description of Artificial Sequence: Synthetic oligonucleotide
  Antisense strand to SEQ ID NO: 1557346
uuacccacgaauuaccaaa

SEQ ID NO: 1557348 - RNA, 19 nt, Artificial Sequence
  Description of Artificial Sequence: Synthetic oligonucleotide
  Sense strand starting at position 2465 of SEQ ID NO: 1245369
uugguaauucguggguaac

SEQ ID NO: 1557349 - RNA, 19 nt, Artificial Sequence
  Description of Artificial Sequence: Synthetic oligonucleotide
  Antisense strand to SEQ ID NO: 1557348
guuacccacgaauuaccaa

SEQ ID NO: 1557350 - RNA, 19 nt, Artificial Sequence
  Description of Artificial Sequence: Synthetic oligonucleotide
  Sense strand starting at position 2466 of SEQ ID NO: 1245369
ugguaauucguggguaacu

SEQ ID NO: 1557351 - RNA, 19 nt, Artificial Sequence
  Description of Artificial Sequence: Synthetic oligonucleotide
  Antisense strand to SEQ ID NO: 1557350
aguuacccacgaauuacca

SEQ ID NO: 1557352 - RNA, 19 nt, Artificial Sequence
  Description of Artificial Sequence: Synthetic oligonucleotide
  Sense strand starting at position 2467 of SEQ ID NO: 1245369
gguaauucguggguaacug

SEQ ID NO: 1557353 - RNA, 19 nt, Artificial Sequence
  Description of Artificial Sequence: Synthetic oligonucleotide
  Antisense strand to SEQ ID NO: 1557352
caguuacccacgaauuacc

SEQ ID NO: 1557354 - RNA, 19 nt, Artificial Sequence
  Description of Artificial Sequence: Synthetic oligonucleotide
  Sense strand starting at position 2468 of SEQ ID NO: 1245369
guaauucguggguaacuga

SEQ ID NO: 1557355 - RNA, 19 nt, Artificial Sequence
  Description of Artificial Sequence: Synthetic oligonucleotide
  Antisense strand to SEQ ID NO: 1557354
ucaguuacccacgaauuac

SEQ ID NO: 1557356 - RNA, 19 nt, Artificial Sequence
  Description of Artificial Sequence: Synthetic oligonucleotide
  Sense strand starting at position 2757 of SEQ ID NO: 1245369
gugucugugcucugggaau

SEQ ID NO: 1557357 - RNA, 19 nt, Artificial Sequence
  Description of Artificial Sequence: Synthetic oligonucleotide
  Antisense strand to SEQ ID NO: 1557356
auucccagagcacagacac

SEQ ID NO: 1557358 - RNA, 19 nt, Artificial Sequence
  Description of Artificial Sequence: Synthetic oligonucleotide
  Sense strand starting at position 2759 of SEQ ID NO: 1245369
gucugugcucugggaauuu

SEQ ID NO: 1557359 - RNA, 19 nt, Artificial Sequence
  Description of Artificial Sequence: Synthetic oligonucleotide
  Antisense strand to SEQ ID NO: 1557358
aaauucccagagcacagac

SEQ ID NO: 1557360 - RNA, 19 nt, Artificial Sequence
  Description of Artificial Sequence: Synthetic oligonucleotide
  Sense strand starting at position 2794 of SEQ ID NO: 1245369
auauguguguucucuccca

SEQ ID NO: 1557361 - RNA, 19 nt, Artificial Sequence
  Description of Artificial Sequence: Synthetic oligonucleotide
  Antisense strand to SEQ ID NO: 1557360
ugggagagaacacacauau

SEQ ID NO: 1557362 - RNA, 19 nt, Artificial Sequence
  Description of Artificial Sequence: Synthetic oligonucleotide
  Sense strand starting at position 2802 of SEQ ID NO: 1245369
guucucucccaaugggaaa

SEQ ID NO: 1557363 - RNA, 19 nt, Artificial Sequence
  Description of Artificial Sequence: Synthetic oligonucleotide
  Antisense strand to SEQ ID NO: 1557362
uuucccauugggagagaac

SEQ ID NO: 1557364 - RNA, 19 nt, Artificial Sequence
  Description of Artificial Sequence: Synthetic oligonucleotide
  Sense strand starting at position 2822 of SEQ ID NO: 1245369
cuguaacagucuuguagau

SEQ ID NO: 1557365 - RNA, 19 nt, Artificial Sequence
  Description of Artificial Sequence: Synthetic oligonucleotide
  Antisense strand to SEQ ID NO: 1557364
aucuacaagacuguuacag

SEQ ID NO: 1557366 - RNA, 19 nt, Artificial Sequence
  Description of Artificial Sequence: Synthetic oligonucleotide
  Sense strand starting at position 2824 of SEQ ID NO: 1245369
guaacagucuuguagaucu

SEQ ID NO: 1557367 - RNA, 19 nt, Artificial Sequence
  Description of Artificial Sequence: Synthetic oligonucleotide
  Antisense strand to SEQ ID NO: 1557366
agaucuacaagacuguuac

SEQ ID NO: 1557368 - RNA, 19 nt, Artificial Sequence
  Description of Artificial Sequence: Synthetic oligonucleotide
  Sense strand starting at position 2893 of SEQ ID NO: 1245369
uggcuuaguuccugcaacu

SEQ ID NO: 1557369 - RNA, 19 nt, Artificial Sequence
  Description of Artificial Sequence: Synthetic oligonucleotide
  Antisense strand to SEQ ID NO: 1557368
aguugcaggaacuaagcca

SEQ ID NO: 1557370 - RNA, 19 nt, Artificial Sequence
  Description of Artificial Sequence: Synthetic oligonucleotide
  Sense strand starting at position 2906 of SEQ ID NO: 1245369
gcaacuugcaugggacaga

SEQ ID NO: 1557371 - RNA, 19 nt, Artificial Sequence
  Description of Artificial Sequence: Synthetic oligonucleotide
  Antisense strand to SEQ ID NO: 1557370
ucugucccaugcaaguugc

SEQ ID NO: 1557372 - RNA, 19 nt, Artificial Sequence
  Description of Artificial Sequence: Synthetic oligonucleotide
  Sense strand starting at position 1 of SEQ ID NO: 1245370
ggaaucauagcacgguaca

SEQ ID NO: 1557373 - RNA, 19 nt, Artificial Sequence
  Description of Artificial Sequence: Synthetic oligonucleotide
  Antisense strand to SEQ ID NO: 1557372
uguaccgugcuaugauucc

SEQ ID NO: 1557374 - RNA, 19 nt, Artificial Sequence
  Description of Artificial Sequence: Synthetic oligonucleotide
  Sense strand starting at position 105 of SEQ ID NO: 1245370
aucaacagccuuugaugaa

SEQ ID NO: 1557375 - RNA, 19 nt, Artificial Sequence
  Description of Artificial Sequence: Synthetic oligonucleotide
  Antisense strand to SEQ ID NO: 1557374
uucaucaaaggcuguugau

SEQ ID NO: 1557376 - RNA, 19 nt, Artificial Sequence
  Description of Artificial Sequence: Synthetic oligonucleotide
  Sense strand starting at position 137 of SEQ ID NO: 1245370
accagaccuguaugcuuua

SEQ ID NO: 1557377 - RNA, 19 nt, Artificial Sequence
  Description of Artificial Sequence: Synthetic oligonucleotide
  Antisense strand to SEQ ID NO: 1557376
uaaagcauacaggucuggu

SEQ ID NO: 1557378 - RNA, 19 nt, Artificial Sequence
  Description of Artificial Sequence: Synthetic oligonucleotide
  Sense strand starting at position 272 of SEQ ID NO: 1245370
uugcuucgccauuaagaag

SEQ ID NO: 1557379 - RNA, 19 nt, Artificial Sequence
  Description of Artificial Sequence: Synthetic oligonucleotide
  Antisense strand to SEQ ID NO: 1557378
cuucuuaauggcgaagcaa

SEQ ID NO: 1557380 - RNA, 19 nt, Artificial Sequence
  Description of Artificial Sequence: Synthetic oligonucleotide
  Sense strand starting at position 293 of SEQ ID NO: 1245370
ggaagcucugcuggguaga

SEQ ID NO: 1557381 - RNA, 19 nt, Artificial Sequence
  Description of Artificial Sequence: Synthetic oligonucleotide
  Antisense strand to SEQ ID NO: 1557380
ucuacccagcagagcuucc

SEQ ID NO: 1557382 - RNA, 19 nt, Artificial Sequence
  Description of Artificial Sequence: Synthetic oligonucleotide
  Sense strand starting at position 294 of SEQ ID NO: 1245370
gaagcucugcuggguagaa

SEQ ID NO: 1557383 - RNA, 19 nt, Artificial Sequence
  Description of Artificial Sequence: Synthetic oligonucleotide
  Antisense strand to SEQ ID NO: 1557382
uucuacccagcagagcuuc

SEQ ID NO: 1557384 - RNA, 19 nt, Artificial Sequence
  Description of Artificial Sequence: Synthetic oligonucleotide
  Sense strand starting at position 320 of SEQ ID NO: 1245370
uucucugaggucugagacu

SEQ ID NO: 1557385 - RNA, 19 nt, Artificial Sequence
  Description of Artificial Sequence: Synthetic oligonucleotide
  Antisense strand to SEQ ID NO: 1557384
agucucagaccucagagaa

SEQ ID NO: 1557386 - RNA, 19 nt, Artificial Sequence
  Description of Artificial Sequence: Synthetic oligonucleotide
  Sense strand starting at position 430 of SEQ ID NO: 1245370
ugaagcaugugguccuuaa

SEQ ID NO: 1557387 - RNA, 19 nt, Artificial Sequence
  Description of Artificial Sequence: Synthetic oligonucleotide
  Antisense strand to SEQ ID NO: 1557386
uuaaggaccacaugcuuca

SEQ ID NO: 1557388 - RNA, 19 nt, Artificial Sequence
  Description of Artificial Sequence: Synthetic oligonucleotide
  Sense strand starting at position 774 of SEQ ID NO: 1245370
gaggacugaguuugcagaa

SEQ ID NO: 1557389 - RNA, 19 nt, Artificial Sequence
  Description of Artificial Sequence: Synthetic oligonucleotide
  Antisense strand to SEQ ID NO: 1557388
uucugcaaacucaguccuc

SEQ ID NO: 1557390 - RNA, 19 nt, Artificial Sequence
  Description of Artificial Sequence: Synthetic oligonucleotide
  Sense strand starting at position 891 of SEQ ID NO: 1245370
ucuggaauugcacaauguu

SEQ ID NO: 1557391 - RNA, 19 nt, Artificial Sequence
  Description of Artificial Sequence: Synthetic oligonucleotide
  Antisense strand to SEQ ID NO: 1557390
aacauugugcaauuccaga

SEQ ID NO: 1557392 - RNA, 19 nt, Artificial Sequence
  Description of Artificial Sequence: Synthetic oligonucleotide
  Sense strand starting at position 1379 of SEQ ID NO: 1245370
ucaccuguauuguuugaaa

SEQ ID NO: 1557393 - RNA, 19 nt, Artificial Sequence
  Description of Artificial Sequence: Synthetic oligonucleotide
  Antisense strand to SEQ ID NO: 1557392
uuucaaacaauacagguga

SEQ ID NO: 1557394 - RNA, 19 nt, Artificial Sequence
  Description of Artificial Sequence: Synthetic oligonucleotide
  Sense strand starting at position 2150 of SEQ ID NO: 1245370
ggcgcuuuguccacgagua

SEQ ID NO: 1557395 - RNA, 19 nt, Artificial Sequence
  Description of Artificial Sequence: Synthetic oligonucleotide
  Antisense strand to SEQ ID NO: 1557394
uacucguggacaaagcgcc

SEQ ID NO: 1557396 - RNA, 19 nt, Artificial Sequence
  Description of Artificial Sequence: Synthetic oligonucleotide
  Sense strand starting at position 2169 of SEQ ID NO: 1245370
acugaaacuccacgaguaa

SEQ ID NO: 1557397 - RNA, 19 nt, Artificial Sequence
  Description of Artificial Sequence: Synthetic oligonucleotide
  Antisense strand to SEQ ID NO: 1557396
uuacucguggaguuucagu

SEQ ID NO: 1557398 - RNA, 19 nt, Artificial Sequence
  Description of Artificial Sequence: Synthetic oligonucleotide
  Sense strand starting at position 2438 of SEQ ID NO: 1245370
augccaugugcccaaauau

SEQ ID NO: 1557399 - RNA, 19 nt, Artificial Sequence
  Description of Artificial Sequence: Synthetic oligonucleotide
  Antisense strand to SEQ ID NO: 1557398
auauuugggcacauggcau

SEQ ID NO: 1557400 - RNA, 19 nt, Artificial Sequence
  Description of Artificial Sequence: Synthetic oligonucleotide
  Sense strand starting at position 2586 of SEQ ID NO: 1245370
acagaagucucacuguucu

SEQ ID NO: 1557401 - RNA, 19 nt, Artificial Sequence
  Description of Artificial Sequence: Synthetic oligonucleotide
  Antisense strand to SEQ ID NO: 1557400
agaacagugagacuucugu

SEQ ID NO: 1557402 - RNA, 19 nt, Artificial Sequence
  Description of Artificial Sequence: Synthetic oligonucleotide
  Sense strand starting at position 2604 of SEQ ID NO: 1245370
ugaugaugggcuggugaua

SEQ ID NO: 1557403 - RNA, 19 nt, Artificial Sequence
  Description of Artificial Sequence: Synthetic oligonucleotide
  Antisense strand to SEQ ID NO: 1557402
uaucaccagcccaucauca

SEQ ID NO: 1557404 - RNA, 19 nt, Artificial Sequence
  Description of Artificial Sequence: Synthetic oligonucleotide
  Sense strand starting at position 2615 of SEQ ID NO: 1245370
uggugauaucuggaugccu

SEQ ID NO: 1557405 - RNA, 19 nt, Artificial Sequence
  Description of Artificial Sequence: Synthetic oligonucleotide
  Antisense strand to SEQ ID NO: 1557404
aggcauccagauaucacca

SEQ ID NO: 1557406 - RNA, 19 nt, Artificial Sequence
  Description of Artificial Sequence: Synthetic oligonucleotide
  Sense strand starting at position 2617 of SEQ ID NO: 1245370
gugauaucuggaugccuaa

SEQ ID NO: 1557407 - RNA, 19 nt, Artificial Sequence
  Description of Artificial Sequence: Synthetic oligonucleotide
  Antisense strand to SEQ ID NO: 1557406
uuaggcauccagauaucac

SEQ ID NO: 1557408 - RNA, 19 nt, Artificial Sequence
  Description of Artificial Sequence: Synthetic oligonucleotide
  Sense strand starting at position 2620 of SEQ ID NO: 1245370
auaucuggaugccuaauau

SEQ ID NO: 1557409 - RNA, 19 nt, Artificial Sequence
  Description of Artificial Sequence: Synthetic oligonucleotide
  Antisense strand to SEQ ID NO: 1557408
auauuaggcauccagauau

SEQ ID NO: 1557410 - RNA, 19 nt, Artificial Sequence
  Description of Artificial Sequence: Synthetic oligonucleotide
  Sense strand starting at position 2732 of SEQ ID NO: 1245370
ucaagauuaugcucuaaug

SEQ ID NO: 1557411 - RNA, 19 nt, Artificial Sequence
  Description of Artificial Sequence: Synthetic oligonucleotide
  Antisense strand to SEQ ID NO: 1557410
cauuagagcauaaucuuga

SEQ ID NO: 1557412 - RNA, 19 nt, Artificial Sequence
  Description of Artificial Sequence: Synthetic oligonucleotide
  Sense strand starting at position 2757 of SEQ ID NO: 1245370
uggacaaccuuccuugagu

SEQ ID NO: 1557413 - RNA, 19 nt, Artificial Sequence
  Description of Artificial Sequence: Synthetic oligonucleotide
  Antisense strand to SEQ ID NO: 1557412
acucaaggaagguugucca

SEQ ID NO: 1557414 - RNA, 19 nt, Artificial Sequence
  Description of Artificial Sequence: Synthetic oligonucleotide
  Sense strand starting at position 2768 of SEQ ID NO: 1245370
ccuugagucgcugucguuu

SEQ ID NO: 1557415 - RNA, 19 nt, Artificial Sequence
  Description of Artificial Sequence: Synthetic oligonucleotide
  Antisense strand to SEQ ID NO: 1557414
aaacgacagcgacucaagg

SEQ ID NO: 1557416 - RNA, 19 nt, Artificial Sequence
  Description of Artificial Sequence: Synthetic oligonucleotide
  Sense strand starting at position 2859 of SEQ ID NO: 1245370
gaaagcaauccucagguuu

SEQ ID NO: 1557417 - RNA, 19 nt, Artificial Sequence
  Description of Artificial Sequence: Synthetic oligonucleotide
  Antisense strand to SEQ ID NO: 1557416
aaaccugaggauugcuuuc

SEQ ID NO: 1557418 - RNA, 19 nt, Artificial Sequence
  Description of Artificial Sequence: Synthetic oligonucleotide
  Sense strand starting at position 2910 of SEQ ID NO: 1245370
auccauuaucaugggacca

SEQ ID NO: 1557419 - RNA, 19 nt, Artificial Sequence
  Description of Artificial Sequence: Synthetic oligonucleotide
  Antisense strand to SEQ ID NO: 1557418
uggucccaugauaauggau

SEQ ID NO: 1557420 - RNA, 19 nt, Artificial Sequence
  Description of Artificial Sequence: Synthetic oligonucleotide
  Sense strand starting at position 3120 of SEQ ID NO: 1245370
ccaugcuaauucuugagua

SEQ ID NO: 1557421 - RNA, 19 nt, Artificial Sequence
  Description of Artificial Sequence: Synthetic oligonucleotide
  Antisense strand to SEQ ID NO: 1557420
uacucaagaauuagcaugg

SEQ ID NO: 1557422 - RNA, 19 nt, Artificial Sequence
  Description of Artificial Sequence: Synthetic oligonucleotide
  Sense strand starting at position 3122 of SEQ ID NO: 1245370
augcuaauucuugaguaca

SEQ ID NO: 1557423 - RNA, 19 nt, Artificial Sequence
  Description of Artificial Sequence: Synthetic oligonucleotide
  Antisense strand to SEQ ID NO: 1557422
uguacucaagaauuagcau

SEQ ID NO: 1557424 - RNA, 19 nt, Artificial Sequence
  Description of Artificial Sequence: Synthetic oligonucleotide
  Sense strand starting at position 3124 of SEQ ID NO: 1245370
gcuaauucuugaguacauc

SEQ ID NO: 1557425 - RNA, 19 nt, Artificial Sequence
  Description of Artificial Sequence: Synthetic oligonucleotide
  Antisense strand to SEQ ID NO: 1557424
gauguacucaagaauuagc

SEQ ID NO: 1557426 - RNA, 19 nt, Artificial Sequence
  Description of Artificial Sequence: Synthetic oligonucleotide
  Sense strand starting at position 3199 of SEQ ID NO: 1245370
gggaaacaguacguuguaa

SEQ ID NO: 1557427 - RNA, 19 nt, Artificial Sequence
  Description of Artificial Sequence: Synthetic oligonucleotide
  Antisense strand to SEQ ID NO: 1557426
uuacaacguacuguuuccc

SEQ ID NO: 1557428 - RNA, 19 nt, Artificial Sequence
  Description of Artificial Sequence: Synthetic oligonucleotide
  Sense strand starting at position 3201 of SEQ ID NO: 1245370
gaaacaguacguuguaaug

SEQ ID NO: 1557429 - RNA, 19 nt, Artificial Sequence
  Description of Artificial Sequence: Synthetic oligonucleotide
  Antisense strand to SEQ ID NO: 1557428
cauuacaacguacuguuuc

SEQ ID NO: 1557430 - RNA, 19 nt, Artificial Sequence
  Description of Artificial Sequence: Synthetic oligonucleotide
  Sense strand starting at position 3258 of SEQ ID NO: 1245370
uugacaagcugaccuuuaa

SEQ ID NO: 1557431 - RNA, 19 nt, Artificial Sequence
  Description of Artificial Sequence: Synthetic oligonucleotide
  Antisense strand to SEQ ID NO: 1557430
uuaaaggucagcuugucaa

SEQ ID NO: 1557432 - RNA, 19 nt, Artificial Sequence
  Description of Artificial Sequence: Synthetic oligonucleotide
  Sense strand starting at position 3304 of SEQ ID NO: 1245370
acauaauguuagucucaaa

SEQ ID NO: 1557433 - RNA, 19 nt, Artificial Sequence
  Description of Artificial Sequence: Synthetic oligonucleotide
  Antisense strand to SEQ ID NO: 1557432
uuugagacuaacauuaugu

SEQ ID NO: 1557434 - RNA, 19 nt, Artificial Sequence
  Description of Artificial Sequence: Synthetic oligonucleotide
  Sense strand starting at position 3418 of SEQ ID NO: 1245370
ccugcauggcaucaaucau

SEQ ID NO: 1557435 - RNA, 19 nt, Artificial Sequence
  Description of Artificial Sequence: Synthetic oligonucleotide
  Antisense strand to SEQ ID NO: 1557434
augauugaugccaugcagg

SEQ ID NO: 1557436 - RNA, 19 nt, Artificial Sequence
  Description of Artificial Sequence: Synthetic oligonucleotide
  Sense strand starting at position 3594 of SEQ ID NO: 1245370
gcaggucuuagggacugua

SEQ ID NO: 1557437 - RNA, 19 nt, Artificial Sequence
  Description of Artificial Sequence: Synthetic oligonucleotide
  Antisense strand to SEQ ID NO: 1557436
uacagucccuaagaccugc

SEQ ID NO: 1557438 - RNA, 19 nt, Artificial Sequence
  Description of Artificial Sequence: Synthetic oligonucleotide
  Sense strand starting at position 3674 of SEQ ID NO: 1245370
cgaggucacccugacaaca

SEQ ID NO: 1557439 - RNA, 19 nt, Artificial Sequence
  Description of Artificial Sequence: Synthetic oligonucleotide
  Antisense strand to SEQ ID NO: 1557438
uguugucagggugaccucg

SEQ ID NO: 1557440 - RNA, 19 nt, Artificial Sequence
  Description of Artificial Sequence: Synthetic oligonucleotide
  Sense strand starting at position 3745 of SEQ ID NO: 1245370
ccugaagcagucuagucaa

SEQ ID NO: 1557441 - RNA, 19 nt, Artificial Sequence
  Description of Artificial Sequence: Synthetic oligonucleotide
  Antisense strand to SEQ ID NO: 1557440
uugacuagacugcuucagg

SEQ ID NO: 1557442 - RNA, 19 nt, Artificial Sequence
  Description of Artificial Sequence: Synthetic oligonucleotide
  Sense strand starting at position 3748 of SEQ ID NO: 1245370
gaagcagucuagucaauaa

SEQ ID NO: 1557443 - RNA, 19 nt, Artificial Sequence
  Description of Artificial Sequence: Synthetic oligonucleotide
  Antisense strand to SEQ ID NO: 1557442
uuauugacuagacugcuuc

SEQ ID NO: 1557444 - RNA, 19 nt, Artificial Sequence
  Description of Artificial Sequence: Synthetic oligonucleotide
  Sense strand starting at position 3847 of SEQ ID NO: 1245370
ccuguaugucccuauuacu

SEQ ID NO: 1557445 - RNA, 19 nt, Artificial Sequence
  Description of Artificial Sequence: Synthetic oligonucleotide
  Antisense strand to SEQ ID NO: 1557444
aguaauagggacauacagg

SEQ ID NO: 1557446 - RNA, 19 nt, Artificial Sequence
  Description of Artificial Sequence: Synthetic oligonucleotide
  Sense strand starting at position 3854 of SEQ ID NO: 1245370
gucccuauuacugggaaga

SEQ ID NO: 1557447 - RNA, 19 nt, Artificial Sequence
  Description of Artificial Sequence: Synthetic oligonucleotide
  Antisense strand to SEQ ID NO: 1557446
ucuucccaguaauagggac

SEQ ID NO: 1557448 - RNA, 19 nt, Artificial Sequence
  Description of Artificial Sequence: Synthetic oligonucleotide
  Sense strand starting at position 3898 of SEQ ID NO: 1245370
ugacacuauguuuaugagu

SEQ ID NO: 1557449 - RNA, 19 nt, Artificial Sequence
  Description of Artificial Sequence: Synthetic oligonucleotide
  Antisense strand to SEQ ID NO: 1557448
acucauaaacauaguguca

SEQ ID NO: 1557450 - RNA, 19 nt, Artificial Sequence
  Description of Artificial Sequence: Synthetic oligonucleotide
  Sense strand starting at position 3903 of SEQ ID NO: 1245370
cuauguuuaugaguuauac

SEQ ID NO: 1557451 - RNA, 19 nt, Artificial Sequence
  Description of Artificial Sequence: Synthetic oligonucleotide
  Antisense strand to SEQ ID NO: 1557450
guauaacucauaaacauag

SEQ ID NO: 1557452 - RNA, 19 nt, Artificial Sequence
  Description of Artificial Sequence: Synthetic oligonucleotide
  Sense strand starting at position 133 of SEQ ID NO: 1245371
cugucucuccaguaaggga

SEQ ID NO: 1557453 - RNA, 19 nt, Artificial Sequence
  Description of Artificial Sequence: Synthetic oligonucleotide
  Antisense strand to SEQ ID NO: 1557452
ucccuuacuggagagacag

SEQ ID NO: 1557454 - RNA, 19 nt, Artificial Sequence
  Description of Artificial Sequence: Synthetic oligonucleotide
  Sense strand starting at position 277 of SEQ ID NO: 1245371
gcaacuauguggcuaggaa

SEQ ID NO: 1557455 - RNA, 19 nt, Artificial Sequence
  Description of Artificial Sequence: Synthetic oligonucleotide
  Antisense strand to SEQ ID NO: 1557454
uuccuagccacauaguugc

SEQ ID NO: 1557456 - RNA, 19 nt, Artificial Sequence
  Description of Artificial Sequence: Synthetic oligonucleotide
  Sense strand starting at position 432 of SEQ ID NO: 1245371
aaugcaguccaauaaggua

SEQ ID NO: 1557457 - RNA, 19 nt, Artificial Sequence
  Description of Artificial Sequence: Synthetic oligonucleotide
  Antisense strand to SEQ ID NO: 1557456
uaccuuauuggacugcauu

SEQ ID NO: 1557458 - RNA, 19 nt, Artificial Sequence
  Description of Artificial Sequence: Synthetic oligonucleotide
  Sense strand starting at position 536 of SEQ ID NO: 1245371
uaaugagaaucagagagaa

SEQ ID NO: 1557459 - RNA, 19 nt, Artificial Sequence
  Description of Artificial Sequence: Synthetic oligonucleotide
  Antisense strand to SEQ ID NO: 1557458
uucucucugauucucauua

SEQ ID NO: 1557460 - RNA, 19 nt, Artificial Sequence
  Description of Artificial Sequence: Synthetic oligonucleotide
  Sense strand starting at position 549 of SEQ ID NO: 1245371
agagaaguaucauugcaug

SEQ ID NO: 1557461 - RNA, 19 nt, Artificial Sequence
  Description of Artificial Sequence: Synthetic oligonucleotide
  Antisense strand to SEQ ID NO: 1557460
caugcaaugauacuucucu

SEQ ID NO: 1557462 - RNA, 19 nt, Artificial Sequence
  Description of Artificial Sequence: Synthetic oligonucleotide
  Sense strand starting at position 793 of SEQ ID NO: 1245371
auuugacacuaaggagaaa

SEQ ID NO: 1557463 - RNA, 19 nt, Artificial Sequence
  Description of Artificial Sequence: Synthetic oligonucleotide
  Antisense strand to SEQ ID NO: 1557462
uuucuccuuagugucaaau

SEQ ID NO: 1557464 - RNA, 19 nt, Artificial Sequence
  Description of Artificial Sequence: Synthetic oligonucleotide
  Sense strand starting at position 831 of SEQ ID NO: 1245371
cuaagaucugucgauaaca

SEQ ID NO: 1557465 - RNA, 19 nt, Artificial Sequence
  Description of Artificial Sequence: Synthetic oligonucleotide
  Antisense strand to SEQ ID NO: 1557464
uguuaucgacagaucuuag

SEQ ID NO: 1557466 - RNA, 19 nt, Artificial Sequence
  Description of Artificial Sequence: Synthetic oligonucleotide
  Sense strand starting at position 833 of SEQ ID NO: 1245371
aagaucugucgauaacauu

SEQ ID NO: 1557467 - RNA, 19 nt, Artificial Sequence
  Description of Artificial Sequence: Synthetic oligonucleotide
  Antisense strand to SEQ ID NO: 1557466
aauguuaucgacagaucuu

SEQ ID NO: 1557468 - RNA, 19 nt, Artificial Sequence
  Description of Artificial Sequence: Synthetic oligonucleotide
  Sense strand starting at position 839 of SEQ ID NO: 1245371
ugucgauaacauuacaauc

SEQ ID NO: 1557469 - RNA, 19 nt, Artificial Sequence
  Description of Artificial Sequence: Synthetic oligonucleotide
  Antisense strand to SEQ ID NO: 1557468
gauuguaauguuaucgaca

SEQ ID NO: 1557470 - RNA, 19 nt, Artificial Sequence
  Description of Artificial Sequence: Synthetic oligonucleotide
  Sense strand starting at position 913 of SEQ ID NO: 1245371
uauagaagacagugguuua

SEQ ID NO: 1557471 - RNA, 19 nt, Artificial Sequence
  Description of Artificial Sequence: Synthetic oligonucleotide
  Antisense strand to SEQ ID NO: 1557470
uaaaccacugucuucuaua

SEQ ID NO: 1557472 - RNA, 19 nt, Artificial Sequence
  Description of Artificial Sequence: Synthetic oligonucleotide
  Sense strand starting at position 914 of SEQ ID NO: 1245371
auagaagacagugguuuaa

SEQ ID NO: 1557473 - RNA, 19 nt, Artificial Sequence
  Description of Artificial Sequence: Synthetic oligonucleotide
  Antisense strand to SEQ ID NO: 1557472
uuaaaccacugucuucuau

SEQ ID NO: 1557474 - RNA, 19 nt, Artificial Sequence
  Description of Artificial Sequence: Synthetic oligonucleotide
  Sense strand starting at position 962 of SEQ ID NO: 1245371
cccaaacagcugugaaauu

SEQ ID NO: 1557475 - RNA, 19 nt, Artificial Sequence
  Description of Artificial Sequence: Synthetic oligonucleotide
  Antisense strand to SEQ ID NO: 1557474
aauuucacagcuguuuggg

SEQ ID NO: 1557476 - RNA, 19 nt, Artificial Sequence
  Description of Artificial Sequence: Synthetic oligonucleotide
  Sense strand starting at position 1049 of SEQ ID NO: 1245371
gcguucucuccuuugcuca

SEQ ID NO: 1557477 - RNA, 19 nt, Artificial Sequence
  Description of Artificial Sequence: Synthetic oligonucleotide
  Antisense strand to SEQ ID NO: 1557476
ugagcaaaggagagaacgc

SEQ ID NO: 1557478 - RNA, 19 nt, Artificial Sequence
  Description of Artificial Sequence: Synthetic oligonucleotide
  Sense strand starting at position 1306 of SEQ ID NO: 1245371
gcacgaagccgcuccauua

SEQ ID NO: 1557479 - RNA, 19 nt, Artificial Sequence
  Description of Artificial Sequence: Synthetic oligonucleotide
  Antisense strand to SEQ ID NO: 1557478
uaauggagcggcuucgugc

SEQ ID NO: 1557480 - RNA, 19 nt, Artificial Sequence
  Description of Artificial Sequence: Synthetic oligonucleotide
  Sense strand starting at position 1367 of SEQ ID NO: 1245371
gcuucuauacccuagaaug

SEQ ID NO: 1557481 - RNA, 19 nt, Artificial Sequence
  Description of Artificial Sequence: Synthetic oligonucleotide
  Antisense strand to SEQ ID NO: 1557480
cauucuaggguauagaagc

SEQ ID NO: 1557482 - RNA, 19 nt, Artificial Sequence
  Description of Artificial Sequence: Synthetic oligonucleotide
  Sense strand starting at position 1649 of SEQ ID NO: 1245371
guuuaaucuuaggcauuga

SEQ ID NO: 1557483 - RNA, 19 nt, Artificial Sequence
  Description of Artificial Sequence: Synthetic oligonucleotide
  Antisense strand to SEQ ID NO: 1557482
ucaaugccuaagauuaaac

SEQ ID NO: 1557484 - RNA, 19 nt, Artificial Sequence
  Description of Artificial Sequence: Synthetic oligonucleotide
  Sense strand starting at position 2046 of SEQ ID NO: 1245371
gcaggugaucuucaggaca

SEQ ID NO: 1557485 - RNA, 19 nt, Artificial Sequence
  Description of Artificial Sequence: Synthetic oligonucleotide
  Antisense strand to SEQ ID NO: 1557484
uguccugaagaucaccugc

SEQ ID NO: 1557486 - RNA, 19 nt, Artificial Sequence
  Description of Artificial Sequence: Synthetic oligonucleotide
  Sense strand starting at position 2077 of SEQ ID NO: 1245371
ggaacacuguaagccaaau

SEQ ID NO: 1557487 - RNA, 19 nt, Artificial Sequence
  Description of Artificial Sequence: Synthetic oligonucleotide
  Antisense strand to SEQ ID NO: 1557486
auuuggcuuacaguguucc

SEQ ID NO: 1557488 - RNA, 19 nt, Artificial Sequence
  Description of Artificial Sequence: Synthetic oligonucleotide
  Sense strand starting at position 2156 of SEQ ID NO: 1245371
cucuguugucaggaagguu

SEQ ID NO: 1557489 - RNA, 19 nt, Artificial Sequence
  Description of Artificial Sequence: Synthetic oligonucleotide
  Antisense strand to SEQ ID NO: 1557488
aaccuuccugacaacagag

SEQ ID NO: 1557490 - RNA, 19 nt, Artificial Sequence
  Description of Artificial Sequence: Synthetic oligonucleotide
  Sense strand starting at position 2159 of SEQ ID NO: 1245371
uguugucaggaagguugaa

SEQ ID NO: 1557491 - RNA, 19 nt, Artificial Sequence
  Description of Artificial Sequence: Synthetic oligonucleotide
  Antisense strand to SEQ ID NO: 1557490
uucaaccuuccugacaaca

SEQ ID NO: 1557492 - RNA, 19 nt, Artificial Sequence
  Description of Artificial Sequence: Synthetic oligonucleotide
  Sense strand starting at position 2195 of SEQ ID NO: 1245371
auuaucaccguuuaugaau

SEQ ID NO: 1557493 - RNA, 19 nt, Artificial Sequence
  Description of Artificial Sequence: Synthetic oligonucleotide
  Antisense strand to SEQ ID NO: 1557492
auucauaaacggugauaau

SEQ ID NO: 1557494 - RNA, 19 nt, Artificial Sequence
  Description of Artificial Sequence: Synthetic oligonucleotide
  Sense strand starting at position 2207 of SEQ ID NO: 1245371
uaugaaugcugaccaggua

SEQ ID NO: 1557495 - RNA, 19 nt, Artificial Sequence
  Description of Artificial Sequence: Synthetic oligonucleotide
  Antisense strand to SEQ ID NO: 1557494
uaccuggucagcauucaua

SEQ ID NO: 1557496 - RNA, 19 nt, Artificial Sequence
  Description of Artificial Sequence: Synthetic oligonucleotide
  Sense strand starting at position 2260 of SEQ ID NO: 1245371
uccuguucucaguaacuua

SEQ ID NO: 1557497 - RNA, 19 nt, Artificial Sequence
  Description of Artificial Sequence: Synthetic oligonucleotide
  Antisense strand to SEQ ID NO: 1557496
uaaguuacugagaacagga

SEQ ID NO: 1557498 - RNA, 19 nt, Artificial Sequence
  Description of Artificial Sequence: Synthetic oligonucleotide
  Sense strand starting at position 2440 of SEQ ID NO: 1245371
gagguaucuagacacguca

SEQ ID NO: 1557499 - RNA, 19 nt, Artificial Sequence
  Description of Artificial Sequence: Synthetic oligonucleotide
  Antisense strand to SEQ ID NO: 1557498
ugacgugucuagauaccuc

SEQ ID NO: 1557500 - RNA, 19 nt, Artificial Sequence
  Description of Artificial Sequence: Synthetic oligonucleotide
  Sense strand starting at position 2442 of SEQ ID NO: 1245371
gguaucuagacacgucaca

SEQ ID NO: 1557501 - RNA, 19 nt, Artificial Sequence
  Description of Artificial Sequence: Synthetic oligonucleotide
  Antisense strand to SEQ ID NO: 1557500
ugugacgugucuagauacc

SEQ ID NO: 1557502 - RNA, 19 nt, Artificial Sequence
  Description of Artificial Sequence: Synthetic oligonucleotide
  Sense strand starting at position 2455 of SEQ ID NO: 1245371
gucacacccuaugucuaau

SEQ ID NO: 1557503 - RNA, 19 nt, Artificial Sequence
  Description of Artificial Sequence: Synthetic oligonucleotide
  Antisense strand to SEQ ID NO: 1557502
auuagacauagggugugac

SEQ ID NO: 1557504 - RNA, 19 nt, Artificial Sequence
  Description of Artificial Sequence: Synthetic oligonucleotide
  Sense strand starting at position 2599 of SEQ ID NO: 1245371
augacauaguucucacaua

SEQ ID NO: 1557505 - RNA, 19 nt, Artificial Sequence
  Description of Artificial Sequence: Synthetic oligonucleotide
  Antisense strand to SEQ ID NO: 1557504
uaugugagaacuaugucau

SEQ ID NO: 1557506 - RNA, 19 nt, Artificial Sequence
  Description of Artificial Sequence: Synthetic oligonucleotide
  Sense strand starting at position 2616 of SEQ ID NO: 1245371
uacagaauguuucuagaug

SEQ ID NO: 1557507 - RNA, 19 nt, Artificial Sequence
  Description of Artificial Sequence: Synthetic oligonucleotide
  Antisense strand to SEQ ID NO: 1557506
caucuagaaacauucugua

SEQ ID NO: 1557508 - RNA, 19 nt, Artificial Sequence
  Description of Artificial Sequence: Synthetic oligonucleotide
  Sense strand starting at position 2674 of SEQ ID NO: 1245371
gguacaugacagugcaaua

SEQ ID NO: 1557509 - RNA, 19 nt, Artificial Sequence
  Description of Artificial Sequence: Synthetic oligonucleotide
  Antisense strand to SEQ ID NO: 1557508
uauugcacugucauguacc

SEQ ID NO: 1557510 - RNA, 19 nt, Artificial Sequence
  Description of Artificial Sequence: Synthetic oligonucleotide
  Sense strand starting at position 2727 of SEQ ID NO: 1245371
ggaaacauuuacugggcaa

SEQ ID NO: 1557511 - RNA, 19 nt, Artificial Sequence
  Description of Artificial Sequence: Synthetic oligonucleotide
  Antisense strand to SEQ ID NO: 1557510
uugcccaguaaauguuucc

SEQ ID NO: 1557512 - RNA, 19 nt, Artificial Sequence
  Description of Artificial Sequence: Synthetic oligonucleotide
  Sense strand starting at position 2874 of SEQ ID NO: 1245371
cucugagguagguauguau

SEQ ID NO: 1557513 - RNA, 19 nt, Artificial Sequence
  Description of Artificial Sequence: Synthetic oligonucleotide
  Antisense strand to SEQ ID NO: 1557512
auacauaccuaccucagag

SEQ ID NO: 1557514 - RNA, 19 nt, Artificial Sequence
  Description of Artificial Sequence: Synthetic oligonucleotide
  Sense strand starting at position 2877 of SEQ ID NO: 1245371
ugagguagguauguauuaa

SEQ ID NO: 1557515 - RNA, 19 nt, Artificial Sequence
  Description of Artificial Sequence: Synthetic oligonucleotide
  Antisense strand to SEQ ID NO: 1557514
uuaauacauaccuaccuca

SEQ ID NO: 1557516 - RNA, 19 nt, Artificial Sequence
  Description of Artificial Sequence: Synthetic oligonucleotide
  Sense strand starting at position 2878 of SEQ ID NO: 1245371
gagguagguauguauuaau

SEQ ID NO: 1557517 - RNA, 19 nt, Artificial Sequence
  Description of Artificial Sequence: Synthetic oligonucleotide
  Antisense strand to SEQ ID NO: 1557516
auuaauacauaccuaccuc

SEQ ID NO: 1557518 - RNA, 19 nt, Artificial Sequence
  Description of Artificial Sequence: Synthetic oligonucleotide
  Sense strand starting at position 2931 of SEQ ID NO: 1245371
aguuaaggagcuuggucaa

SEQ ID NO: 1557519 - RNA, 19 nt, Artificial Sequence
  Description of Artificial Sequence: Synthetic oligonucleotide
  Antisense strand to SEQ ID NO: 1557518
uugaccaagcuccuuaacu

SEQ ID NO: 1557520 - RNA, 19 nt, Artificial Sequence
  Description of Artificial Sequence: Synthetic oligonucleotide
  Sense strand starting at position 3040 of SEQ ID NO: 1245371
ugauuaagucaaggauccu

SEQ ID NO: 1557521 - RNA, 19 nt, Artificial Sequence
  Description of Artificial Sequence: Synthetic oligonucleotide
  Antisense strand to SEQ ID NO: 1557520
aggauccuugacuuaauca

SEQ ID NO: 1557522 - RNA, 19 nt, Artificial Sequence
  Description of Artificial Sequence: Synthetic oligonucleotide
  Sense strand starting at position 3287 of SEQ ID NO: 1245371
uauggagcucaauggcauu

SEQ ID NO: 1557523 - RNA, 19 nt, Artificial Sequence
  Description of Artificial Sequence: Synthetic oligonucleotide
  Antisense strand to SEQ ID NO: 1557522
aaugccauugagcuccaua

SEQ ID NO: 1557524 - RNA, 19 nt, Artificial Sequence
  Description of Artificial Sequence: Synthetic oligonucleotide
  Sense strand starting at position 3342 of SEQ ID NO: 1245371
guucuauccugaucauuga

SEQ ID NO: 1557525 - RNA, 19 nt, Artificial Sequence
  Description of Artificial Sequence: Synthetic oligonucleotide
  Antisense strand to SEQ ID NO: 1557524
ucaaugaucaggauagaac

SEQ ID NO: 1557526 - RNA, 19 nt, Artificial Sequence
  Description of Artificial Sequence: Synthetic oligonucleotide
  Sense strand starting at position 3346 of SEQ ID NO: 1245371
uauccugaucauugaguga

SEQ ID NO: 1557527 - RNA, 19 nt, Artificial Sequence
  Description of Artificial Sequence: Synthetic oligonucleotide
  Antisense strand to SEQ ID NO: 1557526
ucacucaaugaucaggaua

SEQ ID NO: 1557528 - RNA, 19 nt, Artificial Sequence
  Description of Artificial Sequence: Synthetic oligonucleotide
  Sense strand starting at position 3349 of SEQ ID NO: 1245371
ccugaucauugagugagga

SEQ ID NO: 1557529 - RNA, 19 nt, Artificial Sequence
  Description of Artificial Sequence: Synthetic oligonucleotide
  Antisense strand to SEQ ID NO: 1557528
uccucacucaaugaucagg

SEQ ID NO: 1557530 - RNA, 19 nt, Artificial Sequence
  Description of Artificial Sequence: Synthetic oligonucleotide
  Sense strand starting at position 3493 of SEQ ID NO: 1245371
ggcgcauucguagcucacu

SEQ ID NO: 1557531 - RNA, 19 nt, Artificial Sequence
  Description of Artificial Sequence: Synthetic oligonucleotide
  Antisense strand to SEQ ID NO: 1557530
agugagcuacgaaugcgcc

SEQ ID NO: 1557532 - RNA, 19 nt, Artificial Sequence
  Description of Artificial Sequence: Synthetic oligonucleotide
  Sense strand starting at position 67 of SEQ ID NO: 1245372
gcaacagccguccaagaua

SEQ ID NO: 1557533 - RNA, 19 nt, Artificial Sequence
  Description of Artificial Sequence: Synthetic oligonucleotide
  Antisense strand to SEQ ID NO: 1557532
uaucuuggacggcuguugc

SEQ ID NO: 1557534 - RNA, 19 nt, Artificial Sequence
  Description of Artificial Sequence: Synthetic oligonucleotide
  Sense strand starting at position 249 of SEQ ID NO: 1245372
gauguuaaacuaggcuaau

SEQ ID NO: 1557535 - RNA, 19 nt, Artificial Sequence
  Description of Artificial Sequence: Synthetic oligonucleotide
  Antisense strand to SEQ ID NO: 1557534
auuagccuaguuuaacauc

SEQ ID NO: 1557536 - RNA, 19 nt, Artificial Sequence
  Description of Artificial Sequence: Synthetic oligonucleotide
  Sense strand starting at position 258 of SEQ ID NO: 1245372
cuaggcuaauggguuuaau

SEQ ID NO: 1557537 - RNA, 19 nt, Artificial Sequence
  Description of Artificial Sequence: Synthetic oligonucleotide
  Antisense strand to SEQ ID NO: 1557536
auuaaacccauuagccuag

SEQ ID NO: 1557538 - RNA, 19 nt, Artificial Sequence
  Description of Artificial Sequence: Synthetic oligonucleotide
  Sense strand starting at position 318 of SEQ ID NO: 1245372
ucucuuggucuuuaaaguu

SEQ ID NO: 1557539 - RNA, 19 nt, Artificial Sequence
  Description of Artificial Sequence: Synthetic oligonucleotide
  Antisense strand to SEQ ID NO: 1557538
aacuuuaaagaccaagaga

SEQ ID NO: 1557540 - RNA, 19 nt, Artificial Sequence
  Description of Artificial Sequence: Synthetic oligonucleotide
  Sense strand starting at position 338 of SEQ ID NO: 1245372
augacagauucccuaagug

SEQ ID NO: 1557541 - RNA, 19 nt, Artificial Sequence
  Description of Artificial Sequence: Synthetic oligonucleotide
  Antisense strand to SEQ ID NO: 1557540
cacuuagggaaucugucau

SEQ ID NO: 1557542 - RNA, 19 nt, Artificial Sequence
  Description of Artificial Sequence: Synthetic oligonucleotide
  Sense strand starting at position 645 of SEQ ID NO: 1245372
gggaaauuguuucccucug

SEQ ID NO: 1557543 - RNA, 19 nt, Artificial Sequence
  Description of Artificial Sequence: Synthetic oligonucleotide
  Antisense strand to SEQ ID NO: 1557542
cagagggaaacaauuuccc

SEQ ID NO: 1557544 - RNA, 19 nt, Artificial Sequence
  Description of Artificial Sequence: Synthetic oligonucleotide
  Sense strand starting at position 773 of SEQ ID NO: 1245372
agaagaaagcuuuguuaau

SEQ ID NO: 1557545 - RNA, 19 nt, Artificial Sequence
  Description of Artificial Sequence: Synthetic oligonucleotide
  Antisense strand to SEQ ID NO: 1557544
auuaacaaagcuuucuucu

SEQ ID NO: 1557546 - RNA, 19 nt, Artificial Sequence
  Description of Artificial Sequence: Synthetic oligonucleotide
  Sense strand starting at position 774 of SEQ ID NO: 1245372
gaagaaagcuuuguuaaug

SEQ ID NO: 1557547 - RNA, 19 nt, Artificial Sequence
  Description of Artificial Sequence: Synthetic oligonucleotide
  Antisense strand to SEQ ID NO: 1557546
cauuaacaaagcuuucuuc

SEQ ID NO: 1557548 - RNA, 19 nt, Artificial Sequence
  Description of Artificial Sequence: Synthetic oligonucleotide
  Sense strand starting at position 814 of SEQ ID NO: 1245372
auaugaagcuuucuggaug

SEQ ID NO: 1557549 - RNA, 19 nt, Artificial Sequence
  Description of Artificial Sequence: Synthetic oligonucleotide
  Antisense strand to SEQ ID NO: 1557548
cauccagaaagcuucauau

SEQ ID NO: 1557550 - RNA, 19 nt, Artificial Sequence
  Description of Artificial Sequence: Synthetic oligonucleotide
  Sense strand starting at position 817 of SEQ ID NO: 1245372
ugaagcuuucuggaugauu

SEQ ID NO: 1557551 - RNA, 19 nt, Artificial Sequence
  Description of Artificial Sequence: Synthetic oligonucleotide
  Antisense strand to SEQ ID NO: 1557550
aaucauccagaaagcuuca

SEQ ID NO: 1557552 - RNA, 19 nt, Artificial Sequence
  Description of Artificial Sequence: Synthetic oligonucleotide
  Sense strand starting at position 819 of SEQ ID NO: 1245372
aagcuuucuggaugauugu

SEQ ID NO: 1557553 - RNA, 19 nt, Artificial Sequence
  Description of Artificial Sequence: Synthetic oligonucleotide
  Antisense strand to SEQ ID NO: 1557552
acaaucauccagaaagcuu

SEQ ID NO: 1557554 - RNA, 19 nt, Artificial Sequence
  Description of Artificial Sequence: Synthetic oligonucleotide
  Sense strand starting at position 820 of SEQ ID NO: 1245372
agcuuucuggaugauuguu

SEQ ID NO: 1557555 - RNA, 19 nt, Artificial Sequence
  Description of Artificial Sequence: Synthetic oligonucleotide
  Antisense strand to SEQ ID NO: 1557554
aacaaucauccagaaagcu

SEQ ID NO: 1557556 - RNA, 19 nt, Artificial Sequence
  Description of Artificial Sequence: Synthetic oligonucleotide
  Sense strand starting at position 825 of SEQ ID NO: 1245372
ucuggaugauuguugguga

SEQ ID NO: 1557557 - RNA, 19 nt, Artificial Sequence
  Description of Artificial Sequence: Synthetic oligonucleotide
  Antisense strand to SEQ ID NO: 1557556
ucaccaacaaucauccaga

SEQ ID NO: 1557558 - RNA, 19 nt, Artificial Sequence
  Description of Artificial Sequence: Synthetic oligonucleotide
  Sense strand starting at position 828 of SEQ ID NO: 1245372
ggaugauuguuggugaugu

SEQ ID NO: 1557559 - RNA, 19 nt, Artificial Sequence
  Description of Artificial Sequence: Synthetic oligonucleotide
  Antisense strand to SEQ ID NO: 1557558
acaucaccaacaaucaucc

SEQ ID NO: 1557560 - RNA, 19 nt, Artificial Sequence
  Description of Artificial Sequence: Synthetic oligonucleotide
  Sense strand starting at position 830 of SEQ ID NO: 1245372
augauuguuggugauguca

SEQ ID NO: 1557561 - RNA, 19 nt, Artificial Sequence
  Description of Artificial Sequence: Synthetic oligonucleotide
  Antisense strand to SEQ ID NO: 1557560
ugacaucaccaacaaucau

SEQ ID NO: 1557562 - RNA, 19 nt, Artificial Sequence
  Description of Artificial Sequence: Synthetic oligonucleotide
  Sense strand starting at position 839 of SEQ ID NO: 1245372
ggugaugucauaugaacca

SEQ ID NO: 1557563 - RNA, 19 nt, Artificial Sequence
  Description of Artificial Sequence: Synthetic oligonucleotide
  Antisense strand to SEQ ID NO: 1557562
ugguucauaugacaucacc

SEQ ID NO: 1557564 - RNA, 19 nt, Artificial Sequence
  Description of Artificial Sequence: Synthetic oligonucleotide
  Sense strand starting at position 1045 of SEQ ID NO: 1245372
cuagaauagcauugcuaau

SEQ ID NO: 1557565 - RNA, 19 nt, Artificial Sequence
  Description of Artificial Sequence: Synthetic oligonucleotide
  Antisense strand to SEQ ID NO: 1557564
auuagcaaugcuauucuag

SEQ ID NO: 1557566 - RNA, 19 nt, Artificial Sequence
  Description of Artificial Sequence: Synthetic oligonucleotide
  Sense strand starting at position 1121 of SEQ ID NO: 1245372
gcuggucaaggcuaguaaa

SEQ ID NO: 1557567 - RNA, 19 nt, Artificial Sequence
  Description of Artificial Sequence: Synthetic oligonucleotide
  Antisense strand to SEQ ID NO: 1557566
uuuacuagccuugaccagc

SEQ ID NO: 1557568 - RNA, 19 nt, Artificial Sequence
  Description of Artificial Sequence: Synthetic oligonucleotide
  Sense strand starting at position 1986 of SEQ ID NO: 1245372
augcguaagcaugauuaaa

SEQ ID NO: 1557569 - RNA, 19 nt, Artificial Sequence
  Description of Artificial Sequence: Synthetic oligonucleotide
  Antisense strand to SEQ ID NO: 1557568
uuuaaucaugcuuacgcau

SEQ ID NO: 1557570 - RNA, 19 nt, Artificial Sequence
  Description of Artificial Sequence: Synthetic oligonucleotide
  Sense strand starting at position 2126 of SEQ ID NO: 1245372
ccaauuacucaguaguuau

SEQ ID NO: 1557571 - RNA, 19 nt, Artificial Sequence
  Description of Artificial Sequence: Synthetic oligonucleotide
  Antisense strand to SEQ ID NO: 1557570
auaacuacugaguaauugg

SEQ ID NO: 1557572 - RNA, 19 nt, Artificial Sequence
  Description of Artificial Sequence: Synthetic oligonucleotide
  Sense strand starting at position 2138 of SEQ ID NO: 1245372
uaguuauguccagggagaa

SEQ ID NO: 1557573 - RNA, 19 nt, Artificial Sequence
  Description of Artificial Sequence: Synthetic oligonucleotide
  Antisense strand to SEQ ID NO: 1557572
uucucccuggacauaacua

SEQ ID NO: 1557574 - RNA, 19 nt, Artificial Sequence
  Description of Artificial Sequence: Synthetic oligonucleotide
  Sense strand starting at position 2139 of SEQ ID NO: 1245372
aguuauguccagggagaag

SEQ ID NO: 1557575 - RNA, 19 nt, Artificial Sequence
  Description of Artificial Sequence: Synthetic oligonucleotide
  Antisense strand to SEQ ID NO: 1557574
cuucucccuggacauaacu

SEQ ID NO: 1557576 - RNA, 19 nt, Artificial Sequence
  Description of Artificial Sequence: Synthetic oligonucleotide
  Sense strand starting at position 2202 of SEQ ID NO: 1245372
augucaagggcacauaauu

SEQ ID NO: 1557577 - RNA, 19 nt, Artificial Sequence
  Description of Artificial Sequence: Synthetic oligonucleotide
  Antisense strand to SEQ ID NO: 1557576
aauuaugugcccuugacau

SEQ ID NO: 1557578 - RNA, 19 nt, Artificial Sequence
  Description of Artificial Sequence: Synthetic oligonucleotide
  Sense strand starting at position 2267 of SEQ ID NO: 1245372
agcagugccuuucuuauuu

SEQ ID NO: 1557579 - RNA, 19 nt, Artificial Sequence
  Description of Artificial Sequence: Synthetic oligonucleotide
  Antisense strand to SEQ ID NO: 1557578
aaauaagaaaggcacugcu

SEQ ID NO: 1557580 - RNA, 19 nt, Artificial Sequence
  Description of Artificial Sequence: Synthetic oligonucleotide
  Sense strand starting at position 2414 of SEQ ID NO: 1245372
ggcuucaugugagcaaaga

SEQ ID NO: 1557581 - RNA, 19 nt, Artificial Sequence
  Description of Artificial Sequence: Synthetic oligonucleotide
  Antisense strand to SEQ ID NO: 1557580
ucuuugcucacaugaagcc

SEQ ID NO: 1557582 - RNA, 19 nt, Artificial Sequence
  Description of Artificial Sequence: Synthetic oligonucleotide
  Sense strand starting at position 2501 of SEQ ID NO: 1245372
aauggaugaccacgguauu

SEQ ID NO: 1557583 - RNA, 19 nt, Artificial Sequence
  Description of Artificial Sequence: Synthetic oligonucleotide
  Antisense strand to SEQ ID NO: 1557582
aauaccguggucauccauu

SEQ ID NO: 1557584 - RNA, 19 nt, Artificial Sequence
  Description of Artificial Sequence: Synthetic oligonucleotide
  Sense strand starting at position 2688 of SEQ ID NO: 1245372
aauguucguggguauauaa

SEQ ID NO: 1557585 - RNA, 19 nt, Artificial Sequence
  Description of Artificial Sequence: Synthetic oligonucleotide
  Antisense strand to SEQ ID NO: 1557584
uuauauacccacgaacauu

SEQ ID NO: 1557586 - RNA, 19 nt, Artificial Sequence
  Description of Artificial Sequence: Synthetic oligonucleotide
  Sense strand starting at position 2698 of SEQ ID NO: 1245372
gguauauaauagguauaca

SEQ ID NO: 1557587 - RNA, 19 nt, Artificial Sequence
  Description of Artificial Sequence: Synthetic oligonucleotide
  Antisense strand to SEQ ID NO: 1557586
uguauaccuauuauauacc

SEQ ID NO: 1557588 - RNA, 19 nt, Artificial Sequence
  Description of Artificial Sequence: Synthetic oligonucleotide
  Sense strand starting at position 3288 of SEQ ID NO: 1245372
aagguaucauggccaugaa

SEQ ID NO: 1557589 - RNA, 19 nt, Artificial Sequence
  Description of Artificial Sequence: Synthetic oligonucleotide
  Antisense strand to SEQ ID NO: 1557588
uucauggccaugauaccuu

SEQ ID NO: 1557590 - RNA, 19 nt, Artificial Sequence
  Description of Artificial Sequence: Synthetic oligonucleotide
  Sense strand starting at position 3334 of SEQ ID NO: 1245372
auaagaucuugucuuggaa

SEQ ID NO: 1557591 - RNA, 19 nt, Artificial Sequence
  Description of Artificial Sequence: Synthetic oligonucleotide
  Antisense strand to SEQ ID NO: 1557590
uuccaagacaagaucuuau

SEQ ID NO: 1557592 - RNA, 19 nt, Artificial Sequence
  Description of Artificial Sequence: Synthetic oligonucleotide
  Sense strand starting at position 3337 of SEQ ID NO: 1245372
agaucuugucuuggaagag

SEQ ID NO: 1557593 - RNA, 19 nt, Artificial Sequence
  Description of Artificial Sequence: Synthetic oligonucleotide
  Antisense strand to SEQ ID NO: 1557592
cucuuccaagacaagaucu

SEQ ID NO: 1557594 - RNA, 19 nt, Artificial Sequence
  Description of Artificial Sequence: Synthetic oligonucleotide
  Sense strand starting at position 3377 of SEQ ID NO: 1245372
uuggaagaucuacgcauau

SEQ ID NO: 1557595 - RNA, 19 nt, Artificial Sequence
  Description of Artificial Sequence: Synthetic oligonucleotide
  Antisense strand to SEQ ID NO: 1557594
auaugcguagaucuuccaa

SEQ ID NO: 1557596 - RNA, 19 nt, Artificial Sequence
  Description of Artificial Sequence: Synthetic oligonucleotide
  Sense strand starting at position 3481 of SEQ ID NO: 1245372
gcuuaacagccuuaaagau

SEQ ID NO: 1557597 - RNA, 19 nt, Artificial Sequence
  Description of Artificial Sequence: Synthetic oligonucleotide
  Antisense strand to SEQ ID NO: 1557596
aucuuuaaggcuguuaagc

SEQ ID NO: 1557598 - RNA, 19 nt, Artificial Sequence
  Description of Artificial Sequence: Synthetic oligonucleotide
  Sense strand starting at position 3556 of SEQ ID NO: 1245372
ugaauugaacuuggcagua

SEQ ID NO: 1557599 - RNA, 19 nt, Artificial Sequence
  Description of Artificial Sequence: Synthetic oligonucleotide
  Antisense strand to SEQ ID NO: 1557598
uacugccaaguucaauuca

SEQ ID NO: 1557600 - RNA, 19 nt, Artificial Sequence
  Description of Artificial Sequence: Synthetic oligonucleotide
  Sense strand starting at position 3654 of SEQ ID NO: 1245372
guuugcaugaguuaaauug

SEQ ID NO: 1557601 - RNA, 19 nt, Artificial Sequence
  Description of Artificial Sequence: Synthetic oligonucleotide
  Antisense strand to SEQ ID NO: 1557600
caauuuaacucaugcaaac

SEQ ID NO: 1557602 - RNA, 19 nt, Artificial Sequence
  Description of Artificial Sequence: Synthetic oligonucleotide
  Sense strand starting at position 3702 of SEQ ID NO: 1245372
gcucuucuaccagaggcaa

SEQ ID NO: 1557603 - RNA, 19 nt, Artificial Sequence
  Description of Artificial Sequence: Synthetic oligonucleotide
  Antisense strand to SEQ ID NO: 1557602
uugccucugguagaagagc

SEQ ID NO: 1557604 - RNA, 19 nt, Artificial Sequence
  Description of Artificial Sequence: Synthetic oligonucleotide
  Sense strand starting at position 3788 of SEQ ID NO: 1245372
gucagauucugacucacug

SEQ ID NO: 1557605 - RNA, 19 nt, Artificial Sequence
  Description of Artificial Sequence: Synthetic oligonucleotide
  Antisense strand to SEQ ID NO: 1557604
cagugagucagaaucugac

SEQ ID NO: 1557606 - RNA, 19 nt, Artificial Sequence
  Description of Artificial Sequence: Synthetic oligonucleotide
  Sense strand starting at position 3847 of SEQ ID NO: 1245372
ugcucaguuguuccucgau

SEQ ID NO: 1557607 - RNA, 19 nt, Artificial Sequence
  Description of Artificial Sequence: Synthetic oligonucleotide
  Antisense strand to SEQ ID NO: 1557606
aucgaggaacaacugagca

SEQ ID NO: 1557608 - RNA, 19 nt, Artificial Sequence
  Description of Artificial Sequence: Synthetic oligonucleotide
  Sense strand starting at position 3849 of SEQ ID NO: 1245372
cucaguuguuccucgauuu

SEQ ID NO: 1557609 - RNA, 19 nt, Artificial Sequence
  Description of Artificial Sequence: Synthetic oligonucleotide
  Antisense strand to SEQ ID NO: 1557608
aaaucgaggaacaacugag

SEQ ID NO: 1557610 - RNA, 19 nt, Artificial Sequence
  Description of Artificial Sequence: Synthetic oligonucleotide
  Sense strand starting at position 3950 of SEQ ID NO: 1245372
acauuuguauaguucguua

SEQ ID NO: 1557611 - RNA, 19 nt, Artificial Sequence
  Description of Artificial Sequence: Synthetic oligonucleotide
  Antisense strand to SEQ ID NO: 1557610
uaacgaacuauacaaaugu

SEQ ID NO: 1557612 - RNA, 19 nt, Artificial Sequence
  Description of Artificial Sequence: Synthetic oligonucleotide
  Sense strand starting at position 14 of SEQ ID NO: 1245373
uugugaacuggcuaaugaa

SEQ ID NO: 1557613 - RNA, 19 nt, Artificial Sequence
  Description of Artificial Sequence: Synthetic oligonucleotide
  Antisense strand to SEQ ID NO: 1557612
uucauuagccaguucacaa

SEQ ID NO: 1557614 - RNA, 19 nt, Artificial Sequence
  Description of Artificial Sequence: Synthetic oligonucleotide
  Sense strand starting at position 23 of SEQ ID NO: 1245373
ggcuaaugaaggugagaag

SEQ ID NO: 1557615 - RNA, 19 nt, Artificial Sequence
  Description of Artificial Sequence: Synthetic oligonucleotide
  Antisense strand to SEQ ID NO: 1557614
cuucucaccuucauuagcc

SEQ ID NO: 1557616 - RNA, 19 nt, Artificial Sequence
  Description of Artificial Sequence: Synthetic oligonucleotide
  Sense strand starting at position 88 of SEQ ID NO: 1245373
uguacuuugccucauggau

SEQ ID NO: 1557617 - RNA, 19 nt, Artificial Sequence
  Description of Artificial Sequence: Synthetic oligonucleotide
  Antisense strand to SEQ ID NO: 1557616
auccaugaggcaaaguaca

SEQ ID NO: 1557618 - RNA, 19 nt, Artificial Sequence
  Description of Artificial Sequence: Synthetic oligonucleotide
  Sense strand starting at position 227 of SEQ ID NO: 1245373
cagacagaugccugguuaa

SEQ ID NO: 1557619 - RNA, 19 nt, Artificial Sequence
  Description of Artificial Sequence: Synthetic oligonucleotide
  Antisense strand to SEQ ID NO: 1557618
uuaaccaggcaucugucug

SEQ ID NO: 1557620 - RNA, 19 nt, Artificial Sequence
  Description of Artificial Sequence: Synthetic oligonucleotide
  Sense strand starting at position 230 of SEQ ID NO: 1245373
acagaugccugguuaauaa

SEQ ID NO: 1557621 - RNA, 19 nt, Artificial Sequence
  Description of Artificial Sequence: Synthetic oligonucleotide
  Antisense strand to SEQ ID NO: 1557620
uuauuaaccaggcaucugu

SEQ ID NO: 1557622 - RNA, 19 nt, Artificial Sequence
  Description of Artificial Sequence: Synthetic oligonucleotide
  Sense strand starting at position 270 of SEQ ID NO: 1245373
uuguuaauggguuaauaca

SEQ ID NO: 1557623 - RNA, 19 nt, Artificial Sequence
  Description of Artificial Sequence: Synthetic oligonucleotide
  Antisense strand to SEQ ID NO: 1557622
uguauuaacccauuaacaa

SEQ ID NO: 1557624 - RNA, 19 nt, Artificial Sequence
  Description of Artificial Sequence: Synthetic oligonucleotide
  Sense strand starting at position 641 of SEQ ID NO: 1245373
uuguaaauucuuuagcaga

SEQ ID NO: 1557625 - RNA, 19 nt, Artificial Sequence
  Description of Artificial Sequence: Synthetic oligonucleotide
  Antisense strand to SEQ ID NO: 1557624
ucugcuaaagaauuuacaa

SEQ ID NO: 1557626 - RNA, 19 nt, Artificial Sequence
  Description of Artificial Sequence: Synthetic oligonucleotide
  Sense strand starting at position 643 of SEQ ID NO: 1245373
guaaauucuuuagcagaug

SEQ ID NO: 1557627 - RNA, 19 nt, Artificial Sequence
  Description of Artificial Sequence: Synthetic oligonucleotide
  Antisense strand to SEQ ID NO: 1557626
caucugcuaaagaauuuac

SEQ ID NO: 1557628 - RNA, 19 nt, Artificial Sequence
  Description of Artificial Sequence: Synthetic oligonucleotide
  Sense strand starting at position 733 of SEQ ID NO: 1245373
gcaacuuacccagaggcaa

SEQ ID NO: 1557629 - RNA, 19 nt, Artificial Sequence
  Description of Artificial Sequence: Synthetic oligonucleotide
  Antisense strand to SEQ ID NO: 1557628
uugccucuggguaaguugc

SEQ ID NO: 1557630 - RNA, 19 nt, Artificial Sequence
  Description of Artificial Sequence: Synthetic oligonucleotide
  Sense strand starting at position 945 of SEQ ID NO: 1245373
agaaaucuggagcgaaaca

SEQ ID NO: 1557631 - RNA, 19 nt, Artificial Sequence
  Description of Artificial Sequence: Synthetic oligonucleotide
  Antisense strand to SEQ ID NO: 1557630
uguuucgcuccagauuucu

SEQ ID NO: 1557632 - RNA, 19 nt, Artificial Sequence
  Description of Artificial Sequence: Synthetic oligonucleotide
  Sense strand starting at position 979 of SEQ ID NO: 1245373
ucccauuaucaggaacgua

SEQ ID NO: 1557633 - RNA, 19 nt, Artificial Sequence
  Description of Artificial Sequence: Synthetic oligonucleotide
  Antisense strand to SEQ ID NO: 1557632
uacguuccugauaauggga

SEQ ID NO: 1557634 - RNA, 19 nt, Artificial Sequence
  Description of Artificial Sequence: Synthetic oligonucleotide
  Sense strand starting at position 1192 of SEQ ID NO: 1245373
uguaauguaccauacauag

SEQ ID NO: 1557635 - RNA, 19 nt, Artificial Sequence
  Description of Artificial Sequence: Synthetic oligonucleotide
  Antisense strand to SEQ ID NO: 1557634
cuauguaugguacauuaca

SEQ ID NO: 1557636 - RNA, 19 nt, Artificial Sequence
  Description of Artificial Sequence: Synthetic oligonucleotide
  Sense strand starting at position 1262 of SEQ ID NO: 1245373
ucuuaccaguuguuauaaa

SEQ ID NO: 1557637 - RNA, 19 nt, Artificial Sequence
  Description of Artificial Sequence: Synthetic oligonucleotide
  Antisense strand to SEQ ID NO: 1557636
uuuauaacaacugguaaga

SEQ ID NO: 1557638 - RNA, 19 nt, Artificial Sequence
  Description of Artificial Sequence: Synthetic oligonucleotide
  Sense strand starting at position 1318 of SEQ ID NO: 1245373
uuaguuaauucuucuagag

SEQ ID NO: 1557639 - RNA, 19 nt, Artificial Sequence
  Description of Artificial Sequence: Synthetic oligonucleotide
  Antisense strand to SEQ ID NO: 1557638
cucuagaagaauuaacuaa

SEQ ID NO: 1557640 - RNA, 19 nt, Artificial Sequence
  Description of Artificial Sequence: Synthetic oligonucleotide
  Sense strand starting at position 1527 of SEQ ID NO: 1245373
ucuaucaucuaucugagga

SEQ ID NO: 1557641 - RNA, 19 nt, Artificial Sequence
  Description of Artificial Sequence: Synthetic oligonucleotide
  Antisense strand to SEQ ID NO: 1557640
uccucagauagaugauaga

SEQ ID NO: 1557642 - RNA, 19 nt, Artificial Sequence
  Description of Artificial Sequence: Synthetic oligonucleotide
  Sense strand starting at position 1576 of SEQ ID NO: 1245373
gcaccaaagcaaugaggua

SEQ ID NO: 1557643 - RNA, 19 nt, Artificial Sequence
  Description of Artificial Sequence: Synthetic oligonucleotide
  Antisense strand to SEQ ID NO: 1557642
uaccucauugcuuuggugc

SEQ ID NO: 1557644 - RNA, 19 nt, Artificial Sequence
  Description of Artificial Sequence: Synthetic oligonucleotide
  Sense strand starting at position 1589 of SEQ ID NO: 1245373
gagguagaaugcucagagu

SEQ ID NO: 1557645 - RNA, 19 nt, Artificial Sequence
  Description of Artificial Sequence: Synthetic oligonucleotide
  Antisense strand to SEQ ID NO: 1557644
acucugagcauucuaccuc

SEQ ID NO: 1557646 - RNA, 19 nt, Artificial Sequence
  Description of Artificial Sequence: Synthetic oligonucleotide
  Sense strand starting at position 1754 of SEQ ID NO: 1245373
gugaaucuuaaauguagga

SEQ ID NO: 1557647 - RNA, 19 nt, Artificial Sequence
  Description of Artificial Sequence: Synthetic oligonucleotide
  Antisense strand to SEQ ID NO: 1557646
uccuacauuuaagauucac

SEQ ID NO: 1557648 - RNA, 19 nt, Artificial Sequence
  Description of Artificial Sequence: Synthetic oligonucleotide
  Sense strand starting at position 1767 of SEQ ID NO: 1245373
guaggaaugggaugucaca

SEQ ID NO: 1557649 - RNA, 19 nt, Artificial Sequence
  Description of Artificial Sequence: Synthetic oligonucleotide
  Antisense strand to SEQ ID NO: 1557648
ugugacaucccauuccuac

SEQ ID NO: 1557650 - RNA, 19 nt, Artificial Sequence
  Description of Artificial Sequence: Synthetic oligonucleotide
  Sense strand starting at position 2028 of SEQ ID NO: 1245373
auaugaaccuugucuagag

SEQ ID NO: 1557651 - RNA, 19 nt, Artificial Sequence
  Description of Artificial Sequence: Synthetic oligonucleotide
  Antisense strand to SEQ ID NO: 1557650
cucuagacaagguucauau

SEQ ID NO: 1557652 - RNA, 19 nt, Artificial Sequence
  Description of Artificial Sequence: Synthetic oligonucleotide
  Sense strand starting at position 2029 of SEQ ID NO: 1245373
uaugaaccuugucuagaga

SEQ ID NO: 1557653 - RNA, 19 nt, Artificial Sequence
  Description of Artificial Sequence: Synthetic oligonucleotide
  Antisense strand to SEQ ID NO: 1557652
ucucuagacaagguucaua

SEQ ID NO: 1557654 - RNA, 19 nt, Artificial Sequence
  Description of Artificial Sequence: Synthetic oligonucleotide
  Sense strand starting at position 2047 of SEQ ID NO: 1245373
agauuagagcaucggaaca

SEQ ID NO: 1557655 - RNA, 19 nt, Artificial Sequence
  Description of Artificial Sequence: Synthetic oligonucleotide
  Antisense strand to SEQ ID NO: 1557654
uguuccgaugcucuaaucu

SEQ ID NO: 1557656 - RNA, 19 nt, Artificial Sequence
  Description of Artificial Sequence: Synthetic oligonucleotide
  Sense strand starting at position 2063 of SEQ ID NO: 1245373
acauucguucuaugaaaua

SEQ ID NO: 1557657 - RNA, 19 nt, Artificial Sequence
  Description of Artificial Sequence: Synthetic oligonucleotide
  Antisense strand to SEQ ID NO: 1557656
uauuucauagaacgaaugu

SEQ ID NO: 1557658 - RNA, 19 nt, Artificial Sequence
  Description of Artificial Sequence: Synthetic oligonucleotide
  Sense strand starting at position 2176 of SEQ ID NO: 1245373
gugugacugcgugcacuaa

SEQ ID NO: 1557659 - RNA, 19 nt, Artificial Sequence
  Description of Artificial Sequence: Synthetic oligonucleotide
  Antisense strand to SEQ ID NO: 1557658
uuagugcacgcagucacac

SEQ ID NO: 1557660 - RNA, 19 nt, Artificial Sequence
  Description of Artificial Sequence: Synthetic oligonucleotide
  Sense strand starting at position 2369 of SEQ ID NO: 1245373
auguuugcacuugauggau

SEQ ID NO: 1557661 - RNA, 19 nt, Artificial Sequence
  Description of Artificial Sequence: Synthetic oligonucleotide
  Antisense strand to SEQ ID NO: 1557660
auccaucaagugcaaacau

SEQ ID NO: 1557662 - RNA, 19 nt, Artificial Sequence
  Description of Artificial Sequence: Synthetic oligonucleotide
  Sense strand starting at position 2471 of SEQ ID NO: 1245373
uuugcuuagucagcaauuu

SEQ ID NO: 1557663 - RNA, 19 nt, Artificial Sequence
  Description of Artificial Sequence: Synthetic oligonucleotide
  Antisense strand to SEQ ID NO: 1557662
aaauugcugacuaagcaaa

SEQ ID NO: 1557664 - RNA, 19 nt, Artificial Sequence
  Description of Artificial Sequence: Synthetic oligonucleotide
  Sense strand starting at position 2527 of SEQ ID NO: 1245373
guguucugcccagauaaag

SEQ ID NO: 1557665 - RNA, 19 nt, Artificial Sequence
  Description of Artificial Sequence: Synthetic oligonucleotide
  Antisense strand to SEQ ID NO: 1557664
cuuuaucugggcagaacac

SEQ ID NO: 1557666 - RNA, 19 nt, Artificial Sequence
  Description of Artificial Sequence: Synthetic oligonucleotide
  Sense strand starting at position 2943 of SEQ ID NO: 1245373
accaaacuugcuggaagaa

SEQ ID NO: 1557667 - RNA, 19 nt, Artificial Sequence
  Description of Artificial Sequence: Synthetic oligonucleotide
  Antisense strand to SEQ ID NO: 1557666
uucuuccagcaaguuuggu

SEQ ID NO: 1557668 - RNA, 19 nt, Artificial Sequence
  Description of Artificial Sequence: Synthetic oligonucleotide
  Sense strand starting at position 2962 of SEQ ID NO: 1245373
aguagagaugacugugaga

SEQ ID NO: 1557669 - RNA, 19 nt, Artificial Sequence
  Description of Artificial Sequence: Synthetic oligonucleotide
  Antisense strand to SEQ ID NO: 1557668
ucucacagucaucucuacu

SEQ ID NO: 1557670 - RNA, 19 nt, Artificial Sequence
  Description of Artificial Sequence: Synthetic oligonucleotide
  Sense strand starting at position 3352 of SEQ ID NO: 1245373
ggagcuuacagggaguagu

SEQ ID NO: 1557671 - RNA, 19 nt, Artificial Sequence
  Description of Artificial Sequence: Synthetic oligonucleotide
  Antisense strand to SEQ ID NO: 1557670
acuacucccuguaagcucc

SEQ ID NO: 1557672 - RNA, 19 nt, Artificial Sequence
  Description of Artificial Sequence: Synthetic oligonucleotide
  Sense strand starting at position 3452 of SEQ ID NO: 1245373
gagcaaauguaguugagac

SEQ ID NO: 1557673 - RNA, 19 nt, Artificial Sequence
  Description of Artificial Sequence: Synthetic oligonucleotide
  Antisense strand to SEQ ID NO: 1557672
gucucaacuacauuugcuc

SEQ ID NO: 1557674 - RNA, 19 nt, Artificial Sequence
  Description of Artificial Sequence: Synthetic oligonucleotide
  Sense strand starting at position 3459 of SEQ ID NO: 1245373
uguaguugagaccauaacu

SEQ ID NO: 1557675 - RNA, 19 nt, Artificial Sequence
  Description of Artificial Sequence: Synthetic oligonucleotide
  Antisense strand to SEQ ID NO: 1557674
aguuauggucucaacuaca

SEQ ID NO: 1557676 - RNA, 19 nt, Artificial Sequence
  Description of Artificial Sequence: Synthetic oligonucleotide
  Sense strand starting at position 3487 of SEQ ID NO: 1245373
gucuuagacccuuagaguu

SEQ ID NO: 1557677 - RNA, 19 nt, Artificial Sequence
  Description of Artificial Sequence: Synthetic oligonucleotide
  Antisense strand to SEQ ID NO: 1557676
aacucuaagggucuaagac

SEQ ID NO: 1557678 - RNA, 19 nt, Artificial Sequence
  Description of Artificial Sequence: Synthetic oligonucleotide
  Sense strand starting at position 3497 of SEQ ID NO: 1245373
cuuagaguuuaacuaggaa

SEQ ID NO: 1557679 - RNA, 19 nt, Artificial Sequence
  Description of Artificial Sequence: Synthetic oligonucleotide
  Antisense strand to SEQ ID NO: 1557678
uuccuaguuaaacucuaag

SEQ ID NO: 1557680 - RNA, 19 nt, Artificial Sequence
  Description of Artificial Sequence: Synthetic oligonucleotide
  Sense strand starting at position 3500 of SEQ ID NO: 1245373
agaguuuaacuaggaagca

SEQ ID NO: 1557681 - RNA, 19 nt, Artificial Sequence
  Description of Artificial Sequence: Synthetic oligonucleotide
  Antisense strand to SEQ ID NO: 1557680
ugcuuccuaguuaaacucu

SEQ ID NO: 1557682 - RNA, 19 nt, Artificial Sequence
  Description of Artificial Sequence: Synthetic oligonucleotide
  Sense strand starting at position 3545 of SEQ ID NO: 1245373
guuggaugaccagagucau

SEQ ID NO: 1557683 - RNA, 19 nt, Artificial Sequence
  Description of Artificial Sequence: Synthetic oligonucleotide
  Antisense strand to SEQ ID NO: 1557682
augacucuggucauccaac

SEQ ID NO: 1557684 - RNA, 19 nt, Artificial Sequence
  Description of Artificial Sequence: Synthetic oligonucleotide
  Sense strand starting at position 3551 of SEQ ID NO: 1245373
ugaccagagucauucgauc

SEQ ID NO: 1557685 - RNA, 19 nt, Artificial Sequence
  Description of Artificial Sequence: Synthetic oligonucleotide
  Antisense strand to SEQ ID NO: 1557684
gaucgaaugacucugguca

SEQ ID NO: 1557686 - RNA, 19 nt, Artificial Sequence
  Description of Artificial Sequence: Synthetic oligonucleotide
  Sense strand starting at position 3594 of SEQ ID NO: 1245373
gaugaccuucuaugaguua

SEQ ID NO: 1557687 - RNA, 19 nt, Artificial Sequence
  Description of Artificial Sequence: Synthetic oligonucleotide
  Antisense strand to SEQ ID NO: 1557686
uaacucauagaaggucauc

SEQ ID NO: 1557688 - RNA, 19 nt, Artificial Sequence
  Description of Artificial Sequence: Synthetic oligonucleotide
  Sense strand starting at position 3601 of SEQ ID NO: 1245373
uucuaugaguuaucuacua

SEQ ID NO: 1557689 - RNA, 19 nt, Artificial Sequence
  Description of Artificial Sequence: Synthetic oligonucleotide
  Antisense strand to SEQ ID NO: 1557688
uaguagauaacucauagaa

SEQ ID NO: 1557690 - RNA, 19 nt, Artificial Sequence
  Description of Artificial Sequence: Synthetic oligonucleotide
  Sense strand starting at position 3609 of SEQ ID NO: 1245373
guuaucuacuaucucagau

SEQ ID NO: 1557691 - RNA, 19 nt, Artificial Sequence
  Description of Artificial Sequence: Synthetic oligonucleotide
  Antisense strand to SEQ ID NO: 1557690
aucugagauaguagauaac

SEQ ID NO: 1557692 - RNA, 19 nt, Artificial Sequence
  Description of Artificial Sequence: Synthetic oligonucleotide
  Sense strand starting at position 246 of SEQ ID NO: 1245374
acuuuagcuccauggaaau

SEQ ID NO: 1557693 - RNA, 19 nt, Artificial Sequence
  Description of Artificial Sequence: Synthetic oligonucleotide
  Antisense strand to SEQ ID NO: 1557692
auuuccauggagcuaaagu

SEQ ID NO: 1557694 - RNA, 19 nt, Artificial Sequence
  Description of Artificial Sequence: Synthetic oligonucleotide
  Sense strand starting at position 297 of SEQ ID NO: 1245374
ggaugaaauucucugcuuu

SEQ ID NO: 1557695 - RNA, 19 nt, Artificial Sequence
  Description of Artificial Sequence: Synthetic oligonucleotide
  Antisense strand to SEQ ID NO: 1557694
aaagcagagaauuucaucc

SEQ ID NO: 1557696 - RNA, 19 nt, Artificial Sequence
  Description of Artificial Sequence: Synthetic oligonucleotide
  Sense strand starting at position 301 of SEQ ID NO: 1245374
gaaauucucugcuuuguga

SEQ ID NO: 1557697 - RNA, 19 nt, Artificial Sequence
  Description of Artificial Sequence: Synthetic oligonucleotide
  Antisense strand to SEQ ID NO: 1557696
ucacaaagcagagaauuuc

SEQ ID NO: 1557698 - RNA, 19 nt, Artificial Sequence
  Description of Artificial Sequence: Synthetic oligonucleotide
  Sense strand starting at position 350 of SEQ ID NO: 1245374
ccaugugcagucugagaac

SEQ ID NO: 1557699 - RNA, 19 nt, Artificial Sequence
  Description of Artificial Sequence: Synthetic oligonucleotide
  Antisense strand to SEQ ID NO: 1557698
guucucagacugcacaugg

SEQ ID NO: 1557700 - RNA, 19 nt, Artificial Sequence
  Description of Artificial Sequence: Synthetic oligonucleotide
  Sense strand starting at position 427 of SEQ ID NO: 1245374
gaguguucuuguguggaaa

SEQ ID NO: 1557701 - RNA, 19 nt, Artificial Sequence
  Description of Artificial Sequence: Synthetic oligonucleotide
  Antisense strand to SEQ ID NO: 1557700
uuuccacacaagaacacuc

SEQ ID NO: 1557702 - RNA, 19 nt, Artificial Sequence
  Description of Artificial Sequence: Synthetic oligonucleotide
  Sense strand starting at position 451 of SEQ ID NO: 1245374
ugccaauugggcuagaacu

SEQ ID NO: 1557703 - RNA, 19 nt, Artificial Sequence
  Description of Artificial Sequence: Synthetic oligonucleotide
  Antisense strand to SEQ ID NO: 1557702
aguucuagcccaauuggca

SEQ ID NO: 1557704 - RNA, 19 nt, Artificial Sequence
  Description of Artificial Sequence: Synthetic oligonucleotide
  Sense strand starting at position 476 of SEQ ID NO: 1245374
cggugaggacacgguuaau

SEQ ID NO: 1557705 - RNA, 19 nt, Artificial Sequence
  Description of Artificial Sequence: Synthetic oligonucleotide
  Antisense strand to SEQ ID NO: 1557704
auuaaccguguccucaccg

SEQ ID NO: 1557706 - RNA, 19 nt, Artificial Sequence
  Description of Artificial Sequence: Synthetic oligonucleotide
  Sense strand starting at position 487 of SEQ ID NO: 1245374
cgguuaauaugauuccaga

SEQ ID NO: 1557707 - RNA, 19 nt, Artificial Sequence
  Description of Artificial Sequence: Synthetic oligonucleotide
  Antisense strand to SEQ ID NO: 1557706
ucuggaaucauauuaaccg

SEQ ID NO: 1557708 - RNA, 19 nt, Artificial Sequence
  Description of Artificial Sequence: Synthetic oligonucleotide
  Sense strand starting at position 597 of SEQ ID NO: 1245374
caguguauacuggaacuau

SEQ ID NO: 1557709 - RNA, 19 nt, Artificial Sequence
  Description of Artificial Sequence: Synthetic oligonucleotide
  Antisense strand to SEQ ID NO: 1557708
auaguuccaguauacacug

SEQ ID NO: 1557710 - RNA, 19 nt, Artificial Sequence
  Description of Artificial Sequence: Synthetic oligonucleotide
  Sense strand starting at position 606 of SEQ ID NO: 1245374
cuggaacuauccuuagugu

SEQ ID NO: 1557711 - RNA, 19 nt, Artificial Sequence
  Description of Artificial Sequence: Synthetic oligonucleotide
  Antisense strand to SEQ ID NO: 1557710
acacuaaggauaguuccag

SEQ ID NO: 1557712 - RNA, 19 nt, Artificial Sequence
  Description of Artificial Sequence: Synthetic oligonucleotide
  Sense strand starting at position 615 of SEQ ID NO: 1245374
uccuuaguguccucuagaa

SEQ ID NO: 1557713 - RNA, 19 nt, Artificial Sequence
  Description of Artificial Sequence: Synthetic oligonucleotide
  Antisense strand to SEQ ID NO: 1557712
uucuagaggacacuaagga

SEQ ID NO: 1557714 - RNA, 19 nt, Artificial Sequence
  Description of Artificial Sequence: Synthetic oligonucleotide
  Sense strand starting at position 617 of SEQ ID NO: 1245374
cuuaguguccucuagaaau

SEQ ID NO: 1557715 - RNA, 19 nt, Artificial Sequence
  Description of Artificial Sequence: Synthetic oligonucleotide
  Antisense strand to SEQ ID NO: 1557714
auuucuagaggacacuaag

SEQ ID NO: 1557716 - RNA, 19 nt, Artificial Sequence
  Description of Artificial Sequence: Synthetic oligonucleotide
  Sense strand starting at position 667 of SEQ ID NO: 1245374
uuugucauugcugcguaaa

SEQ ID NO: 1557717 - RNA, 19 nt, Artificial Sequence
  Description of Artificial Sequence: Synthetic oligonucleotide
  Antisense strand to SEQ ID NO: 1557716
uuuacgcagcaaugacaaa

SEQ ID NO: 1557718 - RNA, 19 nt, Artificial Sequence
  Description of Artificial Sequence: Synthetic oligonucleotide
  Sense strand starting at position 675 of SEQ ID NO: 1245374
ugcugcguaaaugaauaaa

SEQ ID NO: 1557719 - RNA, 19 nt, Artificial Sequence
  Description of Artificial Sequence: Synthetic oligonucleotide
  Antisense strand to SEQ ID NO: 1557718
uuuauucauuuacgcagca

SEQ ID NO: 1557720 - RNA, 19 nt, Artificial Sequence
  Description of Artificial Sequence: Synthetic oligonucleotide
  Sense strand starting at position 697 of SEQ ID NO: 1245374
ccacucguugcugagaacu

SEQ ID NO: 1557721 - RNA, 19 nt, Artificial Sequence
  Description of Artificial Sequence: Synthetic oligonucleotide
  Antisense strand to SEQ ID NO: 1557720
aguucucagcaacgagugg

SEQ ID NO: 1557722 - RNA, 19 nt, Artificial Sequence
  Description of Artificial Sequence: Synthetic oligonucleotide
  Sense strand starting at position 707 of SEQ ID NO: 1245374
cugagaacugccuggaguu

SEQ ID NO: 1557723 - RNA, 19 nt, Artificial Sequence
  Description of Artificial Sequence: Synthetic oligonucleotide
  Antisense strand to SEQ ID NO: 1557722
aacuccaggcaguucucag

SEQ ID NO: 1557724 - RNA, 19 nt, Artificial Sequence
  Description of Artificial Sequence: Synthetic oligonucleotide
  Sense strand starting at position 752 of SEQ ID NO: 1245374
uuuagaggucugcaaggga

SEQ ID NO: 1557725 - RNA, 19 nt, Artificial Sequence
  Description of Artificial Sequence: Synthetic oligonucleotide
  Antisense strand to SEQ ID NO: 1557724
ucccuugcagaccucuaaa

SEQ ID NO: 1557726 - RNA, 19 nt, Artificial Sequence
  Description of Artificial Sequence: Synthetic oligonucleotide
  Sense strand starting at position 786 of SEQ ID NO: 1245374
aagagagcguuucucaaau

SEQ ID NO: 1557727 - RNA, 19 nt, Artificial Sequence
  Description of Artificial Sequence: Synthetic oligonucleotide
  Antisense strand to SEQ ID NO: 1557726
auuugagaaacgcucucuu

SEQ ID NO: 1557728 - RNA, 19 nt, Artificial Sequence
  Description of Artificial Sequence: Synthetic oligonucleotide
  Sense strand starting at position 983 of SEQ ID NO: 1245374
agcucaagcccucaguuaa

SEQ ID NO: 1557729 - RNA, 19 nt, Artificial Sequence
  Description of Artificial Sequence: Synthetic oligonucleotide
  Antisense strand to SEQ ID NO: 1557728
uuaacugagggcuugagcu

SEQ ID NO: 1557730 - RNA, 19 nt, Artificial Sequence
  Description of Artificial Sequence: Synthetic oligonucleotide
  Sense strand starting at position 1258 of SEQ ID NO: 1245374
cgcucagacccucaggaua

SEQ ID NO: 1557731 - RNA, 19 nt, Artificial Sequence
  Description of Artificial Sequence: Synthetic oligonucleotide
  Antisense strand to SEQ ID NO: 1557730
uauccugagggucugagcg

SEQ ID NO: 1557732 - RNA, 19 nt, Artificial Sequence
  Description of Artificial Sequence: Synthetic oligonucleotide
  Sense strand starting at position 1282 of SEQ ID NO: 1245374
aaucgagcuguuugaauaa

SEQ ID NO: 1557733 - RNA, 19 nt, Artificial Sequence
  Description of Artificial Sequence: Synthetic oligonucleotide
  Antisense strand to SEQ ID NO: 1557732
uuauucaaacagcucgauu

SEQ ID NO: 1557734 - RNA, 19 nt, Artificial Sequence
  Description of Artificial Sequence: Synthetic oligonucleotide
  Sense strand starting at position 2511 of SEQ ID NO: 1245374
ugguguuuccgucuccgga

SEQ ID NO: 1557735 - RNA, 19 nt, Artificial Sequence
  Description of Artificial Sequence: Synthetic oligonucleotide
  Antisense strand to SEQ ID NO: 1557734
uccggagacggaaacacca

SEQ ID NO: 1557736 - RNA, 19 nt, Artificial Sequence
  Description of Artificial Sequence: Synthetic oligonucleotide
  Sense strand starting at position 2653 of SEQ ID NO: 1245374
gcgcguuagcgaagaaaug

SEQ ID NO: 1557737 - RNA, 19 nt, Artificial Sequence
  Description of Artificial Sequence: Synthetic oligonucleotide
  Antisense strand to SEQ ID NO: 1557736
cauuucuucgcuaacgcgc

SEQ ID NO: 1557738 - RNA, 19 nt, Artificial Sequence
  Description of Artificial Sequence: Synthetic oligonucleotide
  Sense strand starting at position 3008 of SEQ ID NO: 1245374
cgacgauguucuguaauuu

SEQ ID NO: 1557739 - RNA, 19 nt, Artificial Sequence
  Description of Artificial Sequence: Synthetic oligonucleotide
  Antisense strand to SEQ ID NO: 1557738
aaauuacagaacaucgucg

SEQ ID NO: 1557740 - RNA, 19 nt, Artificial Sequence
  Description of Artificial Sequence: Synthetic oligonucleotide
  Sense strand starting at position 3019 of SEQ ID NO: 1245374
uguaauuugcacuggcacu

SEQ ID NO: 1557741 - RNA, 19 nt, Artificial Sequence
  Description of Artificial Sequence: Synthetic oligonucleotide
  Antisense strand to SEQ ID NO: 1557740
agugccagugcaaauuaca

SEQ ID NO: 1557742 - RNA, 19 nt, Artificial Sequence
  Description of Artificial Sequence: Synthetic oligonucleotide
  Sense strand starting at position 3064 of SEQ ID NO: 1245374
ggaaauuccuaauugugug

SEQ ID NO: 1557743 - RNA, 19 nt, Artificial Sequence
  Description of Artificial Sequence: Synthetic oligonucleotide
  Antisense strand to SEQ ID NO: 1557742
cacacaauuaggaauuucc

SEQ ID NO: 1557744 - RNA, 19 nt, Artificial Sequence
  Description of Artificial Sequence: Synthetic oligonucleotide
  Sense strand starting at position 3153 of SEQ ID NO: 1245374
uuuccaaauugaggaauuu

SEQ ID NO: 1557745 - RNA, 19 nt, Artificial Sequence
  Description of Artificial Sequence: Synthetic oligonucleotide
  Antisense strand to SEQ ID NO: 1557744
aaauuccucaauuuggaaa

SEQ ID NO: 1557746 - RNA, 19 nt, Artificial Sequence
  Description of Artificial Sequence: Synthetic oligonucleotide
  Sense strand starting at position 3334 of SEQ ID NO: 1245374
gccugagauuaaucagcca

SEQ ID NO: 1557747 - RNA, 19 nt, Artificial Sequence
  Description of Artificial Sequence: Synthetic oligonucleotide
  Antisense strand to SEQ ID NO: 1557746
uggcugauuaaucucaggc

SEQ ID NO: 1557748 - RNA, 19 nt, Artificial Sequence
  Description of Artificial Sequence: Synthetic oligonucleotide
  Sense strand starting at position 3337 of SEQ ID NO: 1245374
ugagauuaaucagccaccu

SEQ ID NO: 1557749 - RNA, 19 nt, Artificial Sequence
  Description of Artificial Sequence: Synthetic oligonucleotide
  Antisense strand to SEQ ID NO: 1557748
agguggcugauuaaucuca

SEQ ID NO: 1557750 - RNA, 19 nt, Artificial Sequence
  Description of Artificial Sequence: Synthetic oligonucleotide
  Sense strand starting at position 3485 of SEQ ID NO: 1245374
cugugccaucccuggaaga

SEQ ID NO: 1557751 - RNA, 19 nt, Artificial Sequence
  Description of Artificial Sequence: Synthetic oligonucleotide
  Antisense strand to SEQ ID NO: 1557750
ucuuccagggauggcacag

SEQ ID NO: 1557752 - RNA, 19 nt, Artificial Sequence
  Description of Artificial Sequence: Synthetic oligonucleotide
  Sense strand starting at position 3486 of SEQ ID NO: 1245374
ugugccaucccuggaagaa

SEQ ID NO: 1557753 - RNA, 19 nt, Artificial Sequence
  Description of Artificial Sequence: Synthetic oligonucleotide
  Antisense strand to SEQ ID NO: 1557752
uucuuccagggauggcaca

SEQ ID NO: 1557754 - RNA, 19 nt, Artificial Sequence
  Description of Artificial Sequence: Synthetic oligonucleotide
  Sense strand starting at position 3487 of SEQ ID NO: 1245374
gugccaucccuggaagaac

SEQ ID NO: 1557755 - RNA, 19 nt, Artificial Sequence
  Description of Artificial Sequence: Synthetic oligonucleotide
  Antisense strand to SEQ ID NO: 1557754
guucuuccagggauggcac

SEQ ID NO: 1557756 - RNA, 19 nt, Artificial Sequence
  Description of Artificial Sequence: Synthetic oligonucleotide
  Sense strand starting at position 3563 of SEQ ID NO: 1245374
gaaagugucuacuuuagaa

SEQ ID NO: 1557757 - RNA, 19 nt, Artificial Sequence
  Description of Artificial Sequence: Synthetic oligonucleotide
  Antisense strand to SEQ ID NO: 1557756
uucuaaaguagacacuuuc

SEQ ID NO: 1557758 - RNA, 19 nt, Artificial Sequence
  Description of Artificial Sequence: Synthetic oligonucleotide
  Sense strand starting at position 3650 of SEQ ID NO: 1245374
gucugaucgagccagaaag

SEQ ID NO: 1557759 - RNA, 19 nt, Artificial Sequence
  Description of Artificial Sequence: Synthetic oligonucleotide
  Antisense strand to SEQ ID NO: 1557758
cuuucuggcucgaucagac

SEQ ID NO: 1557760 - RNA, 19 nt, Artificial Sequence
  Description of Artificial Sequence: Synthetic oligonucleotide
  Sense strand starting at position 3652 of SEQ ID NO: 1245374
cugaucgagccagaaagua

SEQ ID NO: 1557761 - RNA, 19 nt, Artificial Sequence
  Description of Artificial Sequence: Synthetic oligonucleotide
  Antisense strand to SEQ ID NO: 1557760
uacuuucuggcucgaucag

SEQ ID NO: 1557762 - RNA, 19 nt, Artificial Sequence
  Description of Artificial Sequence: Synthetic oligonucleotide
  Sense strand starting at position 3694 of SEQ ID NO: 1245374
uccguugucacuuggauuu

SEQ ID NO: 1557763 - RNA, 19 nt, Artificial Sequence
  Description of Artificial Sequence: Synthetic oligonucleotide
  Antisense strand to SEQ ID NO: 1557762
aaauccaagugacaacgga

SEQ ID NO: 1557764 - RNA, 19 nt, Artificial Sequence
  Description of Artificial Sequence: Synthetic oligonucleotide
  Sense strand starting at position 3799 of SEQ ID NO: 1245374
gcgcuuugucuggagaaac

SEQ ID NO: 1557765 - RNA, 19 nt, Artificial Sequence
  Description of Artificial Sequence: Synthetic oligonucleotide
  Antisense strand to SEQ ID NO: 1557764
guuucuccagacaaagcgc

SEQ ID NO: 1557766 - RNA, 19 nt, Artificial Sequence
  Description of Artificial Sequence: Synthetic oligonucleotide
  Sense strand starting at position 3810 of SEQ ID NO: 1245374
ggagaaacucagugcucga

SEQ ID NO: 1557767 - RNA, 19 nt, Artificial Sequence
  Description of Artificial Sequence: Synthetic oligonucleotide
  Antisense strand to SEQ ID NO: 1557766
ucgagcacugaguuucucc

SEQ ID NO: 1557768 - RNA, 19 nt, Artificial Sequence
  Description of Artificial Sequence: Synthetic oligonucleotide
  Sense strand starting at position 3813 of SEQ ID NO: 1245374
gaaacucagugcucgaaga

SEQ ID NO: 1557769 - RNA, 19 nt, Artificial Sequence
  Description of Artificial Sequence: Synthetic oligonucleotide
  Antisense strand to SEQ ID NO: 1557768
ucuucgagcacugaguuuc

SEQ ID NO: 1557770 - RNA, 19 nt, Artificial Sequence
  Description of Artificial Sequence: Synthetic oligonucleotide
  Sense strand starting at position 3815 of SEQ ID NO: 1245374
aacucagugcucgaagagu

SEQ ID NO: 1557771 - RNA, 19 nt, Artificial Sequence
  Description of Artificial Sequence: Synthetic oligonucleotide
  Antisense strand to SEQ ID NO: 1557770
acucuucgagcacugaguu

SEQ ID NO: 1557772 - RNA, 19 nt, Artificial Sequence
  Description of Artificial Sequence: Synthetic oligonucleotide
  Sense strand starting at position 7 of SEQ ID NO: 1245375
gagugaguauaucuaaacc

SEQ ID NO: 1557773 - RNA, 19 nt, Artificial Sequence
  Description of Artificial Sequence: Synthetic oligonucleotide
  Antisense strand to SEQ ID NO: 1557772
gguuuagauauacucacuc

SEQ ID NO: 1557774 - RNA, 19 nt, Artificial Sequence
  Description of Artificial Sequence: Synthetic oligonucleotide
  Sense strand starting at position 257 of SEQ ID NO: 1245375
uccacagagucacuucuua

SEQ ID NO: 1557775 - RNA, 19 nt, Artificial Sequence
  Description of Artificial Sequence: Synthetic oligonucleotide
  Antisense strand to SEQ ID NO: 1557774
uaagaagugacucugugga

SEQ ID NO: 1557776 - RNA, 19 nt, Artificial Sequence
  Description of Artificial Sequence: Synthetic oligonucleotide
  Sense strand starting at position 329 of SEQ ID NO: 1245375
cuagguaauuauuagaaug

SEQ ID NO: 1557777 - RNA, 19 nt, Artificial Sequence
  Description of Artificial Sequence: Synthetic oligonucleotide
  Antisense strand to SEQ ID NO: 1557776
cauucuaauaauuaccuag

SEQ ID NO: 1557778 - RNA, 19 nt, Artificial Sequence
  Description of Artificial Sequence: Synthetic oligonucleotide
  Sense strand starting at position 336 of SEQ ID NO: 1245375
auuauuagaaugugacgau

SEQ ID NO: 1557779 - RNA, 19 nt, Artificial Sequence
  Description of Artificial Sequence: Synthetic oligonucleotide
  Antisense strand to SEQ ID NO: 1557778
aucgucacauucuaauaau

SEQ ID NO: 1557780 - RNA, 19 nt, Artificial Sequence
  Description of Artificial Sequence: Synthetic oligonucleotide
  Sense strand starting at position 340 of SEQ ID NO: 1245375
uuagaaugugacgauauuc

SEQ ID NO: 1557781 - RNA, 19 nt, Artificial Sequence
  Description of Artificial Sequence: Synthetic oligonucleotide
  Antisense strand to SEQ ID NO: 1557780
gaauaucgucacauucuaa

SEQ ID NO: 1557782 - RNA, 19 nt, Artificial Sequence
  Description of Artificial Sequence: Synthetic oligonucleotide
  Sense strand starting at position 802 of SEQ ID NO: 1245375
acgggaagauaucauuucu

SEQ ID NO: 1557783 - RNA, 19 nt, Artificial Sequence
  Description of Artificial Sequence: Synthetic oligonucleotide
  Antisense strand to SEQ ID NO: 1557782
agaaaugauaucuucccgu

SEQ ID NO: 1557784 - RNA, 19 nt, Artificial Sequence
  Description of Artificial Sequence: Synthetic oligonucleotide
  Sense strand starting at position 885 of SEQ ID NO: 1245375
gauaaauagugaguuuaug

SEQ ID NO: 1557785 - RNA, 19 nt, Artificial Sequence
  Description of Artificial Sequence: Synthetic oligonucleotide
  Antisense strand to SEQ ID NO: 1557784
cauaaacucacuauuuauc

SEQ ID NO: 1557786 - RNA, 19 nt, Artificial Sequence
  Description of Artificial Sequence: Synthetic oligonucleotide
  Sense strand starting at position 991 of SEQ ID NO: 1245375
ggcuuuggaccugguauga

SEQ ID NO: 1557787 - RNA, 19 nt, Artificial Sequence
  Description of Artificial Sequence: Synthetic oligonucleotide
  Antisense strand to SEQ ID NO: 1557786
ucauaccagguccaaagcc

SEQ ID NO: 1557788 - RNA, 19 nt, Artificial Sequence
  Description of Artificial Sequence: Synthetic oligonucleotide
  Sense strand starting at position 1065 of SEQ ID NO: 1245375
ccuaaagaccguuaguaac

SEQ ID NO: 1557789 - RNA, 19 nt, Artificial Sequence
  Description of Artificial Sequence: Synthetic oligonucleotide
  Antisense strand to SEQ ID NO: 1557788
guuacuaacggucuuuagg

SEQ ID NO: 1557790 - RNA, 19 nt, Artificial Sequence
  Description of Artificial Sequence: Synthetic oligonucleotide
  Sense strand starting at position 1067 of SEQ ID NO: 1245375
uaaagaccguuaguaacua

SEQ ID NO: 1557791 - RNA, 19 nt, Artificial Sequence
  Description of Artificial Sequence: Synthetic oligonucleotide
  Antisense strand to SEQ ID NO: 1557790
uaguuacuaacggucuuua

SEQ ID NO: 1557792 - RNA, 19 nt, Artificial Sequence
  Description of Artificial Sequence: Synthetic oligonucleotide
  Sense strand starting at position 1118 of SEQ ID NO: 1245375
uaggaugauuucuggagca

SEQ ID NO: 1557793 - RNA, 19 nt, Artificial Sequence
  Description of Artificial Sequence: Synthetic oligonucleotide
  Antisense strand to SEQ ID NO: 1557792
ugcuccagaaaucauccua

SEQ ID NO: 1557794 - RNA, 19 nt, Artificial Sequence
  Description of Artificial Sequence: Synthetic oligonucleotide
  Sense strand starting at position 1130 of SEQ ID NO: 1245375
uggagcaaccaguacauau

SEQ ID NO: 1557795 - RNA, 19 nt, Artificial Sequence
  Description of Artificial Sequence: Synthetic oligonucleotide
  Antisense strand to SEQ ID NO: 1557794
auauguacugguugcucca

SEQ ID NO: 1557796 - RNA, 19 nt, Artificial Sequence
  Description of Artificial Sequence: Synthetic oligonucleotide
  Sense strand starting at position 1163 of SEQ ID NO: 1245375
uaagguuauuuggagacua

SEQ ID NO: 1557797 - RNA, 19 nt, Artificial Sequence
  Description of Artificial Sequence: Synthetic oligonucleotide
  Antisense strand to SEQ ID NO: 1557796
uagucuccaaauaaccuua

SEQ ID NO: 1557798 - RNA, 19 nt, Artificial Sequence
  Description of Artificial Sequence: Synthetic oligonucleotide
  Sense strand starting at position 1178 of SEQ ID NO: 1245375
acuaacugucguggaacua

SEQ ID NO: 1557799 - RNA, 19 nt, Artificial Sequence
  Description of Artificial Sequence: Synthetic oligonucleotide
  Antisense strand to SEQ ID NO: 1557798
uaguuccacgacaguuagu

SEQ ID NO: 1557800 - RNA, 19 nt, Artificial Sequence
  Description of Artificial Sequence: Synthetic oligonucleotide
  Sense strand starting at position 1377 of SEQ ID NO: 1245375
guuagaaaccaucaugcau

SEQ ID NO: 1557801 - RNA, 19 nt, Artificial Sequence
  Description of Artificial Sequence: Synthetic oligonucleotide
  Antisense strand to SEQ ID NO: 1557800
augcaugaugguuucuaac

SEQ ID NO: 1557802 - RNA, 19 nt, Artificial Sequence
  Description of Artificial Sequence: Synthetic oligonucleotide
  Sense strand starting at position 1422 of SEQ ID NO: 1245375
caaguuucucguuaaggga

SEQ ID NO: 1557803 - RNA, 19 nt, Artificial Sequence
  Description of Artificial Sequence: Synthetic oligonucleotide
  Antisense strand to SEQ ID NO: 1557802
ucccuuaacgagaaacuug

SEQ ID NO: 1557804 - RNA, 19 nt, Artificial Sequence
  Description of Artificial Sequence: Synthetic oligonucleotide
  Sense strand starting at position 2406 of SEQ ID NO: 1245375
caguguuaagaucaacagu

SEQ ID NO: 1557805 - RNA, 19 nt, Artificial Sequence
  Description of Artificial Sequence: Synthetic oligonucleotide
  Antisense strand to SEQ ID NO: 1557804
acuguugaucuuaacacug

SEQ ID NO: 1557806 - RNA, 19 nt, Artificial Sequence
  Description of Artificial Sequence: Synthetic oligonucleotide
  Sense strand starting at position 2409 of SEQ ID NO: 1245375
uguuaagaucaacaguguu

SEQ ID NO: 1557807 - RNA, 19 nt, Artificial Sequence
  Description of Artificial Sequence: Synthetic oligonucleotide
  Antisense strand to SEQ ID NO: 1557806
aacacuguugaucuuaaca

SEQ ID NO: 1557808 - RNA, 19 nt, Artificial Sequence
  Description of Artificial Sequence: Synthetic oligonucleotide
  Sense strand starting at position 2412 of SEQ ID NO: 1245375
uaagaucaacaguguuaag

SEQ ID NO: 1557809 - RNA, 19 nt, Artificial Sequence
  Description of Artificial Sequence: Synthetic oligonucleotide
  Antisense strand to SEQ ID NO: 1557808
cuuaacacuguugaucuua

SEQ ID NO: 1557810 - RNA, 19 nt, Artificial Sequence
  Description of Artificial Sequence: Synthetic oligonucleotide
  Sense strand starting at position 2429 of SEQ ID NO: 1245375
agauuaaagccuugugaug

SEQ ID NO: 1557811 - RNA, 19 nt, Artificial Sequence
  Description of Artificial Sequence: Synthetic oligonucleotide
  Antisense strand to SEQ ID NO: 1557810
caucacaaggcuuuaaucu

SEQ ID NO: 1557812 - RNA, 19 nt, Artificial Sequence
  Description of Artificial Sequence: Synthetic oligonucleotide
  Sense strand starting at position 2464 of SEQ ID NO: 1245375
gaggauaugccguguacua

SEQ ID NO: 1557813 - RNA, 19 nt, Artificial Sequence
  Description of Artificial Sequence: Synthetic oligonucleotide
  Antisense strand to SEQ ID NO: 1557812
uaguacacggcauauccuc

SEQ ID NO: 1557814 - RNA, 19 nt, Artificial Sequence
  Description of Artificial Sequence: Synthetic oligonucleotide
  Sense strand starting at position 2466 of SEQ ID NO: 1245375
ggauaugccguguacuaaa

SEQ ID NO: 1557815 - RNA, 19 nt, Artificial Sequence
  Description of Artificial Sequence: Synthetic oligonucleotide
  Antisense strand to SEQ ID NO: 1557814
uuuaguacacggcauaucc

SEQ ID NO: 1557816 - RNA, 19 nt, Artificial Sequence
  Description of Artificial Sequence: Synthetic oligonucleotide
  Sense strand starting at position 2502 of SEQ ID NO: 1245375
acagcugcccuguaaggaa

SEQ ID NO: 1557817 - RNA, 19 nt, Artificial Sequence
  Description of Artificial Sequence: Synthetic oligonucleotide
  Antisense strand to SEQ ID NO: 1557816
uuccuuacagggcagcugu

SEQ ID NO: 1557818 - RNA, 19 nt, Artificial Sequence
  Description of Artificial Sequence: Synthetic oligonucleotide
  Sense strand starting at position 2616 of SEQ ID NO: 1245375
ucguuugccgucagaggua

SEQ ID NO: 1557819 - RNA, 19 nt, Artificial Sequence
  Description of Artificial Sequence: Synthetic oligonucleotide
  Antisense strand to SEQ ID NO: 1557818
uaccucugacggcaaacga

SEQ ID NO: 1557820 - RNA, 19 nt, Artificial Sequence
  Description of Artificial Sequence: Synthetic oligonucleotide
  Sense strand starting at position 2621 of SEQ ID NO: 1245375
ugccgucagagguaggauu

SEQ ID NO: 1557821 - RNA, 19 nt, Artificial Sequence
  Description of Artificial Sequence: Synthetic oligonucleotide
  Antisense strand to SEQ ID NO: 1557820
aauccuaccucugacggca

SEQ ID NO: 1557822 - RNA, 19 nt, Artificial Sequence
  Description of Artificial Sequence: Synthetic oligonucleotide
  Sense strand starting at position 2859 of SEQ ID NO: 1245375
cgguuagcacguagguuaa

SEQ ID NO: 1557823 - RNA, 19 nt, Artificial Sequence
  Description of Artificial Sequence: Synthetic oligonucleotide
  Antisense strand to SEQ ID NO: 1557822
uuaaccuacgugcuaaccg

SEQ ID NO: 1557824 - RNA, 19 nt, Artificial Sequence
  Description of Artificial Sequence: Synthetic oligonucleotide
  Sense strand starting at position 3176 of SEQ ID NO: 1245375
ucuccuaaaucguugggau

SEQ ID NO: 1557825 - RNA, 19 nt, Artificial Sequence
  Description of Artificial Sequence: Synthetic oligonucleotide
  Antisense strand to SEQ ID NO: 1557824
aucccaacgauuuaggaga

SEQ ID NO: 1557826 - RNA, 19 nt, Artificial Sequence
  Description of Artificial Sequence: Synthetic oligonucleotide
  Sense strand starting at position 3177 of SEQ ID NO: 1245375
cuccuaaaucguugggaug

SEQ ID NO: 1557827 - RNA, 19 nt, Artificial Sequence
  Description of Artificial Sequence: Synthetic oligonucleotide
  Antisense strand to SEQ ID NO: 1557826
caucccaacgauuuaggag

SEQ ID NO: 1557828 - RNA, 19 nt, Artificial Sequence
  Description of Artificial Sequence: Synthetic oligonucleotide
  Sense strand starting at position 3178 of SEQ ID NO: 1245375
uccuaaaucguugggauga

SEQ ID NO: 1557829 - RNA, 19 nt, Artificial Sequence
  Description of Artificial Sequence: Synthetic oligonucleotide
  Antisense strand to SEQ ID NO: 1557828
ucaucccaacgauuuagga

SEQ ID NO: 1557830 - RNA, 19 nt, Artificial Sequence
  Description of Artificial Sequence: Synthetic oligonucleotide
  Sense strand starting at position 3243 of SEQ ID NO: 1245375
auuccagggugauuaaguu

SEQ ID NO: 1557831 - RNA, 19 nt, Artificial Sequence
  Description of Artificial Sequence: Synthetic oligonucleotide
  Antisense strand to SEQ ID NO: 1557830
aacuuaaucacccuggaau

SEQ ID NO: 1557832 - RNA, 19 nt, Artificial Sequence
  Description of Artificial Sequence: Synthetic oligonucleotide
  Sense strand starting at position 3256 of SEQ ID NO: 1245375
uaaguuagagcccgcuaga

SEQ ID NO: 1557833 - RNA, 19 nt, Artificial Sequence
  Description of Artificial Sequence: Synthetic oligonucleotide
  Antisense strand to SEQ ID NO: 1557832
ucuagcgggcucuaacuua

SEQ ID NO: 1557834 - RNA, 19 nt, Artificial Sequence
  Description of Artificial Sequence: Synthetic oligonucleotide
  Sense strand starting at position 3290 of SEQ ID NO: 1245375
ggcaccuucccuuggaaau

SEQ ID NO: 1557835 - RNA, 19 nt, Artificial Sequence
  Description of Artificial Sequence: Synthetic oligonucleotide
  Antisense strand to SEQ ID NO: 1557834
auuuccaagggaaggugcc

SEQ ID NO: 1557836 - RNA, 19 nt, Artificial Sequence
  Description of Artificial Sequence: Synthetic oligonucleotide
  Sense strand starting at position 3291 of SEQ ID NO: 1245375
gcaccuucccuuggaaaug

SEQ ID NO: 1557837 - RNA, 19 nt, Artificial Sequence
  Description of Artificial Sequence: Synthetic oligonucleotide
  Antisense strand to SEQ ID NO: 1557836
cauuuccaagggaaggugc

SEQ ID NO: 1557838 - RNA, 19 nt, Artificial Sequence
  Description of Artificial Sequence: Synthetic oligonucleotide
  Sense strand starting at position 3410 of SEQ ID NO: 1245375
gguggauugcauuacugau

SEQ ID NO: 1557839 - RNA, 19 nt, Artificial Sequence
  Description of Artificial Sequence: Synthetic oligonucleotide
  Antisense strand to SEQ ID NO: 1557838
aucaguaaugcaauccacc

SEQ ID NO: 1557840 - RNA, 19 nt, Artificial Sequence
  Description of Artificial Sequence: Synthetic oligonucleotide
  Sense strand starting at position 3525 of SEQ ID NO: 1245375
agaaucuuauucuuggcau

SEQ ID NO: 1557841 - RNA, 19 nt, Artificial Sequence
  Description of Artificial Sequence: Synthetic oligonucleotide
  Antisense strand to SEQ ID NO: 1557840
augccaagaauaagauucu

SEQ ID NO: 1557842 - RNA, 19 nt, Artificial Sequence
  Description of Artificial Sequence: Synthetic oligonucleotide
  Sense strand starting at position 3604 of SEQ ID NO: 1245375
agugauaccgcagaucaga

SEQ ID NO: 1557843 - RNA, 19 nt, Artificial Sequence
  Description of Artificial Sequence: Synthetic oligonucleotide
  Antisense strand to SEQ ID NO: 1557842
ucugaucugcgguaucacu

SEQ ID NO: 1557844 - RNA, 19 nt, Artificial Sequence
  Description of Artificial Sequence: Synthetic oligonucleotide
  Sense strand starting at position 3693 of SEQ ID NO: 1245375
uguguaugugugcuacauc

SEQ ID NO: 1557845 - RNA, 19 nt, Artificial Sequence
  Description of Artificial Sequence: Synthetic oligonucleotide
  Antisense strand to SEQ ID NO: 1557844
gauguagcacacauacaca

SEQ ID NO: 1557846 - RNA, 19 nt, Artificial Sequence
  Description of Artificial Sequence: Synthetic oligonucleotide
  Sense strand starting at position 3696 of SEQ ID NO: 1245375
guaugugugcuacaucugu

SEQ ID NO: 1557847 - RNA, 19 nt, Artificial Sequence
  Description of Artificial Sequence: Synthetic oligonucleotide
  Antisense strand to SEQ ID NO: 1557846
acagauguagcacacauac

SEQ ID NO: 1557848 - RNA, 19 nt, Artificial Sequence
  Description of Artificial Sequence: Synthetic oligonucleotide
  Sense strand starting at position 3701 of SEQ ID NO: 1245375
ugugcuacaucuguuaaua

SEQ ID NO: 1557849 - RNA, 19 nt, Artificial Sequence
  Description of Artificial Sequence: Synthetic oligonucleotide
  Antisense strand to SEQ ID NO: 1557848
uauuaacagauguagcaca

SEQ ID NO: 1557850 - RNA, 19 nt, Artificial Sequence
  Description of Artificial Sequence: Synthetic oligonucleotide
  Sense strand starting at position 3976 of SEQ ID NO: 1245375
gucaaauaaugccuuagaa

SEQ ID NO: 1557851 - RNA, 19 nt, Artificial Sequence
  Description of Artificial Sequence: Synthetic oligonucleotide
  Antisense strand to SEQ ID NO: 1557850
uucuaaggcauuauuugac

SEQ ID NO: 1557852 - RNA, 19 nt, Artificial Sequence
  Description of Artificial Sequence: Synthetic oligonucleotide
  Sense strand starting at position 1130 of SEQ ID NO: 1245376
augagcuuucuguaccaaa

SEQ ID NO: 1557853 - RNA, 19 nt, Artificial Sequence
  Description of Artificial Sequence: Synthetic oligonucleotide
  Antisense strand to SEQ ID NO: 1557852
uuugguacagaaagcucau

SEQ ID NO: 1557854 - RNA, 19 nt, Artificial Sequence
  Description of Artificial Sequence: Synthetic oligonucleotide
  Sense strand starting at position 1235 of SEQ ID NO: 1245376
ugaugucacucuucgagau

SEQ ID NO: 1557855 - RNA, 19 nt, Artificial Sequence
  Description of Artificial Sequence: Synthetic oligonucleotide
  Antisense strand to SEQ ID NO: 1557854
aucucgaagagugacauca

SEQ ID NO: 1557856 - RNA, 19 nt, Artificial Sequence
  Description of Artificial Sequence: Synthetic oligonucleotide
  Sense strand starting at position 1236 of SEQ ID NO: 1245376
gaugucacucuucgagauc

SEQ ID NO: 1557857 - RNA, 19 nt, Artificial Sequence
  Description of Artificial Sequence: Synthetic oligonucleotide
  Antisense strand to SEQ ID NO: 1557856
gaucucgaagagugacauc

SEQ ID NO: 1557858 - RNA, 19 nt, Artificial Sequence
  Description of Artificial Sequence: Synthetic oligonucleotide
  Sense strand starting at position 1242 of SEQ ID NO: 1245376
acucuucgagaucacgaau

SEQ ID NO: 1557859 - RNA, 19 nt, Artificial Sequence
  Description of Artificial Sequence: Synthetic oligonucleotide
  Antisense strand to SEQ ID NO: 1557858
auucgugaucucgaagagu

SEQ ID NO: 1557860 - RNA, 19 nt, Artificial Sequence
  Description of Artificial Sequence: Synthetic oligonucleotide
  Sense strand starting at position 1248 of SEQ ID NO: 1245376
cgagaucacgaaugaaguc

SEQ ID NO: 1557861 - RNA, 19 nt, Artificial Sequence
  Description of Artificial Sequence: Synthetic oligonucleotide
  Antisense strand to SEQ ID NO: 1557860
gacuucauucgugaucucg

SEQ ID NO: 1557862 - RNA, 19 nt, Artificial Sequence
  Description of Artificial Sequence: Synthetic oligonucleotide
  Sense strand starting at position 1255 of SEQ ID NO: 1245376
acgaaugaagucugaugaa

SEQ ID NO: 1557863 - RNA, 19 nt, Artificial Sequence
  Description of Artificial Sequence: Synthetic oligonucleotide
  Antisense strand to SEQ ID NO: 1557862
uucaucagacuucauucgu

SEQ ID NO: 1557864 - RNA, 19 nt, Artificial Sequence
  Description of Artificial Sequence: Synthetic oligonucleotide
  Sense strand starting at position 1262 of SEQ ID NO: 1245376
aagucugaugaaugaugua

SEQ ID NO: 1557865 - RNA, 19 nt, Artificial Sequence
  Description of Artificial Sequence: Synthetic oligonucleotide
  Antisense strand to SEQ ID NO: 1557864
uacaucauucaucagacuu

SEQ ID NO: 1557866 - RNA, 19 nt, Artificial Sequence
  Description of Artificial Sequence: Synthetic oligonucleotide
  Sense strand starting at position 1325 of SEQ ID NO: 1245376
uuacacguaucuucuguau

SEQ ID NO: 1557867 - RNA, 19 nt, Artificial Sequence
  Description of Artificial Sequence: Synthetic oligonucleotide
  Antisense strand to SEQ ID NO: 1557866
auacagaagauacguguaa

SEQ ID NO: 1557868 - RNA, 19 nt, Artificial Sequence
  Description of Artificial Sequence: Synthetic oligonucleotide
  Sense strand starting at position 1329 of SEQ ID NO: 1245376
acguaucuucuguauacau

SEQ ID NO: 1557869 - RNA, 19 nt, Artificial Sequence
  Description of Artificial Sequence: Synthetic oligonucleotide
  Antisense strand to SEQ ID NO: 1557868
auguauacagaagauacgu

SEQ ID NO: 1557870 - RNA, 19 nt, Artificial Sequence
  Description of Artificial Sequence: Synthetic oligonucleotide
  Sense strand starting at position 1331 of SEQ ID NO: 1245376
guaucuucuguauacaugu

SEQ ID NO: 1557871 - RNA, 19 nt, Artificial Sequence
  Description of Artificial Sequence: Synthetic oligonucleotide
  Antisense strand to SEQ ID NO: 1557870
acauguauacagaagauac

SEQ ID NO: 1557872 - RNA, 19 nt, Artificial Sequence
  Description of Artificial Sequence: Synthetic oligonucleotide
  Sense strand starting at position 1338 of SEQ ID NO: 1245376
cuguauacauguucuuaag

SEQ ID NO: 1557873 - RNA, 19 nt, Artificial Sequence
  Description of Artificial Sequence: Synthetic oligonucleotide
  Antisense strand to SEQ ID NO: 1557872
cuuaagaacauguauacag

SEQ ID NO: 1557874 - RNA, 19 nt, Artificial Sequence
  Description of Artificial Sequence: Synthetic oligonucleotide
  Sense strand starting at position 1340 of SEQ ID NO: 1245376
guauacauguucuuaagcu

SEQ ID NO: 1557875 - RNA, 19 nt, Artificial Sequence
  Description of Artificial Sequence: Synthetic oligonucleotide
  Antisense strand to SEQ ID NO: 1557874
agcuuaagaacauguauac

SEQ ID NO: 1557876 - RNA, 19 nt, Artificial Sequence
  Description of Artificial Sequence: Synthetic oligonucleotide
  Sense strand starting at position 1402 of SEQ ID NO: 1245376
ugcauaggucuuuaaggca

SEQ ID NO: 1557877 - RNA, 19 nt, Artificial Sequence
  Description of Artificial Sequence: Synthetic oligonucleotide
  Antisense strand to SEQ ID NO: 1557876
ugccuuaaagaccuaugca

SEQ ID NO: 1557878 - RNA, 19 nt, Artificial Sequence
  Description of Artificial Sequence: Synthetic oligonucleotide
  Sense strand starting at position 2023 of SEQ ID NO: 1245376
uccuaaguaucuccucgaa

SEQ ID NO: 1557879 - RNA, 19 nt, Artificial Sequence
  Description of Artificial Sequence: Synthetic oligonucleotide
  Antisense strand to SEQ ID NO: 1557878
uucgaggagauacuuagga

SEQ ID NO: 1557880 - RNA, 19 nt, Artificial Sequence
  Description of Artificial Sequence: Synthetic oligonucleotide
  Sense strand starting at position 2025 of SEQ ID NO: 1245376
cuaaguaucuccucgaaac

SEQ ID NO: 1557881 - RNA, 19 nt, Artificial Sequence
  Description of Artificial Sequence: Synthetic oligonucleotide
  Antisense strand to SEQ ID NO: 1557880
guuucgaggagauacuuag

SEQ ID NO: 1557882 - RNA, 19 nt, Artificial Sequence
  Description of Artificial Sequence: Synthetic oligonucleotide
  Sense strand starting at position 2209 of SEQ ID NO: 1245376
agaacaaccucuuugugaa

SEQ ID NO: 1557883 - RNA, 19 nt, Artificial Sequence
  Description of Artificial Sequence: Synthetic oligonucleotide
  Antisense strand to SEQ ID NO: 1557882
uucacaaagagguuguucu

SEQ ID NO: 1557884 - RNA, 19 nt, Artificial Sequence
  Description of Artificial Sequence: Synthetic oligonucleotide
  Sense strand starting at position 2223 of SEQ ID NO: 1245376
gugaauaauccugguucca

SEQ ID NO: 1557885 - RNA, 19 nt, Artificial Sequence
  Description of Artificial Sequence: Synthetic oligonucleotide
  Antisense strand to SEQ ID NO: 1557884
uggaaccaggauuauucac

SEQ ID NO: 1557886 - RNA, 19 nt, Artificial Sequence
  Description of Artificial Sequence: Synthetic oligonucleotide
  Sense strand starting at position 2374 of SEQ ID NO: 1245376
gaagaaucaguguggaauu

SEQ ID NO: 1557887 - RNA, 19 nt, Artificial Sequence
  Description of Artificial Sequence: Synthetic oligonucleotide
  Antisense strand to SEQ ID NO: 1557886
aauuccacacugauucuuc

SEQ ID NO: 1557888 - RNA, 19 nt, Artificial Sequence
  Description of Artificial Sequence: Synthetic oligonucleotide
  Sense strand starting at position 2375 of SEQ ID NO: 1245376
aagaaucaguguggaauuu

SEQ ID NO: 1557889 - RNA, 19 nt, Artificial Sequence
  Description of Artificial Sequence: Synthetic oligonucleotide
  Antisense strand to SEQ ID NO: 1557888
aaauuccacacugauucuu

SEQ ID NO: 1557890 - RNA, 19 nt, Artificial Sequence
  Description of Artificial Sequence: Synthetic oligonucleotide
  Sense strand starting at position 2458 of SEQ ID NO: 1245376
uguugaaaguggucaggca

SEQ ID NO: 1557891 - RNA, 19 nt, Artificial Sequence
  Description of Artificial Sequence: Synthetic oligonucleotide
  Antisense strand to SEQ ID NO: 1557890
ugccugaccacuuucaaca

SEQ ID NO: 1557892 - RNA, 19 nt, Artificial Sequence
  Description of Artificial Sequence: Synthetic oligonucleotide
  Sense strand starting at position 2459 of SEQ ID NO: 1245376
guugaaaguggucaggcau

SEQ ID NO: 1557893 - RNA, 19 nt, Artificial Sequence
  Description of Artificial Sequence: Synthetic oligonucleotide
  Antisense strand to SEQ ID NO: 1557892
augccugaccacuuucaac

SEQ ID NO: 1557894 - RNA, 19 nt, Artificial Sequence
  Description of Artificial Sequence: Synthetic oligonucleotide
  Sense strand starting at position 2489 of SEQ ID NO: 1245376
ccgugaucucaguacuuug

SEQ ID NO: 1557895 - RNA, 19 nt, Artificial Sequence
  Description of Artificial Sequence: Synthetic oligonucleotide
  Antisense strand to SEQ ID NO: 1557894
caaaguacugagaucacgg

SEQ ID NO: 1557896 - RNA, 19 nt, Artificial Sequence
  Description of Artificial Sequence: Synthetic oligonucleotide
  Sense strand starting at position 2693 of SEQ ID NO: 1245376
ccgugaucacuacaucgua

SEQ ID NO: 1557897 - RNA, 19 nt, Artificial Sequence
  Description of Artificial Sequence: Synthetic oligonucleotide
  Antisense strand to SEQ ID NO: 1557896
uacgauguagugaucacgg

SEQ ID NO: 1557898 - RNA, 19 nt, Artificial Sequence
  Description of Artificial Sequence: Synthetic oligonucleotide
  Sense strand starting at position 3116 of SEQ ID NO: 1245376
uagcaaggcuggucucuaa

SEQ ID NO: 1557899 - RNA, 19 nt, Artificial Sequence
  Description of Artificial Sequence: Synthetic oligonucleotide
  Antisense strand to SEQ ID NO: 1557898
uuagagaccagccuugcua

SEQ ID NO: 1557900 - RNA, 19 nt, Artificial Sequence
  Description of Artificial Sequence: Synthetic oligonucleotide
  Sense strand starting at position 3211 of SEQ ID NO: 1245376
ccagcaaauccguaguucu

SEQ ID NO: 1557901 - RNA, 19 nt, Artificial Sequence
  Description of Artificial Sequence: Synthetic oligonucleotide
  Antisense strand to SEQ ID NO: 1557900
agaacuacggauuugcugg

SEQ ID NO: 1557902 - RNA, 19 nt, Artificial Sequence
  Description of Artificial Sequence: Synthetic oligonucleotide
  Sense strand starting at position 3214 of SEQ ID NO: 1245376
gcaaauccguaguucuuga

SEQ ID NO: 1557903 - RNA, 19 nt, Artificial Sequence
  Description of Artificial Sequence: Synthetic oligonucleotide
  Antisense strand to SEQ ID NO: 1557902
ucaagaacuacggauuugc

SEQ ID NO: 1557904 - RNA, 19 nt, Artificial Sequence
  Description of Artificial Sequence: Synthetic oligonucleotide
  Sense strand starting at position 3219 of SEQ ID NO: 1245376
uccguaguucuugaugaua

SEQ ID NO: 1557905 - RNA, 19 nt, Artificial Sequence
  Description of Artificial Sequence: Synthetic oligonucleotide
  Antisense strand to SEQ ID NO: 1557904
uaucaucaagaacuacgga

SEQ ID NO: 1557906 - RNA, 19 nt, Artificial Sequence
  Description of Artificial Sequence: Synthetic oligonucleotide
  Sense strand starting at position 3222 of SEQ ID NO: 1245376
guaguucuugaugauauga

SEQ ID NO: 1557907 - RNA, 19 nt, Artificial Sequence
  Description of Artificial Sequence: Synthetic oligonucleotide
  Antisense strand to SEQ ID NO: 1557906
ucauaucaucaagaacuac

SEQ ID NO: 1557908 - RNA, 19 nt, Artificial Sequence
  Description of Artificial Sequence: Synthetic oligonucleotide
  Sense strand starting at position 3236 of SEQ ID NO: 1245376
uaugaauccuguuccagga

SEQ ID NO: 1557909 - RNA, 19 nt, Artificial Sequence
  Description of Artificial Sequence: Synthetic oligonucleotide
  Antisense strand to SEQ ID NO: 1557908
uccuggaacaggauucaua

SEQ ID NO: 1557910 - RNA, 19 nt, Artificial Sequence
  Description of Artificial Sequence: Synthetic oligonucleotide
  Sense strand starting at position 3329 of SEQ ID NO: 1245376
ggccuuucuuaugugauau

SEQ ID NO: 1557911 - RNA, 19 nt, Artificial Sequence
  Description of Artificial Sequence: Synthetic oligonucleotide
  Antisense strand to SEQ ID NO: 1557910
auaucacauaagaaaggcc

SEQ ID NO: 1557912 - RNA, 19 nt, Artificial Sequence
  Description of Artificial Sequence: Synthetic oligonucleotide
  Sense strand starting at position 3331 of SEQ ID NO: 1245376
ccuuucuuaugugauauuu

SEQ ID NO: 1557913 - RNA, 19 nt, Artificial Sequence
  Description of Artificial Sequence: Synthetic oligonucleotide
  Antisense strand to SEQ ID NO: 1557912
aaauaucacauaagaaagg

SEQ ID NO: 1557914 - RNA, 19 nt, Artificial Sequence
  Description of Artificial Sequence: Synthetic oligonucleotide
  Sense strand starting at position 3458 of SEQ ID NO: 1245376
ggcacuuaucugggcaaug

SEQ ID NO: 1557915 - RNA, 19 nt, Artificial Sequence
  Description of Artificial Sequence: Synthetic oligonucleotide
  Antisense strand to SEQ ID NO: 1557914
cauugcccagauaagugcc

SEQ ID NO: 1557916 - RNA, 19 nt, Artificial Sequence
  Description of Artificial Sequence: Synthetic oligonucleotide
  Sense strand starting at position 3459 of SEQ ID NO: 1245376
gcacuuaucugggcaaugu

SEQ ID NO: 1557917 - RNA, 19 nt, Artificial Sequence
  Description of Artificial Sequence: Synthetic oligonucleotide
  Antisense strand to SEQ ID NO: 1557916
acauugcccagauaagugc

SEQ ID NO: 1557918 - RNA, 19 nt, Artificial Sequence
  Description of Artificial Sequence: Synthetic oligonucleotide
  Sense strand starting at position 3470 of SEQ ID NO: 1245376
ggcaaugucuucuuucuua

SEQ ID NO: 1557919 - RNA, 19 nt, Artificial Sequence
  Description of Artificial Sequence: Synthetic oligonucleotide
  Antisense strand to SEQ ID NO: 1557918
uaagaaagaagacauugcc

SEQ ID NO: 1557920 - RNA, 19 nt, Artificial Sequence
  Description of Artificial Sequence: Synthetic oligonucleotide
  Sense strand starting at position 3522 of SEQ ID NO: 1245376
aggcaucauuugcagaaac

SEQ ID NO: 1557921 - RNA, 19 nt, Artificial Sequence
  Description of Artificial Sequence: Synthetic oligonucleotide
  Antisense strand to SEQ ID NO: 1557920
guuucugcaaaugaugccu

SEQ ID NO: 1557922 - RNA, 19 nt, Artificial Sequence
  Description of Artificial Sequence: Synthetic oligonucleotide
  Sense strand starting at position 3584 of SEQ ID NO: 1245376
ggcccuugcucauugguaa

SEQ ID NO: 1557923 - RNA, 19 nt, Artificial Sequence
  Description of Artificial Sequence: Synthetic oligonucleotide
  Antisense strand to SEQ ID NO: 1557922
uuaccaaugagcaagggcc

SEQ ID NO: 1557924 - RNA, 19 nt, Artificial Sequence
  Description of Artificial Sequence: Synthetic oligonucleotide
  Sense strand starting at position 3587 of SEQ ID NO: 1245376
ccuugcucauugguaaguu

SEQ ID NO: 1557925 - RNA, 19 nt, Artificial Sequence
  Description of Artificial Sequence: Synthetic oligonucleotide
  Antisense strand to SEQ ID NO: 1557924
aacuuaccaaugagcaagg

SEQ ID NO: 1557926 - RNA, 19 nt, Artificial Sequence
  Description of Artificial Sequence: Synthetic oligonucleotide
  Sense strand starting at position 3767 of SEQ ID NO: 1245376
cuccuuucuccagguugau

SEQ ID NO: 1557927 - RNA, 19 nt, Artificial Sequence
  Description of Artificial Sequence: Synthetic oligonucleotide
  Antisense strand to SEQ ID NO: 1557926
aucaaccuggagaaaggag

SEQ ID NO: 1557928 - RNA, 19 nt, Artificial Sequence
  Description of Artificial Sequence: Synthetic oligonucleotide
  Sense strand starting at position 3780 of SEQ ID NO: 1245376
guugauugccagcacagau

SEQ ID NO: 1557929 - RNA, 19 nt, Artificial Sequence
  Description of Artificial Sequence: Synthetic oligonucleotide
  Antisense strand to SEQ ID NO: 1557928
aucugugcuggcaaucaac

SEQ ID NO: 1557930 - RNA, 19 nt, Artificial Sequence
  Description of Artificial Sequence: Synthetic oligonucleotide
  Sense strand starting at position 3864 of SEQ ID NO: 1245376
gccggauguggugacaaau

SEQ ID NO: 1557931 - RNA, 19 nt, Artificial Sequence
  Description of Artificial Sequence: Synthetic oligonucleotide
  Antisense strand to SEQ ID NO: 1557930
auuugucaccacauccggc

SEQ ID NO: 1557932 - RNA, 19 nt, Artificial Sequence
  Description of Artificial Sequence: Synthetic oligonucleotide
  Sense strand starting at position 65 of SEQ ID NO: 1245377
ugcuaugguaagggagaaa

SEQ ID NO: 1557933 - RNA, 19 nt, Artificial Sequence
  Description of Artificial Sequence: Synthetic oligonucleotide
  Antisense strand to SEQ ID NO: 1557932
uuucucccuuaccauagca

SEQ ID NO: 1557934 - RNA, 19 nt, Artificial Sequence
  Description of Artificial Sequence: Synthetic oligonucleotide
  Sense strand starting at position 157 of SEQ ID NO: 1245377
aggugagguuccuuauuga

SEQ ID NO: 1557935 - RNA, 19 nt, Artificial Sequence
  Description of Artificial Sequence: Synthetic oligonucleotide
  Antisense strand to SEQ ID NO: 1557934
ucaauaaggaaccucaccu

SEQ ID NO: 1557936 - RNA, 19 nt, Artificial Sequence
  Description of Artificial Sequence: Synthetic oligonucleotide
  Sense strand starting at position 160 of SEQ ID NO: 1245377
ugagguuccuuauugaaau

SEQ ID NO: 1557937 - RNA, 19 nt, Artificial Sequence
  Description of Artificial Sequence: Synthetic oligonucleotide
  Antisense strand to SEQ ID NO: 1557936
auuucaauaaggaaccuca

SEQ ID NO: 1557938 - RNA, 19 nt, Artificial Sequence
  Description of Artificial Sequence: Synthetic oligonucleotide
  Sense strand starting at position 195 of SEQ ID NO: 1245377
uacuguggccuagauacuu

SEQ ID NO: 1557939 - RNA, 19 nt, Artificial Sequence
  Description of Artificial Sequence: Synthetic oligonucleotide
  Antisense strand to SEQ ID NO: 1557938
aaguaucuaggccacagua

SEQ ID NO: 1557940 - RNA, 19 nt, Artificial Sequence
  Description of Artificial Sequence: Synthetic oligonucleotide
  Sense strand starting at position 397 of SEQ ID NO: 1245377
uaugaaaugcaagguacua

SEQ ID NO: 1557941 - RNA, 19 nt, Artificial Sequence
  Description of Artificial Sequence: Synthetic oligonucleotide
  Antisense strand to SEQ ID NO: 1557940
uaguaccuugcauuucaua

SEQ ID NO: 1557942 - RNA, 19 nt, Artificial Sequence
  Description of Artificial Sequence: Synthetic oligonucleotide
  Sense strand starting at position 433 of SEQ ID NO: 1245377
guaagagagacugguccaa

SEQ ID NO: 1557943 - RNA, 19 nt, Artificial Sequence
  Description of Artificial Sequence: Synthetic oligonucleotide
  Antisense strand to SEQ ID NO: 1557942
uuggaccagucucucuuac

SEQ ID NO: 1557944 - RNA, 19 nt, Artificial Sequence
  Description of Artificial Sequence: Synthetic oligonucleotide
  Sense strand starting at position 604 of SEQ ID NO: 1245377
uacaguuauuuggacaaga

SEQ ID NO: 1557945 - RNA, 19 nt, Artificial Sequence
  Description of Artificial Sequence: Synthetic oligonucleotide
  Antisense strand to SEQ ID NO: 1557944
ucuuguccaaauaacugua

SEQ ID NO: 1557946 - RNA, 19 nt, Artificial Sequence
  Description of Artificial Sequence: Synthetic oligonucleotide
  Sense strand starting at position 614 of SEQ ID NO: 1245377
uggacaagaaaguguguua

SEQ ID NO: 1557947 - RNA, 19 nt, Artificial Sequence
  Description of Artificial Sequence: Synthetic oligonucleotide
  Antisense strand to SEQ ID NO: 1557946
uaacacacuuucuugucca

SEQ ID NO: 1557948 - RNA, 19 nt, Artificial Sequence
  Description of Artificial Sequence: Synthetic oligonucleotide
  Sense strand starting at position 617 of SEQ ID NO: 1245377
acaagaaaguguguuacau

SEQ ID NO: 1557949 - RNA, 19 nt, Artificial Sequence
  Description of Artificial Sequence: Synthetic oligonucleotide
  Antisense strand to SEQ ID NO: 1557948
auguaacacacuuucuugu

SEQ ID NO: 1557950 - RNA, 19 nt, Artificial Sequence
  Description of Artificial Sequence: Synthetic oligonucleotide
  Sense strand starting at position 627 of SEQ ID NO: 1245377
guguuacauaaacagugau

SEQ ID NO: 1557951 - RNA, 19 nt, Artificial Sequence
  Description of Artificial Sequence: Synthetic oligonucleotide
  Antisense strand to SEQ ID NO: 1557950
aucacuguuuauguaacac

SEQ ID NO: 1557952 - RNA, 19 nt, Artificial Sequence
  Description of Artificial Sequence: Synthetic oligonucleotide
  Sense strand starting at position 639 of SEQ ID NO: 1245377
cagugauaccagcaguaga

SEQ ID NO: 1557953 - RNA, 19 nt, Artificial Sequence
  Description of Artificial Sequence: Synthetic oligonucleotide
  Antisense strand to SEQ ID NO: 1557952
ucuacugcugguaucacug

SEQ ID NO: 1557954 - RNA, 19 nt, Artificial Sequence
  Description of Artificial Sequence: Synthetic oligonucleotide
  Sense strand starting at position 652 of SEQ ID NO: 1245377
aguagacugcuccaaguua

SEQ ID NO: 1557955 - RNA, 19 nt, Artificial Sequence
  Description of Artificial Sequence: Synthetic oligonucleotide
  Antisense strand to SEQ ID NO: 1557954
uaacuuggagcagucuacu

SEQ ID NO: 1557956 - RNA, 19 nt, Artificial Sequence
  Description of Artificial Sequence: Synthetic oligonucleotide
  Sense strand starting at position 782 of SEQ ID NO: 1245377
cugaaaucuugguucucaa

SEQ ID NO: 1557957 - RNA, 19 nt, Artificial Sequence
  Description of Artificial Sequence: Synthetic oligonucleotide
  Antisense strand to SEQ ID NO: 1557956
uugagaaccaagauuucag

SEQ ID NO: 1557958 - RNA, 19 nt, Artificial Sequence
  Description of Artificial Sequence: Synthetic oligonucleotide
  Sense strand starting at position 888 of SEQ ID NO: 1245377
guugauauuuaccaaagac

SEQ ID NO: 1557959 - RNA, 19 nt, Artificial Sequence
  Description of Artificial Sequence: Synthetic oligonucleotide
  Antisense strand to SEQ ID NO: 1557958
gucuuugguaaauaucaac

SEQ ID NO: 1557960 - RNA, 19 nt, Artificial Sequence
  Description of Artificial Sequence: Synthetic oligonucleotide
  Sense strand starting at position 1047 of SEQ ID NO: 1245377
gagccuaagcuacaaguua

SEQ ID NO: 1557961 - RNA, 19 nt, Artificial Sequence
  Description of Artificial Sequence: Synthetic oligonucleotide
  Antisense strand to SEQ ID NO: 1557960
uaacuuguagcuuaggcuc

SEQ ID NO: 1557962 - RNA, 19 nt, Artificial Sequence
  Description of Artificial Sequence: Synthetic oligonucleotide
  Sense strand starting at position 1132 of SEQ ID NO: 1245377
uucgaaaugcauuagcaga

SEQ ID NO: 1557963 - RNA, 19 nt, Artificial Sequence
  Description of Artificial Sequence: Synthetic oligonucleotide
  Antisense strand to SEQ ID NO: 1557962
ucugcuaaugcauuucgaa

SEQ ID NO: 1557964 - RNA, 19 nt, Artificial Sequence
  Description of Artificial Sequence: Synthetic oligonucleotide
  Sense strand starting at position 1134 of SEQ ID NO: 1245377
cgaaaugcauuagcagaaa

SEQ ID NO: 1557965 - RNA, 19 nt, Artificial Sequence
  Description of Artificial Sequence: Synthetic oligonucleotide
  Antisense strand to SEQ ID NO: 1557964
uuucugcuaaugcauuucg

SEQ ID NO: 1557966 - RNA, 19 nt, Artificial Sequence
  Description of Artificial Sequence: Synthetic oligonucleotide
  Sense strand starting at position 1214 of SEQ ID NO: 1245377
gagagauguagguggugaa

SEQ ID NO: 1557967 - RNA, 19 nt, Artificial Sequence
  Description of Artificial Sequence: Synthetic oligonucleotide
  Antisense strand to SEQ ID NO: 1557966
uucaccaccuacaucucuc

SEQ ID NO: 1557968 - RNA, 19 nt, Artificial Sequence
  Description of Artificial Sequence: Synthetic oligonucleotide
  Sense strand starting at position 1239 of SEQ ID NO: 1245377
caaaguguucgguaaauua

SEQ ID NO: 1557969 - RNA, 19 nt, Artificial Sequence
  Description of Artificial Sequence: Synthetic oligonucleotide
  Antisense strand to SEQ ID NO: 1557968
uaauuuaccgaacacuuug

SEQ ID NO: 1557970 - RNA, 19 nt, Artificial Sequence
  Description of Artificial Sequence: Synthetic oligonucleotide
  Sense strand starting at position 1789 of SEQ ID NO: 1245377
uggcuuugaaacugaagga

SEQ ID NO: 1557971 - RNA, 19 nt, Artificial Sequence
  Description of Artificial Sequence: Synthetic oligonucleotide
  Antisense strand to SEQ ID NO: 1557970
uccuucaguuucaaagcca

SEQ ID NO: 1557972 - RNA, 19 nt, Artificial Sequence
  Description of Artificial Sequence: Synthetic oligonucleotide
  Sense strand starting at position 2098 of SEQ ID NO: 1245377
cugaguagccucgcgcuaa

SEQ ID NO: 1557973 - RNA, 19 nt, Artificial Sequence
  Description of Artificial Sequence: Synthetic oligonucleotide
  Antisense strand to SEQ ID NO: 1557972
uuagcgcgaggcuacucag

SEQ ID NO: 1557974 - RNA, 19 nt, Artificial Sequence
  Description of Artificial Sequence: Synthetic oligonucleotide
  Sense strand starting at position 2306 of SEQ ID NO: 1245377
cuggaaguacuuugaagau

SEQ ID NO: 1557975 - RNA, 19 nt, Artificial Sequence
  Description of Artificial Sequence: Synthetic oligonucleotide
  Antisense strand to SEQ ID NO: 1557974
aucuucaaaguacuuccag

SEQ ID NO: 1557976 - RNA, 19 nt, Artificial Sequence
  Description of Artificial Sequence: Synthetic oligonucleotide
  Sense strand starting at position 2577 of SEQ ID NO: 1245377
aggguaaacuugcuaggaa

SEQ ID NO: 1557977 - RNA, 19 nt, Artificial Sequence
  Description of Artificial Sequence: Synthetic oligonucleotide
  Antisense strand to SEQ ID NO: 1557976
uuccuagcaaguuuacccu

SEQ ID NO: 1557978 - RNA, 19 nt, Artificial Sequence
  Description of Artificial Sequence: Synthetic oligonucleotide
  Sense strand starting at position 2580 of SEQ ID NO: 1245377
guaaacuugcuaggaaucu

SEQ ID NO: 1557979 - RNA, 19 nt, Artificial Sequence
  Description of Artificial Sequence: Synthetic oligonucleotide
  Antisense strand to SEQ ID NO: 1557978
agauuccuagcaaguuuac

SEQ ID NO: 1557980 - RNA, 19 nt, Artificial Sequence
  Description of Artificial Sequence: Synthetic oligonucleotide
  Sense strand starting at position 2632 of SEQ ID NO: 1245377
gguuagauggauggugaga

SEQ ID NO: 1557981 - RNA, 19 nt, Artificial Sequence
  Description of Artificial Sequence: Synthetic oligonucleotide
  Antisense strand to SEQ ID NO: 1557980
ucucaccauccaucuaacc

SEQ ID NO: 1557982 - RNA, 19 nt, Artificial Sequence
  Description of Artificial Sequence: Synthetic oligonucleotide
  Sense strand starting at position 2651 of SEQ ID NO: 1245377
gguaauauuccaggcaagg

SEQ ID NO: 1557983 - RNA, 19 nt, Artificial Sequence
  Description of Artificial Sequence: Synthetic oligonucleotide
  Antisense strand to SEQ ID NO: 1557982
ccuugccuggaauauuacc

SEQ ID NO: 1557984 - RNA, 19 nt, Artificial Sequence
  Description of Artificial Sequence: Synthetic oligonucleotide
  Sense strand starting at position 2733 of SEQ ID NO: 1245377
caugauguaccaggcaaga

SEQ ID NO: 1557985 - RNA, 19 nt, Artificial Sequence
  Description of Artificial Sequence: Synthetic oligonucleotide
  Antisense strand to SEQ ID NO: 1557984
ucuugccugguacaucaug

SEQ ID NO: 1557986 - RNA, 19 nt, Artificial Sequence
  Description of Artificial Sequence: Synthetic oligonucleotide
  Sense strand starting at position 2920 of SEQ ID NO: 1245377
gucagauaaugacuagcua

SEQ ID NO: 1557987 - RNA, 19 nt, Artificial Sequence
  Description of Artificial Sequence: Synthetic oligonucleotide
  Antisense strand to SEQ ID NO: 1557986
uagcuagucauuaucugac

SEQ ID NO: 1557988 - RNA, 19 nt, Artificial Sequence
  Description of Artificial Sequence: Synthetic oligonucleotide
  Sense strand starting at position 2994 of SEQ ID NO: 1245377
caauuacaaguguggugaa

SEQ ID NO: 1557989 - RNA, 19 nt, Artificial Sequence
  Description of Artificial Sequence: Synthetic oligonucleotide
  Antisense strand to SEQ ID NO: 1557988
uucaccacacuuguaauug

SEQ ID NO: 1557990 - RNA, 19 nt, Artificial Sequence
  Description of Artificial Sequence: Synthetic oligonucleotide
  Sense strand starting at position 3269 of SEQ ID NO: 1245377
gagauccauuuaggaggau

SEQ ID NO: 1557991 - RNA, 19 nt, Artificial Sequence
  Description of Artificial Sequence: Synthetic oligonucleotide
  Antisense strand to SEQ ID NO: 1557990
auccuccuaaauggaucuc

SEQ ID NO: 1557992 - RNA, 19 nt, Artificial Sequence
  Description of Artificial Sequence: Synthetic oligonucleotide
  Sense strand starting at position 3290 of SEQ ID NO: 1245377
uguggugauccaggaacua

SEQ ID NO: 1557993 - RNA, 19 nt, Artificial Sequence
  Description of Artificial Sequence: Synthetic oligonucleotide
  Antisense strand to SEQ ID NO: 1557992
uaguuccuggaucaccaca

SEQ ID NO: 1557994 - RNA, 19 nt, Artificial Sequence
  Description of Artificial Sequence: Synthetic oligonucleotide
  Sense strand starting at position 3373 of SEQ ID NO: 1245377
ccaauuuagugagaugaca

SEQ ID NO: 1557995 - RNA, 19 nt, Artificial Sequence
  Description of Artificial Sequence: Synthetic oligonucleotide
  Antisense strand to SEQ ID NO: 1557994
ugucaucucacuaaauugg

SEQ ID NO: 1557996 - RNA, 19 nt, Artificial Sequence
  Description of Artificial Sequence: Synthetic oligonucleotide
  Sense strand starting at position 3476 of SEQ ID NO: 1245377
gauauaguagaucgugaga

SEQ ID NO: 1557997 - RNA, 19 nt, Artificial Sequence
  Description of Artificial Sequence: Synthetic oligonucleotide
  Antisense strand to SEQ ID NO: 1557996
ucucacgaucuacuauauc

SEQ ID NO: 1557998 - RNA, 19 nt, Artificial Sequence
  Description of Artificial Sequence: Synthetic oligonucleotide
  Sense strand starting at position 3493 of SEQ ID NO: 1245377
gagggaugagccuggaacu

SEQ ID NO: 1557999 - RNA, 19 nt, Artificial Sequence
  Description of Artificial Sequence: Synthetic oligonucleotide
  Antisense strand to SEQ ID NO: 1557998
aguuccaggcucaucccuc

SEQ ID NO: 1558000 - RNA, 19 nt, Artificial Sequence
  Description of Artificial Sequence: Synthetic oligonucleotide
  Sense strand starting at position 3494 of SEQ ID NO: 1245377
agggaugagccuggaacua

SEQ ID NO: 1558001 - RNA, 19 nt, Artificial Sequence
  Description of Artificial Sequence: Synthetic oligonucleotide
  Antisense strand to SEQ ID NO: 1558000
uaguuccaggcucaucccu

SEQ ID NO: 1558002 - RNA, 19 nt, Artificial Sequence
  Description of Artificial Sequence: Synthetic oligonucleotide
  Sense strand starting at position 3547 of SEQ ID NO: 1245377
gagucaucagauuggguga

SEQ ID NO: 1558003 - RNA, 19 nt, Artificial Sequence
  Description of Artificial Sequence: Synthetic oligonucleotide
  Antisense strand to SEQ ID NO: 1558002
ucacccaaucugaugacuc

SEQ ID NO: 1558004 - RNA, 19 nt, Artificial Sequence
  Description of Artificial Sequence: Synthetic oligonucleotide
  Sense strand starting at position 3548 of SEQ ID NO: 1245377
agucaucagauugggugau

SEQ ID NO: 1558005 - RNA, 19 nt, Artificial Sequence
  Description of Artificial Sequence: Synthetic oligonucleotide
  Antisense strand to SEQ ID NO: 1558004
aucacccaaucugaugacu

SEQ ID NO: 1558006 - RNA, 19 nt, Artificial Sequence
  Description of Artificial Sequence: Synthetic oligonucleotide
  Sense strand starting at position 3552 of SEQ ID NO: 1245377
aucagauugggugauaguu

SEQ ID NO: 1558007 - RNA, 19 nt, Artificial Sequence
  Description of Artificial Sequence: Synthetic oligonucleotide
  Antisense strand to SEQ ID NO: 1558006
aacuaucacccaaucugau

SEQ ID NO: 1558008 - RNA, 19 nt, Artificial Sequence
  Description of Artificial Sequence: Synthetic oligonucleotide
  Sense strand starting at position 3601 of SEQ ID NO: 1245377
aaagguguugcagaaacau

SEQ ID NO: 1558009 - RNA, 19 nt, Artificial Sequence
  Description of Artificial Sequence: Synthetic oligonucleotide
  Antisense strand to SEQ ID NO: 1558008
auguuucugcaacaccuuu

SEQ ID NO: 1558010 - RNA, 19 nt, Artificial Sequence
  Description of Artificial Sequence: Synthetic oligonucleotide
  Sense strand starting at position 3659 of SEQ ID NO: 1245377
gaggcacaguaauuacauu

SEQ ID NO: 1558011 - RNA, 19 nt, Artificial Sequence
  Description of Artificial Sequence: Synthetic oligonucleotide
  Antisense strand to SEQ ID NO: 1558010
aauguaauuacugugccuc

SEQ ID NO: 1558012 - RNA, 19 nt, Artificial Sequence
  Description of Artificial Sequence: Synthetic oligonucleotide
  Sense strand starting at position 38 of SEQ ID NO: 1245378
gagcaaaucuggcaaagac

SEQ ID NO: 1558013 - RNA, 19 nt, Artificial Sequence
  Description of Artificial Sequence: Synthetic oligonucleotide
  Antisense strand to SEQ ID NO: 1558012
gucuuugccagauuugcuc

SEQ ID NO: 1558014 - RNA, 19 nt, Artificial Sequence
  Description of Artificial Sequence: Synthetic oligonucleotide
  Sense strand starting at position 233 of SEQ ID NO: 1245378
agugaaagauucuagaauu

SEQ ID NO: 1558015 - RNA, 19 nt, Artificial Sequence
  Description of Artificial Sequence: Synthetic oligonucleotide
  Antisense strand to SEQ ID NO: 1558014
aauucuagaaucuuucacu

SEQ ID NO: 1558016 - RNA, 19 nt, Artificial Sequence
  Description of Artificial Sequence: Synthetic oligonucleotide
  Sense strand starting at position 278 of SEQ ID NO: 1245378
auuuacuuauugggaaacu

SEQ ID NO: 1558017 - RNA, 19 nt, Artificial Sequence
  Description of Artificial Sequence: Synthetic oligonucleotide
  Antisense strand to SEQ ID NO: 1558016
aguuucccaauaaguaaau

SEQ ID NO: 1558018 - RNA, 19 nt, Artificial Sequence
  Description of Artificial Sequence: Synthetic oligonucleotide
  Sense strand starting at position 287 of SEQ ID NO: 1245378
uugggaaacugcucuuagu

SEQ ID NO: 1558019 - RNA, 19 nt, Artificial Sequence
  Description of Artificial Sequence: Synthetic oligonucleotide
  Antisense strand to SEQ ID NO: 1558018
acuaagagcaguuucccaa

SEQ ID NO: 1558020 - RNA, 19 nt, Artificial Sequence
  Description of Artificial Sequence: Synthetic oligonucleotide
  Sense strand starting at position 302 of SEQ ID NO: 1245378
uagucaauucuucgcugga

SEQ ID NO: 1558021 - RNA, 19 nt, Artificial Sequence
  Description of Artificial Sequence: Synthetic oligonucleotide
  Antisense strand to SEQ ID NO: 1558020
uccagcgaagaauugacua

SEQ ID NO: 1558022 - RNA, 19 nt, Artificial Sequence
  Description of Artificial Sequence: Synthetic oligonucleotide
  Sense strand starting at position 303 of SEQ ID NO: 1245378
agucaauucuucgcuggau

SEQ ID NO: 1558023 - RNA, 19 nt, Artificial Sequence
  Description of Artificial Sequence: Synthetic oligonucleotide
  Antisense strand to SEQ ID NO: 1558022
auccagcgaagaauugacu

SEQ ID NO: 1558024 - RNA, 19 nt, Artificial Sequence
  Description of Artificial Sequence: Synthetic oligonucleotide
  Sense strand starting at position 304 of SEQ ID NO: 1245378
gucaauucuucgcuggauu

SEQ ID NO: 1558025 - RNA, 19 nt, Artificial Sequence
  Description of Artificial Sequence: Synthetic oligonucleotide
  Antisense strand to SEQ ID NO: 1558024
aauccagcgaagaauugac

SEQ ID NO: 1558026 - RNA, 19 nt, Artificial Sequence
  Description of Artificial Sequence: Synthetic oligonucleotide
  Sense strand starting at position 305 of SEQ ID NO: 1245378
ucaauucuucgcuggauuu

SEQ ID NO: 1558027 - RNA, 19 nt, Artificial Sequence
  Description of Artificial Sequence: Synthetic oligonucleotide
  Antisense strand to SEQ ID NO: 1558026
aaauccagcgaagaauuga

SEQ ID NO: 1558028 - RNA, 19 nt, Artificial Sequence
  Description of Artificial Sequence: Synthetic oligonucleotide
  Sense strand starting at position 670 of SEQ ID NO: 1245378
aagggagucuuguaauaac

SEQ ID NO: 1558029 - RNA, 19 nt, Artificial Sequence
  Description of Artificial Sequence: Synthetic oligonucleotide
  Antisense strand to SEQ ID NO: 1558028
guuauuacaagacucccuu

SEQ ID NO: 1558030 - RNA, 19 nt, Artificial Sequence
  Description of Artificial Sequence: Synthetic oligonucleotide
  Sense strand starting at position 763 of SEQ ID NO: 1245378
gccagauagucuuuccuuu

SEQ ID NO: 1558031 - RNA, 19 nt, Artificial Sequence
  Description of Artificial Sequence: Synthetic oligonucleotide
  Antisense strand to SEQ ID NO: 1558030
aaaggaaagacuaucuggc

SEQ ID NO: 1558032 - RNA, 19 nt, Artificial Sequence
  Description of Artificial Sequence: Synthetic oligonucleotide
  Sense strand starting at position 1185 of SEQ ID NO: 1245378
ugauguuuacugcaccuca

SEQ ID NO: 1558033 - RNA, 19 nt, Artificial Sequence
  Description of Artificial Sequence: Synthetic oligonucleotide
  Antisense strand to SEQ ID NO: 1558032
ugaggugcaguaaacauca

SEQ ID NO: 1558034 - RNA, 19 nt, Artificial Sequence
  Description of Artificial Sequence: Synthetic oligonucleotide
  Sense strand starting at position 1275 of SEQ ID NO: 1245378
caggauuucucaugcuaug

SEQ ID NO: 1558035 - RNA, 19 nt, Artificial Sequence
  Description of Artificial Sequence: Synthetic oligonucleotide
  Antisense strand to SEQ ID NO: 1558034
cauagcaugagaaauccug

SEQ ID NO: 1558036 - RNA, 19 nt, Artificial Sequence
  Description of Artificial Sequence: Synthetic oligonucleotide
  Sense strand starting at position 1311 of SEQ ID NO: 1245378
uuaugcauacaacgaauaa

SEQ ID NO: 1558037 - RNA, 19 nt, Artificial Sequence
  Description of Artificial Sequence: Synthetic oligonucleotide
  Antisense strand to SEQ ID NO: 1558036
uuauucguuguaugcauaa

SEQ ID NO: 1558038 - RNA, 19 nt, Artificial Sequence
  Description of Artificial Sequence: Synthetic oligonucleotide
  Sense strand starting at position 1429 of SEQ ID NO: 1245378
acgccuuaucaacagaaau

SEQ ID NO: 1558039 - RNA, 19 nt, Artificial Sequence
  Description of Artificial Sequence: Synthetic oligonucleotide
  Antisense strand to SEQ ID NO: 1558038
auuucuguugauaaggcgu

SEQ ID NO: 1558040 - RNA, 19 nt, Artificial Sequence
  Description of Artificial Sequence: Synthetic oligonucleotide
  Sense strand starting at position 1572 of SEQ ID NO: 1245378
ggaggaaucgccugaacga

SEQ ID NO: 1558041 - RNA, 19 nt, Artificial Sequence
  Description of Artificial Sequence: Synthetic oligonucleotide
  Antisense strand to SEQ ID NO: 1558040
ucguucaggcgauuccucc

SEQ ID NO: 1558042 - RNA, 19 nt, Artificial Sequence
  Description of Artificial Sequence: Synthetic oligonucleotide
  Sense strand starting at position 1573 of SEQ ID NO: 1245378
gaggaaucgccugaacgac

SEQ ID NO: 1558043 - RNA, 19 nt, Artificial Sequence
  Description of Artificial Sequence: Synthetic oligonucleotide
  Antisense strand to SEQ ID NO: 1558042
gucguucaggcgauuccuc

SEQ ID NO: 1558044 - RNA, 19 nt, Artificial Sequence
  Description of Artificial Sequence: Synthetic oligonucleotide
  Sense strand starting at position 2393 of SEQ ID NO: 1245378
uuguuucuguguguuacua

SEQ ID NO: 1558045 - RNA, 19 nt, Artificial Sequence
  Description of Artificial Sequence: Synthetic oligonucleotide
  Antisense strand to SEQ ID NO: 1558044
uaguaacacacagaaacaa

SEQ ID NO: 1558046 - RNA, 19 nt, Artificial Sequence
  Description of Artificial Sequence: Synthetic oligonucleotide
  Sense strand starting at position 2397 of SEQ ID NO: 1245378
uucuguguguuacuaagac

SEQ ID NO: 1558047 - RNA, 19 nt, Artificial Sequence
  Description of Artificial Sequence: Synthetic oligonucleotide
  Antisense strand to SEQ ID NO: 1558046
gucuuaguaacacacagaa

SEQ ID NO: 1558048 - RNA, 19 nt, Artificial Sequence
  Description of Artificial Sequence: Synthetic oligonucleotide
  Sense strand starting at position 2419 of SEQ ID NO: 1245378
ucaugugugucauuuguga

SEQ ID NO: 1558049 - RNA, 19 nt, Artificial Sequence
  Description of Artificial Sequence: Synthetic oligonucleotide
  Antisense strand to SEQ ID NO: 1558048
ucacaaaugacacacauga

SEQ ID NO: 1558050 - RNA, 19 nt, Artificial Sequence
  Description of Artificial Sequence: Synthetic oligonucleotide
  Sense strand starting at position 2421 of SEQ ID NO: 1245378
augugugucauuugugaaa

SEQ ID NO: 1558051 - RNA, 19 nt, Artificial Sequence
  Description of Artificial Sequence: Synthetic oligonucleotide
  Antisense strand to SEQ ID NO: 1558050
uuucacaaaugacacacau

SEQ ID NO: 1558052 - RNA, 19 nt, Artificial Sequence
  Description of Artificial Sequence: Synthetic oligonucleotide
  Sense strand starting at position 2424 of SEQ ID NO: 1245378
ugugucauuugugaaacuu

SEQ ID NO: 1558053 - RNA, 19 nt, Artificial Sequence
  Description of Artificial Sequence: Synthetic oligonucleotide
  Antisense strand to SEQ ID NO: 1558052
aaguuucacaaaugacaca

SEQ ID NO: 1558054 - RNA, 19 nt, Artificial Sequence
  Description of Artificial Sequence: Synthetic oligonucleotide
  Sense strand starting at position 2519 of SEQ ID NO: 1245378
caggccguccuugaggaau

SEQ ID NO: 1558055 - RNA, 19 nt, Artificial Sequence
  Description of Artificial Sequence: Synthetic oligonucleotide
  Antisense strand to SEQ ID NO: 1558054
auuccucaaggacggccug

SEQ ID NO: 1558056 - RNA, 19 nt, Artificial Sequence
  Description of Artificial Sequence: Synthetic oligonucleotide
  Sense strand starting at position 2530 of SEQ ID NO: 1245378
ugaggaaugucaccaucag

SEQ ID NO: 1558057 - RNA, 19 nt, Artificial Sequence
  Description of Artificial Sequence: Synthetic oligonucleotide
  Antisense strand to SEQ ID NO: 1558056
cugauggugacauuccuca

SEQ ID NO: 1558058 - RNA, 19 nt, Artificial Sequence
  Description of Artificial Sequence: Synthetic oligonucleotide
  Sense strand starting at position 3069 of SEQ ID NO: 1245378
uggguucaugcuggagacu

SEQ ID NO: 1558059 - RNA, 19 nt, Artificial Sequence
  Description of Artificial Sequence: Synthetic oligonucleotide
  Antisense strand to SEQ ID NO: 1558058
agucuccagcaugaaccca

SEQ ID NO: 1558060 - RNA, 19 nt, Artificial Sequence
  Description of Artificial Sequence: Synthetic oligonucleotide
  Sense strand starting at position 3078 of SEQ ID NO: 1245378
gcuggagacucccugguuu

SEQ ID NO: 1558061 - RNA, 19 nt, Artificial Sequence
  Description of Artificial Sequence: Synthetic oligonucleotide
  Antisense strand to SEQ ID NO: 1558060
aaaccagggagucuccagc

SEQ ID NO: 1558062 - RNA, 19 nt, Artificial Sequence
  Description of Artificial Sequence: Synthetic oligonucleotide
  Sense strand starting at position 3082 of SEQ ID NO: 1245378
gagacucccugguuugcaa

SEQ ID NO: 1558063 - RNA, 19 nt, Artificial Sequence
  Description of Artificial Sequence: Synthetic oligonucleotide
  Antisense strand to SEQ ID NO: 1558062
uugcaaaccagggagucuc

SEQ ID NO: 1558064 - RNA, 19 nt, Artificial Sequence
  Description of Artificial Sequence: Synthetic oligonucleotide
  Sense strand starting at position 3243 of SEQ ID NO: 1245378
gccuauggucgggaguuca

SEQ ID NO: 1558065 - RNA, 19 nt, Artificial Sequence
  Description of Artificial Sequence: Synthetic oligonucleotide
  Antisense strand to SEQ ID NO: 1558064
ugaacucccgaccauaggc

SEQ ID NO: 1558066 - RNA, 19 nt, Artificial Sequence
  Description of Artificial Sequence: Synthetic oligonucleotide
  Sense strand starting at position 3511 of SEQ ID NO: 1245378
gggcuguggcauggugaga

SEQ ID NO: 1558067 - RNA, 19 nt, Artificial Sequence
  Description of Artificial Sequence: Synthetic oligonucleotide
  Antisense strand to SEQ ID NO: 1558066
ucucaccaugccacagccc

SEQ ID NO: 1558068 - RNA, 19 nt, Artificial Sequence
  Description of Artificial Sequence: Synthetic oligonucleotide
  Sense strand starting at position 3579 of SEQ ID NO: 1245378
uuugguuuccucugggaca

SEQ ID NO: 1558069 - RNA, 19 nt, Artificial Sequence
  Description of Artificial Sequence: Synthetic oligonucleotide
  Antisense strand to SEQ ID NO: 1558068
ugucccagaggaaaccaaa

SEQ ID NO: 1558070 - RNA, 19 nt, Artificial Sequence
  Description of Artificial Sequence: Synthetic oligonucleotide
  Sense strand starting at position 3581 of SEQ ID NO: 1245378
ugguuuccucugggacaca

SEQ ID NO: 1558071 - RNA, 19 nt, Artificial Sequence
  Description of Artificial Sequence: Synthetic oligonucleotide
  Antisense strand to SEQ ID NO: 1558070
ugugucccagaggaaacca

SEQ ID NO: 1558072 - RNA, 19 nt, Artificial Sequence
  Description of Artificial Sequence: Synthetic oligonucleotide
  Sense strand starting at position 3602 of SEQ ID NO: 1245378
accauaaggugcuuugaua

SEQ ID NO: 1558073 - RNA, 19 nt, Artificial Sequence
  Description of Artificial Sequence: Synthetic oligonucleotide
  Antisense strand to SEQ ID NO: 1558072
uaucaaagcaccuuauggu

SEQ ID NO: 1558074 - RNA, 19 nt, Artificial Sequence
  Description of Artificial Sequence: Synthetic oligonucleotide
  Sense strand starting at position 3659 of SEQ ID NO: 1245378
agcucacugccagauuaag

SEQ ID NO: 1558075 - RNA, 19 nt, Artificial Sequence
  Description of Artificial Sequence: Synthetic oligonucleotide
  Antisense strand to SEQ ID NO: 1558074
cuuaaucuggcagugagcu

SEQ ID NO: 1558076 - RNA, 19 nt, Artificial Sequence
  Description of Artificial Sequence: Synthetic oligonucleotide
  Sense strand starting at position 3712 of SEQ ID NO: 1245378
uacgaaaugcuuuauugua

SEQ ID NO: 1558077 - RNA, 19 nt, Artificial Sequence
  Description of Artificial Sequence: Synthetic oligonucleotide
  Antisense strand to SEQ ID NO: 1558076
uacaauaaagcauuucgua

SEQ ID NO: 1558078 - RNA, 19 nt, Artificial Sequence
  Description of Artificial Sequence: Synthetic oligonucleotide
  Sense strand starting at position 3714 of SEQ ID NO: 1245378
cgaaaugcuuuauuguaau

SEQ ID NO: 1558079 - RNA, 19 nt, Artificial Sequence
  Description of Artificial Sequence: Synthetic oligonucleotide
  Antisense strand to SEQ ID NO: 1558078
auuacaauaaagcauuucg

SEQ ID NO: 1558080 - RNA, 19 nt, Artificial Sequence
  Description of Artificial Sequence: Synthetic oligonucleotide
  Sense strand starting at position 3739 of SEQ ID NO: 1245378
auuucagguugguaggaua

SEQ ID NO: 1558081 - RNA, 19 nt, Artificial Sequence
  Description of Artificial Sequence: Synthetic oligonucleotide
  Antisense strand to SEQ ID NO: 1558080
uauccuaccaaccugaaau

SEQ ID NO: 1558082 - RNA, 19 nt, Artificial Sequence
  Description of Artificial Sequence: Synthetic oligonucleotide
  Sense strand starting at position 3747 of SEQ ID NO: 1245378
uugguaggauauuagagau

SEQ ID NO: 1558083 - RNA, 19 nt, Artificial Sequence
  Description of Artificial Sequence: Synthetic oligonucleotide
  Antisense strand to SEQ ID NO: 1558082
aucucuaauauccuaccaa

SEQ ID NO: 1558084 - RNA, 19 nt, Artificial Sequence
  Description of Artificial Sequence: Synthetic oligonucleotide
  Sense strand starting at position 3824 of SEQ ID NO: 1245378
gugguuaacagugaggguu

SEQ ID NO: 1558085 - RNA, 19 nt, Artificial Sequence
  Description of Artificial Sequence: Synthetic oligonucleotide
  Antisense strand to SEQ ID NO: 1558084
aacccucacuguuaaccac

SEQ ID NO: 1558086 - RNA, 19 nt, Artificial Sequence
  Description of Artificial Sequence: Synthetic oligonucleotide
  Sense strand starting at position 3869 of SEQ ID NO: 1245378
ucaucugugccuugcauaa

SEQ ID NO: 1558087 - RNA, 19 nt, Artificial Sequence
  Description of Artificial Sequence: Synthetic oligonucleotide
  Antisense strand to SEQ ID NO: 1558086
uuaugcaaggcacagauga

SEQ ID NO: 1558088 - RNA, 19 nt, Artificial Sequence
  Description of Artificial Sequence: Synthetic oligonucleotide
  Sense strand starting at position 3873 of SEQ ID NO: 1245378
cugugccuugcauaaguua

SEQ ID NO: 1558089 - RNA, 19 nt, Artificial Sequence
  Description of Artificial Sequence: Synthetic oligonucleotide
  Antisense strand to SEQ ID NO: 1558088
uaacuuaugcaaggcacag

SEQ ID NO: 1558090 - RNA, 19 nt, Artificial Sequence
  Description of Artificial Sequence: Synthetic oligonucleotide
  Sense strand starting at position 3976 of SEQ ID NO: 1245378
ggagaaaucugagcccuua

SEQ ID NO: 1558091 - RNA, 19 nt, Artificial Sequence
  Description of Artificial Sequence: Synthetic oligonucleotide
  Antisense strand to SEQ ID NO: 1558090
uaagggcucagauuucucc

SEQ ID NO: 1558092 - RNA, 19 nt, Artificial Sequence
  Description of Artificial Sequence: Synthetic oligonucleotide
  Sense strand starting at position 87 of SEQ ID NO: 1245379
cgcaaagugggccagagau

SEQ ID NO: 1558093 - RNA, 19 nt, Artificial Sequence
  Description of Artificial Sequence: Synthetic oligonucleotide
  Antisense strand to SEQ ID NO: 1558092
aucucuggcccacuuugcg

SEQ ID NO: 1558094 - RNA, 19 nt, Artificial Sequence
  Description of Artificial Sequence: Synthetic oligonucleotide
  Sense strand starting at position 276 of SEQ ID NO: 1245379
ugcuaauccugucacaaag

SEQ ID NO: 1558095 - RNA, 19 nt, Artificial Sequence
  Description of Artificial Sequence: Synthetic oligonucleotide
  Antisense strand to SEQ ID NO: 1558094
cuuugugacaggauuagca

SEQ ID NO: 1558096 - RNA, 19 nt, Artificial Sequence
  Description of Artificial Sequence: Synthetic oligonucleotide
  Sense strand starting at position 313 of SEQ ID NO: 1245379
gcaugugucccaggaacaa

SEQ ID NO: 1558097 - RNA, 19 nt, Artificial Sequence
  Description of Artificial Sequence: Synthetic oligonucleotide
  Antisense strand to SEQ ID NO: 1558096
uuguuccugggacacaugc

SEQ ID NO: 1558098 - RNA, 19 nt, Artificial Sequence
  Description of Artificial Sequence: Synthetic oligonucleotide
  Sense strand starting at position 350 of SEQ ID NO: 1245379
ugucgagccacagagaaau

SEQ ID NO: 1558099 - RNA, 19 nt, Artificial Sequence
  Description of Artificial Sequence: Synthetic oligonucleotide
  Antisense strand to SEQ ID NO: 1558098
auuucucuguggcucgaca

SEQ ID NO: 1558100 - RNA, 19 nt, Artificial Sequence
  Description of Artificial Sequence: Synthetic oligonucleotide
  Sense strand starting at position 356 of SEQ ID NO: 1245379
gccacagagaaaugaaagu

SEQ ID NO: 1558101 - RNA, 19 nt, Artificial Sequence
  Description of Artificial Sequence: Synthetic oligonucleotide
  Antisense strand to SEQ ID NO: 1558100
acuuucauuucucuguggc

SEQ ID NO: 1558102 - RNA, 19 nt, Artificial Sequence
  Description of Artificial Sequence: Synthetic oligonucleotide
  Sense strand starting at position 478 of SEQ ID NO: 1245379
agaauugccuacuaagcau

SEQ ID NO: 1558103 - RNA, 19 nt, Artificial Sequence
  Description of Artificial Sequence: Synthetic oligonucleotide
  Antisense strand to SEQ ID NO: 1558102
augcuuaguaggcaauucu

SEQ ID NO: 1558104 - RNA, 19 nt, Artificial Sequence
  Description of Artificial Sequence: Synthetic oligonucleotide
  Sense strand starting at position 523 of SEQ ID NO: 1245379
gaagcuauaugagaaguaa

SEQ ID NO: 1558105 - RNA, 19 nt, Artificial Sequence
  Description of Artificial Sequence: Synthetic oligonucleotide
  Antisense strand to SEQ ID NO: 1558104
uuacuucucauauagcuuc

SEQ ID NO: 1558106 - RNA, 19 nt, Artificial Sequence
  Description of Artificial Sequence: Synthetic oligonucleotide
  Sense strand starting at position 534 of SEQ ID NO: 1245379
agaaguaacuugcucaaug

SEQ ID NO: 1558107 - RNA, 19 nt, Artificial Sequence
  Description of Artificial Sequence: Synthetic oligonucleotide
  Antisense strand to SEQ ID NO: 1558106
cauugagcaaguuacuucu

SEQ ID NO: 1558108 - RNA, 19 nt, Artificial Sequence
  Description of Artificial Sequence: Synthetic oligonucleotide
  Sense strand starting at position 546 of SEQ ID NO: 1245379
cucaaugucuaagcagaaa

SEQ ID NO: 1558109 - RNA, 19 nt, Artificial Sequence
  Description of Artificial Sequence: Synthetic oligonucleotide
  Antisense strand to SEQ ID NO: 1558108
uuucugcuuagacauugag

SEQ ID NO: 1558110 - RNA, 19 nt, Artificial Sequence
  Description of Artificial Sequence: Synthetic oligonucleotide
  Sense strand starting at position 557 of SEQ ID NO: 1245379
agcagaaagguggguuaaa

SEQ ID NO: 1558111 - RNA, 19 nt, Artificial Sequence
  Description of Artificial Sequence: Synthetic oligonucleotide
  Antisense strand to SEQ ID NO: 1558110
uuuaacccaccuuucugcu

SEQ ID NO: 1558112 - RNA, 19 nt, Artificial Sequence
  Description of Artificial Sequence: Synthetic oligonucleotide
  Sense strand starting at position 575 of SEQ ID NO: 1245379
aaaugaggucuauggcuca

SEQ ID NO: 1558113 - RNA, 19 nt, Artificial Sequence
  Description of Artificial Sequence: Synthetic oligonucleotide
  Antisense strand to SEQ ID NO: 1558112
ugagccauagaccucauuu

SEQ ID NO: 1558114 - RNA, 19 nt, Artificial Sequence
  Description of Artificial Sequence: Synthetic oligonucleotide
  Sense strand starting at position 580 of SEQ ID NO: 1245379
aggucuauggcucaucaaa

SEQ ID NO: 1558115 - RNA, 19 nt, Artificial Sequence
  Description of Artificial Sequence: Synthetic oligonucleotide
  Antisense strand to SEQ ID NO: 1558114
uuugaugagccauagaccu

SEQ ID NO: 1558116 - RNA, 19 nt, Artificial Sequence
  Description of Artificial Sequence: Synthetic oligonucleotide
  Sense strand starting at position 626 of SEQ ID NO: 1245379
guggaucccucuccucaga

SEQ ID NO: 1558117 - RNA, 19 nt, Artificial Sequence
  Description of Artificial Sequence: Synthetic oligonucleotide
  Antisense strand to SEQ ID NO: 1558116
ucugaggagagggauccac

SEQ ID NO: 1558118 - RNA, 19 nt, Artificial Sequence
  Description of Artificial Sequence: Synthetic oligonucleotide
  Sense strand starting at position 628 of SEQ ID NO: 1245379
ggaucccucuccucagaca

SEQ ID NO: 1558119 - RNA, 19 nt, Artificial Sequence
  Description of Artificial Sequence: Synthetic oligonucleotide
  Antisense strand to SEQ ID NO: 1558118
ugucugaggagagggaucc

SEQ ID NO: 1558120 - RNA, 19 nt, Artificial Sequence
  Description of Artificial Sequence: Synthetic oligonucleotide
  Sense strand starting at position 687 of SEQ ID NO: 1245379
ugcuauguauucgucucua

SEQ ID NO: 1558121 - RNA, 19 nt, Artificial Sequence
  Description of Artificial Sequence: Synthetic oligonucleotide
  Antisense strand to SEQ ID NO: 1558120
uagagacgaauacauagca

SEQ ID NO: 1558122 - RNA, 19 nt, Artificial Sequence
  Description of Artificial Sequence: Synthetic oligonucleotide
  Sense strand starting at position 691 of SEQ ID NO: 1245379
auguauucgucucuagaug

SEQ ID NO: 1558123 - RNA, 19 nt, Artificial Sequence
  Description of Artificial Sequence: Synthetic oligonucleotide
  Antisense strand to SEQ ID NO: 1558122
caucuagagacgaauacau

SEQ ID NO: 1558124 - RNA, 19 nt, Artificial Sequence
  Description of Artificial Sequence: Synthetic oligonucleotide
  Sense strand starting at position 815 of SEQ ID NO: 1245379
ccauuuaucugagcgguca

SEQ ID NO: 1558125 - RNA, 19 nt, Artificial Sequence
  Description of Artificial Sequence: Synthetic oligonucleotide
  Antisense strand to SEQ ID NO: 1558124
ugaccgcucagauaaaugg

SEQ ID NO: 1558126 - RNA, 19 nt, Artificial Sequence
  Description of Artificial Sequence: Synthetic oligonucleotide
  Sense strand starting at position 816 of SEQ ID NO: 1245379
cauuuaucugagcggucaa

SEQ ID NO: 1558127 - RNA, 19 nt, Artificial Sequence
  Description of Artificial Sequence: Synthetic oligonucleotide
  Antisense strand to SEQ ID NO: 1558126
uugaccgcucagauaaaug

SEQ ID NO: 1558128 - RNA, 19 nt, Artificial Sequence
  Description of Artificial Sequence: Synthetic oligonucleotide
  Sense strand starting at position 1494 of SEQ ID NO: 1245379
uccguuucggcgucuguaa

SEQ ID NO: 1558129 - RNA, 19 nt, Artificial Sequence
  Description of Artificial Sequence: Synthetic oligonucleotide
  Antisense strand to SEQ ID NO: 1558128
uuacagacgccgaaacgga

SEQ ID NO: 1558130 - RNA, 19 nt, Artificial Sequence
  Description of Artificial Sequence: Synthetic oligonucleotide
  Sense strand starting at position 1546 of SEQ ID NO: 1245379
gauugagguuaggacuaaa

SEQ ID NO: 1558131 - RNA, 19 nt, Artificial Sequence
  Description of Artificial Sequence: Synthetic oligonucleotide
  Antisense strand to SEQ ID NO: 1558130
uuuaguccuaaccucaauc

SEQ ID NO: 1558132 - RNA, 19 nt, Artificial Sequence
  Description of Artificial Sequence: Synthetic oligonucleotide
  Sense strand starting at position 2114 of SEQ ID NO: 1245379
agcugagagucuuaggaaa

SEQ ID NO: 1558133 - RNA, 19 nt, Artificial Sequence
  Description of Artificial Sequence: Synthetic oligonucleotide
  Antisense strand to SEQ ID NO: 1558132
uuuccuaagacucucagcu

SEQ ID NO: 1558134 - RNA, 19 nt, Artificial Sequence
  Description of Artificial Sequence: Synthetic oligonucleotide
  Sense strand starting at position 2268 of SEQ ID NO: 1245379
ugagaucuguuuccuacaa

SEQ ID NO: 1558135 - RNA, 19 nt, Artificial Sequence
  Description of Artificial Sequence: Synthetic oligonucleotide
  Antisense strand to SEQ ID NO: 1558134
uuguaggaaacagaucuca

SEQ ID NO: 1558136 - RNA, 19 nt, Artificial Sequence
  Description of Artificial Sequence: Synthetic oligonucleotide
  Sense strand starting at position 2309 of SEQ ID NO: 1245379
auuucuucguucucacuga

SEQ ID NO: 1558137 - RNA, 19 nt, Artificial Sequence
  Description of Artificial Sequence: Synthetic oligonucleotide
  Antisense strand to SEQ ID NO: 1558136
ucagugagaacgaagaaau

SEQ ID NO: 1558138 - RNA, 19 nt, Artificial Sequence
  Description of Artificial Sequence: Synthetic oligonucleotide
  Sense strand starting at position 2313 of SEQ ID NO: 1245379
cuucguucucacugaagca

SEQ ID NO: 1558139 - RNA, 19 nt, Artificial Sequence
  Description of Artificial Sequence: Synthetic oligonucleotide
  Antisense strand to SEQ ID NO: 1558138
ugcuucagugagaacgaag

SEQ ID NO: 1558140 - RNA, 19 nt, Artificial Sequence
  Description of Artificial Sequence: Synthetic oligonucleotide
  Sense strand starting at position 2593 of SEQ ID NO: 1245379
gagccaagauccgaccauu

SEQ ID NO: 1558141 - RNA, 19 nt, Artificial Sequence
  Description of Artificial Sequence: Synthetic oligonucleotide
  Antisense strand to SEQ ID NO: 1558140
aauggucggaucuuggcuc

SEQ ID NO: 1558142 - RNA, 19 nt, Artificial Sequence
  Description of Artificial Sequence: Synthetic oligonucleotide
  Sense strand starting at position 2596 of SEQ ID NO: 1245379
ccaagauccgaccauugua

SEQ ID NO: 1558143 - RNA, 19 nt, Artificial Sequence
  Description of Artificial Sequence: Synthetic oligonucleotide
  Antisense strand to SEQ ID NO: 1558142
uacaauggucggaucuugg

SEQ ID NO: 1558144 - RNA, 19 nt, Artificial Sequence
  Description of Artificial Sequence: Synthetic oligonucleotide
  Sense strand starting at position 3157 of SEQ ID NO: 1245379
ugaccaauggccggugaua

SEQ ID NO: 1558145 - RNA, 19 nt, Artificial Sequence
  Description of Artificial Sequence: Synthetic oligonucleotide
  Antisense strand to SEQ ID NO: 1558144
uaucaccggccauugguca

SEQ ID NO: 1558146 - RNA, 19 nt, Artificial Sequence
  Description of Artificial Sequence: Synthetic oligonucleotide
  Sense strand starting at position 3159 of SEQ ID NO: 1245379
accaauggccggugauaga

SEQ ID NO: 1558147 - RNA, 19 nt, Artificial Sequence
  Description of Artificial Sequence: Synthetic oligonucleotide
  Antisense strand to SEQ ID NO: 1558146
ucuaucaccggccauuggu

SEQ ID NO: 1558148 - RNA, 19 nt, Artificial Sequence
  Description of Artificial Sequence: Synthetic oligonucleotide
  Sense strand starting at position 3245 of SEQ ID NO: 1245379
gguugaaagaauuguuauc

SEQ ID NO: 1558149 - RNA, 19 nt, Artificial Sequence
  Description of Artificial Sequence: Synthetic oligonucleotide
  Antisense strand to SEQ ID NO: 1558148
gauaacaauucuuucaacc

SEQ ID NO: 1558150 - RNA, 19 nt, Artificial Sequence
  Description of Artificial Sequence: Synthetic oligonucleotide
  Sense strand starting at position 3493 of SEQ ID NO: 1245379
gcggagguugcuugcagua

SEQ ID NO: 1558151 - RNA, 19 nt, Artificial Sequence
  Description of Artificial Sequence: Synthetic oligonucleotide
  Antisense strand to SEQ ID NO: 1558150
uacugcaagcaaccuccgc

SEQ ID NO: 1558152 - RNA, 19 nt, Artificial Sequence
  Description of Artificial Sequence: Synthetic oligonucleotide
  Sense strand starting at position 3502 of SEQ ID NO: 1245379
gcuugcaguagcugagaaa

SEQ ID NO: 1558153 - RNA, 19 nt, Artificial Sequence
  Description of Artificial Sequence: Synthetic oligonucleotide
  Antisense strand to SEQ ID NO: 1558152
uuucucagcuacugcaagc

SEQ ID NO: 1558154 - RNA, 19 nt, Artificial Sequence
  Description of Artificial Sequence: Synthetic oligonucleotide
  Sense strand starting at position 3663 of SEQ ID NO: 1245379
gcaggcuuuagagagauag

SEQ ID NO: 1558155 - RNA, 19 nt, Artificial Sequence
  Description of Artificial Sequence: Synthetic oligonucleotide
  Antisense strand to SEQ ID NO: 1558154
cuaucucucuaaagccugc

SEQ ID NO: 1558156 - RNA, 19 nt, Artificial Sequence
  Description of Artificial Sequence: Synthetic oligonucleotide
  Sense strand starting at position 3674 of SEQ ID NO: 1245379
agagauagauuguaaaugu

SEQ ID NO: 1558157 - RNA, 19 nt, Artificial Sequence
  Description of Artificial Sequence: Synthetic oligonucleotide
  Antisense strand to SEQ ID NO: 1558156
acauuuacaaucuaucucu

SEQ ID NO: 1558158 - RNA, 19 nt, Artificial Sequence
  Description of Artificial Sequence: Synthetic oligonucleotide
  Sense strand starting at position 3706 of SEQ ID NO: 1245379
uaaagaguguguucuaccu

SEQ ID NO: 1558159 - RNA, 19 nt, Artificial Sequence
  Description of Artificial Sequence: Synthetic oligonucleotide
  Antisense strand to SEQ ID NO: 1558158
agguagaacacacucuuua

SEQ ID NO: 1558160 - RNA, 19 nt, Artificial Sequence
  Description of Artificial Sequence: Synthetic oligonucleotide
  Sense strand starting at position 3712 of SEQ ID NO: 1245379
guguguucuaccugucuug

SEQ ID NO: 1558161 - RNA, 19 nt, Artificial Sequence
  Description of Artificial Sequence: Synthetic oligonucleotide
  Antisense strand to SEQ ID NO: 1558160
caagacagguagaacacac

SEQ ID NO: 1558162 - RNA, 19 nt, Artificial Sequence
  Description of Artificial Sequence: Synthetic oligonucleotide
  Sense strand starting at position 3726 of SEQ ID NO: 1245379
ucuugaggccuguguugau

SEQ ID NO: 1558163 - RNA, 19 nt, Artificial Sequence
  Description of Artificial Sequence: Synthetic oligonucleotide
  Antisense strand to SEQ ID NO: 1558162
aucaacacaggccucaaga

SEQ ID NO: 1558164 - RNA, 19 nt, Artificial Sequence
  Description of Artificial Sequence: Synthetic oligonucleotide
  Sense strand starting at position 3857 of SEQ ID NO: 1245379
gccuuugacccagaggagu

SEQ ID NO: 1558165 - RNA, 19 nt, Artificial Sequence
  Description of Artificial Sequence: Synthetic oligonucleotide
  Antisense strand to SEQ ID NO: 1558164
acuccucugggucaaaggc

SEQ ID NO: 1558166 - RNA, 19 nt, Artificial Sequence
  Description of Artificial Sequence: Synthetic oligonucleotide
  Sense strand starting at position 3885 of SEQ ID NO: 1245379
agaugguucugggcguaga

SEQ ID NO: 1558167 - RNA, 19 nt, Artificial Sequence
  Description of Artificial Sequence: Synthetic oligonucleotide
  Antisense strand to SEQ ID NO: 1558166
ucuacgcccagaaccaucu

SEQ ID NO: 1558168 - RNA, 19 nt, Artificial Sequence
  Description of Artificial Sequence: Synthetic oligonucleotide
  Sense strand starting at position 3886 of SEQ ID NO: 1245379
gaugguucugggcguagaa

SEQ ID NO: 1558169 - RNA, 19 nt, Artificial Sequence
  Description of Artificial Sequence: Synthetic oligonucleotide
  Antisense strand to SEQ ID NO: 1558168
uucuacgcccagaaccauc

SEQ ID NO: 1558170 - RNA, 19 nt, Artificial Sequence
  Description of Artificial Sequence: Synthetic oligonucleotide
  Sense strand starting at position 3888 of SEQ ID NO: 1245379
ugguucugggcguagaauu

SEQ ID NO: 1558171 - RNA, 19 nt, Artificial Sequence
  Description of Artificial Sequence: Synthetic oligonucleotide
  Antisense strand to SEQ ID NO: 1558170
aauucuacgcccagaacca

SEQ ID NO: 1558172 - RNA, 19 nt, Artificial Sequence
  Description of Artificial Sequence: Synthetic oligonucleotide
  Sense strand starting at position 217 of SEQ ID NO: 1245380
ugggaaauguggucuauua

SEQ ID NO: 1558173 - RNA, 19 nt, Artificial Sequence
  Description of Artificial Sequence: Synthetic oligonucleotide
  Antisense strand to SEQ ID NO: 1558172
uaauagaccacauuuccca

SEQ ID NO: 1558174 - RNA, 19 nt, Artificial Sequence
  Description of Artificial Sequence: Synthetic oligonucleotide
  Sense strand starting at position 649 of SEQ ID NO: 1245380
aguacaauggucggaucuu

SEQ ID NO: 1558175 - RNA, 19 nt, Artificial Sequence
  Description of Artificial Sequence: Synthetic oligonucleotide
  Antisense strand to SEQ ID NO: 1558174
aagauccgaccauuguacu

SEQ ID NO: 1558176 - RNA, 19 nt, Artificial Sequence
  Description of Artificial Sequence: Synthetic oligonucleotide
  Sense strand starting at position 929 of SEQ ID NO: 1245380
ucgguugcuucagugagaa

SEQ ID NO: 1558177 - RNA, 19 nt, Artificial Sequence
  Description of Artificial Sequence: Synthetic oligonucleotide
  Antisense strand to SEQ ID NO: 1558176
uucucacugaagcaaccga

SEQ ID NO: 1558178 - RNA, 19 nt, Artificial Sequence
  Description of Artificial Sequence: Synthetic oligonucleotide
  Sense strand starting at position 970 of SEQ ID NO: 1245380
ccuuauuaguuguaggaaa

SEQ ID NO: 1558179 - RNA, 19 nt, Artificial Sequence
  Description of Artificial Sequence: Synthetic oligonucleotide
  Antisense strand to SEQ ID NO: 1558178
uuuccuacaacuaauaagg

SEQ ID NO: 1558180 - RNA, 19 nt, Artificial Sequence
  Description of Artificial Sequence: Synthetic oligonucleotide
  Sense strand starting at position 972 of SEQ ID NO: 1245380
uuauuaguuguaggaaaca

SEQ ID NO: 1558181 - RNA, 19 nt, Artificial Sequence
  Description of Artificial Sequence: Synthetic oligonucleotide
  Antisense strand to SEQ ID NO: 1558180
uguuuccuacaacuaauaa

SEQ ID NO: 1558182 - RNA, 19 nt, Artificial Sequence
  Description of Artificial Sequence: Synthetic oligonucleotide
  Sense strand starting at position 1711 of SEQ ID NO: 1245380
accucaauccugcgaggga

SEQ ID NO: 1558183 - RNA, 19 nt, Artificial Sequence
  Description of Artificial Sequence: Synthetic oligonucleotide
  Antisense strand to SEQ ID NO: 1558182
ucccucgcaggauugaggu

SEQ ID NO: 1558184 - RNA, 19 nt, Artificial Sequence
  Description of Artificial Sequence: Synthetic oligonucleotide
  Sense strand starting at position 1901 of SEQ ID NO: 1245380
gcgucaucgggcagcguuu

SEQ ID NO: 1558185 - RNA, 19 nt, Artificial Sequence
  Description of Artificial Sequence: Synthetic oligonucleotide
  Antisense strand to SEQ ID NO: 1558184
aaacgcugcccgaugacgc

SEQ ID NO: 1558186 - RNA, 19 nt, Artificial Sequence
  Description of Artificial Sequence: Synthetic oligonucleotide
  Sense strand starting at position 2185 of SEQ ID NO: 1245380
cgggaguucgaguauaagu

SEQ ID NO: 1558187 - RNA, 19 nt, Artificial Sequence
  Description of Artificial Sequence: Synthetic oligonucleotide
  Antisense strand to SEQ ID NO: 1558186
acuuauacucgaacucccg

SEQ ID NO: 1558188 - RNA, 19 nt, Artificial Sequence
  Description of Artificial Sequence: Synthetic oligonucleotide
  Sense strand starting at position 2187 of SEQ ID NO: 1245380
ggaguucgaguauaaguuc

SEQ ID NO: 1558189 - RNA, 19 nt, Artificial Sequence
  Description of Artificial Sequence: Synthetic oligonucleotide
  Antisense strand to SEQ ID NO: 1558188
gaacuuauacucgaacucc

SEQ ID NO: 1558190 - RNA, 19 nt, Artificial Sequence
  Description of Artificial Sequence: Synthetic oligonucleotide
  Sense strand starting at position 2190 of SEQ ID NO: 1245380
guucgaguauaaguucuua

SEQ ID NO: 1558191 - RNA, 19 nt, Artificial Sequence
  Description of Artificial Sequence: Synthetic oligonucleotide
  Antisense strand to SEQ ID NO: 1558190
uaagaacuuauacucgaac

SEQ ID NO: 1558192 - RNA, 19 nt, Artificial Sequence
  Description of Artificial Sequence: Synthetic oligonucleotide
  Sense strand starting at position 2254 of SEQ ID NO: 1245380
aaaugucucgcgggucauu

SEQ ID NO: 1558193 - RNA, 19 nt, Artificial Sequence
  Description of Artificial Sequence: Synthetic oligonucleotide
  Antisense strand to SEQ ID NO: 1558192
aaugacccgcgagacauuu

SEQ ID NO: 1558194 - RNA, 19 nt, Artificial Sequence
  Description of Artificial Sequence: Synthetic oligonucleotide
  Sense strand starting at position 2587 of SEQ ID NO: 1245380
ggcugauuggcgugggaca

SEQ ID NO: 1558195 - RNA, 19 nt, Artificial Sequence
  Description of Artificial Sequence: Synthetic oligonucleotide
  Antisense strand to SEQ ID NO: 1558194
ugucccacgccaaucagcc

SEQ ID NO: 1558196 - RNA, 19 nt, Artificial Sequence
  Description of Artificial Sequence: Synthetic oligonucleotide
  Sense strand starting at position 2667 of SEQ ID NO: 1245380
uuugaugagccauagaccu

SEQ ID NO: 1558197 - RNA, 19 nt, Artificial Sequence
  Description of Artificial Sequence: Synthetic oligonucleotide
  Antisense strand to SEQ ID NO: 1558196
aggucuauggcucaucaaa

SEQ ID NO: 1558198 - RNA, 19 nt, Artificial Sequence
  Description of Artificial Sequence: Synthetic oligonucleotide
  Sense strand starting at position 2704 of SEQ ID NO: 1245380
cugcuuagacauugagcaa

SEQ ID NO: 1558199 - RNA, 19 nt, Artificial Sequence
  Description of Artificial Sequence: Synthetic oligonucleotide
  Antisense strand to SEQ ID NO: 1558198
uugcucaaugucuaagcag

SEQ ID NO: 1558200 - RNA, 19 nt, Artificial Sequence
  Description of Artificial Sequence: Synthetic oligonucleotide
  Sense strand starting at position 2707 of SEQ ID NO: 1245380
cuuagacauugagcaaguu

SEQ ID NO: 1558201 - RNA, 19 nt, Artificial Sequence
  Description of Artificial Sequence: Synthetic oligonucleotide
  Antisense strand to SEQ ID NO: 1558200
aacuugcucaaugucuaag

SEQ ID NO: 1558202 - RNA, 19 nt, Artificial Sequence
  Description of Artificial Sequence: Synthetic oligonucleotide
  Sense strand starting at position 2708 of SEQ ID NO: 1245380
uuagacauugagcaaguua

SEQ ID NO: 1558203 - RNA, 19 nt, Artificial Sequence
  Description of Artificial Sequence: Synthetic oligonucleotide
  Antisense strand to SEQ ID NO: 1558202
uaacuugcucaaugucuaa

SEQ ID NO: 1558204 - RNA, 19 nt, Artificial Sequence
  Description of Artificial Sequence: Synthetic oligonucleotide
  Sense strand starting at position 2716 of SEQ ID NO: 1245380
ugagcaaguuacuucucau

SEQ ID NO: 1558205 - RNA, 19 nt, Artificial Sequence
  Description of Artificial Sequence: Synthetic oligonucleotide
  Antisense strand to SEQ ID NO: 1558204
augagaaguaacuugcuca

SEQ ID NO: 1558206 - RNA, 19 nt, Artificial Sequence
  Description of Artificial Sequence: Synthetic oligonucleotide
  Sense strand starting at position 2735 of SEQ ID NO: 1245380
auagcuucccuauauguua

SEQ ID NO: 1558207 - RNA, 19 nt, Artificial Sequence
  Description of Artificial Sequence: Synthetic oligonucleotide
  Antisense strand to SEQ ID NO: 1558206
uaacauauagggaagcuau

SEQ ID NO: 1558208 - RNA, 19 nt, Artificial Sequence
  Description of Artificial Sequence: Synthetic oligonucleotide
  Sense strand starting at position 2811 of SEQ ID NO: 1245380
aucucucuguugucugaau

SEQ ID NO: 1558209 - RNA, 19 nt, Artificial Sequence
  Description of Artificial Sequence: Synthetic oligonucleotide
  Antisense strand to SEQ ID NO: 1558208
auucagacaacagagagau

SEQ ID NO: 1558210 - RNA, 19 nt, Artificial Sequence
  Description of Artificial Sequence: Synthetic oligonucleotide
  Sense strand starting at position 2812 of SEQ ID NO: 1245380
ucucucuguugucugaaua

SEQ ID NO: 1558211 - RNA, 19 nt, Artificial Sequence
  Description of Artificial Sequence: Synthetic oligonucleotide
  Antisense strand to SEQ ID NO: 1558210
uauucagacaacagagaga

SEQ ID NO: 1558212 - RNA, 19 nt, Artificial Sequence
  Description of Artificial Sequence: Synthetic oligonucleotide
  Sense strand starting at position 2813 of SEQ ID NO: 1245380
cucucuguugucugaauau

SEQ ID NO: 1558213 - RNA, 19 nt, Artificial Sequence
  Description of Artificial Sequence: Synthetic oligonucleotide
  Antisense strand to SEQ ID NO: 1558212
auauucagacaacagagag

SEQ ID NO: 1558214 - RNA, 19 nt, Artificial Sequence
  Description of Artificial Sequence: Synthetic oligonucleotide
  Sense strand starting at position 2942 of SEQ ID NO: 1245380
gggacacaugcuugguguu

SEQ ID NO: 1558215 - RNA, 19 nt, Artificial Sequence
  Description of Artificial Sequence: Synthetic oligonucleotide
  Antisense strand to SEQ ID NO: 1558214
aacaccaagcauguguccc

SEQ ID NO: 1558216 - RNA, 19 nt, Artificial Sequence
  Description of Artificial Sequence: Synthetic oligonucleotide
  Sense strand starting at position 2967 of SEQ ID NO: 1245380
acaccuuugugacaggauu

SEQ ID NO: 1558217 - RNA, 19 nt, Artificial Sequence
  Description of Artificial Sequence: Synthetic oligonucleotide
  Antisense strand to SEQ ID NO: 1558216
aauccugucacaaaggugu

SEQ ID NO: 1558218 - RNA, 19 nt, Artificial Sequence
  Description of Artificial Sequence: Synthetic oligonucleotide
  Sense strand starting at position 3050 of SEQ ID NO: 1245380
ccaucucacuguguggaau

SEQ ID NO: 1558219 - RNA, 19 nt, Artificial Sequence
  Description of Artificial Sequence: Synthetic oligonucleotide
  Antisense strand to SEQ ID NO: 1558218
auuccacacagugagaugg

SEQ ID NO: 1558220 - RNA, 19 nt, Artificial Sequence
  Description of Artificial Sequence: Synthetic oligonucleotide
  Sense strand starting at position 3051 of SEQ ID NO: 1245380
caucucacuguguggaauu

SEQ ID NO: 1558221 - RNA, 19 nt, Artificial Sequence
  Description of Artificial Sequence: Synthetic oligonucleotide
  Antisense strand to SEQ ID NO: 1558220
aauuccacacagugagaug

SEQ ID NO: 1558222 - RNA, 19 nt, Artificial Sequence
  Description of Artificial Sequence: Synthetic oligonucleotide
  Sense strand starting at position 3062 of SEQ ID NO: 1245380
guggaauuccuguguccac

SEQ ID NO: 1558223 - RNA, 19 nt, Artificial Sequence
  Description of Artificial Sequence: Synthetic oligonucleotide
  Antisense strand to SEQ ID NO: 1558222
guggacacaggaauuccac

SEQ ID NO: 1558224 - RNA, 19 nt, Artificial Sequence
  Description of Artificial Sequence: Synthetic oligonucleotide
  Sense strand starting at position 3063 of SEQ ID NO: 1245380
uggaauuccuguguccacu

SEQ ID NO: 1558225 - RNA, 19 nt, Artificial Sequence
  Description of Artificial Sequence: Synthetic oligonucleotide
  Antisense strand to SEQ ID NO: 1558224
aguggacacaggaauucca

SEQ ID NO: 1558226 - RNA, 19 nt, Artificial Sequence
  Description of Artificial Sequence: Synthetic oligonucleotide
  Sense strand starting at position 3099 of SEQ ID NO: 1245380
agugcugucucagccugaa

SEQ ID NO: 1558227 - RNA, 19 nt, Artificial Sequence
  Description of Artificial Sequence: Synthetic oligonucleotide
  Antisense strand to SEQ ID NO: 1558226
uucaggcugagacagcacu

SEQ ID NO: 1558228 - RNA, 19 nt, Artificial Sequence
  Description of Artificial Sequence: Synthetic oligonucleotide
  Sense strand starting at position 3156 of SEQ ID NO: 1245380
cgugaucucuggcccacuu

SEQ ID NO: 1558229 - RNA, 19 nt, Artificial Sequence
  Description of Artificial Sequence: Synthetic oligonucleotide
  Antisense strand to SEQ ID NO: 1558228
aagugggccagagaucacg

SEQ ID NO: 1558230 - RNA, 19 nt, Artificial Sequence
  Description of Artificial Sequence: Synthetic oligonucleotide
  Sense strand starting at position 3255 of SEQ ID NO: 1245380
ugaucugucuucccaucuu

SEQ ID NO: 1558231 - RNA, 19 nt, Artificial Sequence
  Description of Artificial Sequence: Synthetic oligonucleotide
  Antisense strand to SEQ ID NO: 1558230
aagaugggaagacagauca

SEQ ID NO: 1558232 - RNA, 19 nt, Artificial Sequence
  Description of Artificial Sequence: Synthetic oligonucleotide
  Sense strand starting at position 3271 of SEQ ID NO: 1245380
cuugaaaccguauggcaaa

SEQ ID NO: 1558233 - RNA, 19 nt, Artificial Sequence
  Description of Artificial Sequence: Synthetic oligonucleotide
  Antisense strand to SEQ ID NO: 1558232
uuugccauacgguuucaag

SEQ ID NO: 1558234 - RNA, 19 nt, Artificial Sequence
  Description of Artificial Sequence: Synthetic oligonucleotide
  Sense strand starting at position 3362 of SEQ ID NO: 1245380
gugguuuaucaagguaaag

SEQ ID NO: 1558235 - RNA, 19 nt, Artificial Sequence
  Description of Artificial Sequence: Synthetic oligonucleotide
  Antisense strand to SEQ ID NO: 1558234
cuuuaccuugauaaaccac

SEQ ID NO: 1558236 - RNA, 19 nt, Artificial Sequence
  Description of Artificial Sequence: Synthetic oligonucleotide
  Sense strand starting at position 3376 of SEQ ID NO: 1245380
uaaagaagucgcugcuauu

SEQ ID NO: 1558237 - RNA, 19 nt, Artificial Sequence
  Description of Artificial Sequence: Synthetic oligonucleotide
  Antisense strand to SEQ ID NO: 1558236
aauagcagcgacuucuuua

SEQ ID NO: 1558238 - RNA, 19 nt, Artificial Sequence
  Description of Artificial Sequence: Synthetic oligonucleotide
  Sense strand starting at position 3389 of SEQ ID NO: 1245380
gcuauuagaagucaguagu

SEQ ID NO: 1558239 - RNA, 19 nt, Artificial Sequence
  Description of Artificial Sequence: Synthetic oligonucleotide
  Antisense strand to SEQ ID NO: 1558238
acuacugacuucuaauagc

SEQ ID NO: 1558240 - RNA, 19 nt, Artificial Sequence
  Description of Artificial Sequence: Synthetic oligonucleotide
  Sense strand starting at position 3400 of SEQ ID NO: 1245380
ucaguagucuguucucaac

SEQ ID NO: 1558241 - RNA, 19 nt, Artificial Sequence
  Description of Artificial Sequence: Synthetic oligonucleotide
  Antisense strand to SEQ ID NO: 1558240
guugagaacagacuacuga

SEQ ID NO: 1558242 - RNA, 19 nt, Artificial Sequence
  Description of Artificial Sequence: Synthetic oligonucleotide
  Sense strand starting at position 3638 of SEQ ID NO: 1245380
gcaugagaauugcucacga

SEQ ID NO: 1558243 - RNA, 19 nt, Artificial Sequence
  Description of Artificial Sequence: Synthetic oligonucleotide
  Antisense strand to SEQ ID NO: 1558242
ucgugagcaauucucaugc

SEQ ID NO: 1558244 - RNA, 19 nt, Artificial Sequence
  Description of Artificial Sequence: Synthetic oligonucleotide
  Sense strand starting at position 3819 of SEQ ID NO: 1245380
guccuuaugguguccguuu

SEQ ID NO: 1558245 - RNA, 19 nt, Artificial Sequence
  Description of Artificial Sequence: Synthetic oligonucleotide
  Antisense strand to SEQ ID NO: 1558244
aaacggacaccauaaggac

SEQ ID NO: 1558246 - RNA, 19 nt, Artificial Sequence
  Description of Artificial Sequence: Synthetic oligonucleotide
  Sense strand starting at position 3875 of SEQ ID NO: 1245380
ccugcuguucuugugaguu

SEQ ID NO: 1558247 - RNA, 19 nt, Artificial Sequence
  Description of Artificial Sequence: Synthetic oligonucleotide
  Antisense strand to SEQ ID NO: 1558246
aacucacaagaacagcagg

SEQ ID NO: 1558248 - RNA, 19 nt, Artificial Sequence
  Description of Artificial Sequence: Synthetic oligonucleotide
  Sense strand starting at position 3944 of SEQ ID NO: 1245380
uuggcuucuuccuuugagu

SEQ ID NO: 1558249 - RNA, 19 nt, Artificial Sequence
  Description of Artificial Sequence: Synthetic oligonucleotide
  Antisense strand to SEQ ID NO: 1558248
acucaaaggaagaagccaa

SEQ ID NO: 1558250 - RNA, 19 nt, Artificial Sequence
  Description of Artificial Sequence: Synthetic oligonucleotide
  Sense strand starting at position 3946 of SEQ ID NO: 1245380
ggcuucuuccuuugagucu

SEQ ID NO: 1558251 - RNA, 19 nt, Artificial Sequence
  Description of Artificial Sequence: Synthetic oligonucleotide
  Antisense strand to SEQ ID NO: 1558250
agacucaaaggaagaagcc

SEQ ID NO: 1558252 - RNA, 19 nt, Artificial Sequence
  Description of Artificial Sequence: Synthetic oligonucleotide
  Sense strand starting at position 454 of SEQ ID NO: 1245381
gcgcucagacuagauacuu

SEQ ID NO: 1558253 - RNA, 19 nt, Artificial Sequence
  Description of Artificial Sequence: Synthetic oligonucleotide
  Antisense strand to SEQ ID NO: 1558252
aaguaucuagucugagcgc

SEQ ID NO: 1558254 - RNA, 19 nt, Artificial Sequence
  Description of Artificial Sequence: Synthetic oligonucleotide
  Sense strand starting at position 591 of SEQ ID NO: 1245381
uuagaaaucuacuugaguu

SEQ ID NO: 1558255 - RNA, 19 nt, Artificial Sequence
  Description of Artificial Sequence: Synthetic oligonucleotide
  Antisense strand to SEQ ID NO: 1558254
aacucaaguagauuucuaa

SEQ ID NO: 1558256 - RNA, 19 nt, Artificial Sequence
  Description of Artificial Sequence: Synthetic oligonucleotide
  Sense strand starting at position 731 of SEQ ID NO: 1245381
ugugaaucuacuggugugu

SEQ ID NO: 1558257 - RNA, 19 nt, Artificial Sequence
  Description of Artificial Sequence: Synthetic oligonucleotide
  Antisense strand to SEQ ID NO: 1558256
acacaccaguagauucaca

SEQ ID NO: 1558258 - RNA, 19 nt, Artificial Sequence
  Description of Artificial Sequence: Synthetic oligonucleotide
  Sense strand starting at position 735 of SEQ ID NO: 1245381
aaucuacugguguguuuaa

SEQ ID NO: 1558259 - RNA, 19 nt, Artificial Sequence
  Description of Artificial Sequence: Synthetic oligonucleotide
  Antisense strand to SEQ ID NO: 1558258
uuaaacacaccaguagauu

SEQ ID NO: 1558260 - RNA, 19 nt, Artificial Sequence
  Description of Artificial Sequence: Synthetic oligonucleotide
  Sense strand starting at position 742 of SEQ ID NO: 1245381
ugguguguuuaaguauuag

SEQ ID NO: 1558261 - RNA, 19 nt, Artificial Sequence
  Description of Artificial Sequence: Synthetic oligonucleotide
  Antisense strand to SEQ ID NO: 1558260
cuaauacuuaaacacacca

SEQ ID NO: 1558262 - RNA, 19 nt, Artificial Sequence
  Description of Artificial Sequence: Synthetic oligonucleotide
  Sense strand starting at position 785 of SEQ ID NO: 1245381
uuguuauggcuuuagaaag

SEQ ID NO: 1558263 - RNA, 19 nt, Artificial Sequence
  Description of Artificial Sequence: Synthetic oligonucleotide
  Antisense strand to SEQ ID NO: 1558262
cuuucuaaagccauaacaa

SEQ ID NO: 1558264 - RNA, 19 nt, Artificial Sequence
  Description of Artificial Sequence: Synthetic oligonucleotide
  Sense strand starting at position 883 of SEQ ID NO: 1245381
uucguaucaugcuuuguaa

SEQ ID NO: 1558265 - RNA, 19 nt, Artificial Sequence
  Description of Artificial Sequence: Synthetic oligonucleotide
  Antisense strand to SEQ ID NO: 1558264
uuacaaagcaugauacgaa

SEQ ID NO: 1558266 - RNA, 19 nt, Artificial Sequence
  Description of Artificial Sequence: Synthetic oligonucleotide
  Sense strand starting at position 885 of SEQ ID NO: 1245381
cguaucaugcuuuguaaau

SEQ ID NO: 1558267 - RNA, 19 nt, Artificial Sequence
  Description of Artificial Sequence: Synthetic oligonucleotide
  Antisense strand to SEQ ID NO: 1558266
auuuacaaagcaugauacg

SEQ ID NO: 1558268 - RNA, 19 nt, Artificial Sequence
  Description of Artificial Sequence: Synthetic oligonucleotide
  Sense strand starting at position 886 of SEQ ID NO: 1245381
guaucaugcuuuguaaaug

SEQ ID NO: 1558269 - RNA, 19 nt, Artificial Sequence
  Description of Artificial Sequence: Synthetic oligonucleotide
  Antisense strand to SEQ ID NO: 1558268
cauuuacaaagcaugauac

SEQ ID NO: 1558270 - RNA, 19 nt, Artificial Sequence
  Description of Artificial Sequence: Synthetic oligonucleotide
  Sense strand starting at position 895 of SEQ ID NO: 1245381
uuuguaaaugcugaaucuu

SEQ ID NO: 1558271 - RNA, 19 nt, Artificial Sequence
  Description of Artificial Sequence: Synthetic oligonucleotide
  Antisense strand to SEQ ID NO: 1558270
aagauucagcauuuacaaa

SEQ ID NO: 1558272 - RNA, 19 nt, Artificial Sequence
  Description of Artificial Sequence: Synthetic oligonucleotide
  Sense strand starting at position 941 of SEQ ID NO: 1245381
agggauggucaacgaauca

SEQ ID NO: 1558273 - RNA, 19 nt, Artificial Sequence
  Description of Artificial Sequence: Synthetic oligonucleotide
  Antisense strand to SEQ ID NO: 1558272
ugauucguugaccaucccu

SEQ ID NO: 1558274 - RNA, 19 nt, Artificial Sequence
  Description of Artificial Sequence: Synthetic oligonucleotide
  Sense strand starting at position 1030 of SEQ ID NO: 1245381
agguccauucccuaaguaa

SEQ ID NO: 1558275 - RNA, 19 nt, Artificial Sequence
  Description of Artificial Sequence: Synthetic oligonucleotide
  Antisense strand to SEQ ID NO: 1558274
uuacuuagggaauggaccu

SEQ ID NO: 1558276 - RNA, 19 nt, Artificial Sequence
  Description of Artificial Sequence: Synthetic oligonucleotide
  Sense strand starting at position 1170 of SEQ ID NO: 1245381
ccacguuucggauacagaa

SEQ ID NO: 1558277 - RNA, 19 nt, Artificial Sequence
  Description of Artificial Sequence: Synthetic oligonucleotide
  Antisense strand to SEQ ID NO: 1558276
uucuguauccgaaacgugg

SEQ ID NO: 1558278 - RNA, 19 nt, Artificial Sequence
  Description of Artificial Sequence: Synthetic oligonucleotide
  Sense strand starting at position 1172 of SEQ ID NO: 1245381
acguuucggauacagaaau

SEQ ID NO: 1558279 - RNA, 19 nt, Artificial Sequence
  Description of Artificial Sequence: Synthetic oligonucleotide
  Antisense strand to SEQ ID NO: 1558278
auuucuguauccgaaacgu

SEQ ID NO: 1558280 - RNA, 19 nt, Artificial Sequence
  Description of Artificial Sequence: Synthetic oligonucleotide
  Sense strand starting at position 1192 of SEQ ID NO: 1245381
caaugcaacguuugaugaa

SEQ ID NO: 1558281 - RNA, 19 nt, Artificial Sequence
  Description of Artificial Sequence: Synthetic oligonucleotide
  Antisense strand to SEQ ID NO: 1558280
uucaucaaacguugcauug

SEQ ID NO: 1558282 - RNA, 19 nt, Artificial Sequence
  Description of Artificial Sequence: Synthetic oligonucleotide
  Sense strand starting at position 1491 of SEQ ID NO: 1245381
gucagaaacuauucugcag

SEQ ID NO: 1558283 - RNA, 19 nt, Artificial Sequence
  Description of Artificial Sequence: Synthetic oligonucleotide
  Antisense strand to SEQ ID NO: 1558282
cugcagaauaguuucugac

SEQ ID NO: 1558284 - RNA, 19 nt, Artificial Sequence
  Description of Artificial Sequence: Synthetic oligonucleotide
  Sense strand starting at position 1494 of SEQ ID NO: 1245381
agaaacuauucugcagagu

SEQ ID NO: 1558285 - RNA, 19 nt, Artificial Sequence
  Description of Artificial Sequence: Synthetic oligonucleotide
  Antisense strand to SEQ ID NO: 1558284
acucugcagaauaguuucu

SEQ ID NO: 1558286 - RNA, 19 nt, Artificial Sequence
  Description of Artificial Sequence: Synthetic oligonucleotide
  Sense strand starting at position 1495 of SEQ ID NO: 1245381
gaaacuauucugcagaguc

SEQ ID NO: 1558287 - RNA, 19 nt, Artificial Sequence
  Description of Artificial Sequence: Synthetic oligonucleotide
  Antisense strand to SEQ ID NO: 1558286
gacucugcagaauaguuuc

SEQ ID NO: 1558288 - RNA, 19 nt, Artificial Sequence
  Description of Artificial Sequence: Synthetic oligonucleotide
  Sense strand starting at position 2375 of SEQ ID NO: 1245381
uguaaagucagagguguuu

SEQ ID NO: 1558289 - RNA, 19 nt, Artificial Sequence
  Description of Artificial Sequence: Synthetic oligonucleotide
  Antisense strand to SEQ ID NO: 1558288
aaacaccucugacuuuaca

SEQ ID NO: 1558290 - RNA, 19 nt, Artificial Sequence
  Description of Artificial Sequence: Synthetic oligonucleotide
  Sense strand starting at position 2417 of SEQ ID NO: 1245381
gcuguaugaugucugcaaa

SEQ ID NO: 1558291 - RNA, 19 nt, Artificial Sequence
  Description of Artificial Sequence: Synthetic oligonucleotide
  Antisense strand to SEQ ID NO: 1558290
uuugcagacaucauacagc

SEQ ID NO: 1558292 - RNA, 19 nt, Artificial Sequence
  Description of Artificial Sequence: Synthetic oligonucleotide
  Sense strand starting at position 2418 of SEQ ID NO: 1245381
cuguaugaugucugcaaac

SEQ ID NO: 1558293 - RNA, 19 nt, Artificial Sequence
  Description of Artificial Sequence: Synthetic oligonucleotide
  Antisense strand to SEQ ID NO: 1558292
guuugcagacaucauacag

SEQ ID NO: 1558294 - RNA, 19 nt, Artificial Sequence
  Description of Artificial Sequence: Synthetic oligonucleotide
  Sense strand starting at position 2420 of SEQ ID NO: 1245381
guaugaugucugcaaaccu

SEQ ID NO: 1558295 - RNA, 19 nt, Artificial Sequence
  Description of Artificial Sequence: Synthetic oligonucleotide
  Antisense strand to SEQ ID NO: 1558294
agguuugcagacaucauac

SEQ ID NO: 1558296 - RNA, 19 nt, Artificial Sequence
  Description of Artificial Sequence: Synthetic oligonucleotide
  Sense strand starting at position 2585 of SEQ ID NO: 1245381
guggcaacccuggguuagu

SEQ ID NO: 1558297 - RNA, 19 nt, Artificial Sequence
  Description of Artificial Sequence: Synthetic oligonucleotide
  Antisense strand to SEQ ID NO: 1558296
acuaacccaggguugccac

SEQ ID NO: 1558298 - RNA, 19 nt, Artificial Sequence
  Description of Artificial Sequence: Synthetic oligonucleotide
  Sense strand starting at position 2709 of SEQ ID NO: 1245381
cuguuccagugaucuauga

SEQ ID NO: 1558299 - RNA, 19 nt, Artificial Sequence
  Description of Artificial Sequence: Synthetic oligonucleotide
  Antisense strand to SEQ ID NO: 1558298
ucauagaucacuggaacag

SEQ ID NO: 1558300 - RNA, 19 nt, Artificial Sequence
  Description of Artificial Sequence: Synthetic oligonucleotide
  Sense strand starting at position 2713 of SEQ ID NO: 1245381
uccagugaucuaugauuac

SEQ ID NO: 1558301 - RNA, 19 nt, Artificial Sequence
  Description of Artificial Sequence: Synthetic oligonucleotide
  Antisense strand to SEQ ID NO: 1558300
guaaucauagaucacugga

SEQ ID NO: 1558302 - RNA, 19 nt, Artificial Sequence
  Description of Artificial Sequence: Synthetic oligonucleotide
  Sense strand starting at position 2716 of SEQ ID NO: 1245381
agugaucuaugauuacuau

SEQ ID NO: 1558303 - RNA, 19 nt, Artificial Sequence
  Description of Artificial Sequence: Synthetic oligonucleotide
  Antisense strand to SEQ ID NO: 1558302
auaguaaucauagaucacu

SEQ ID NO: 1558304 - RNA, 19 nt, Artificial Sequence
  Description of Artificial Sequence: Synthetic oligonucleotide
  Sense strand starting at position 2717 of SEQ ID NO: 1245381
gugaucuaugauuacuauu

SEQ ID NO: 1558305 - RNA, 19 nt, Artificial Sequence
  Description of Artificial Sequence: Synthetic oligonucleotide
  Antisense strand to SEQ ID NO: 1558304
aauaguaaucauagaucac

SEQ ID NO: 1558306 - RNA, 19 nt, Artificial Sequence
  Description of Artificial Sequence: Synthetic oligonucleotide
  Sense strand starting at position 2912 of SEQ ID NO: 1245381
cacagaugugacugaauug

SEQ ID NO: 1558307 - RNA, 19 nt, Artificial Sequence
  Description of Artificial Sequence: Synthetic oligonucleotide
  Antisense strand to SEQ ID NO: 1558306
caauucagucacaucugug

SEQ ID NO: 1558308 - RNA, 19 nt, Artificial Sequence
  Description of Artificial Sequence: Synthetic oligonucleotide
  Sense strand starting at position 2947 of SEQ ID NO: 1245381
aagcuuuaaugggcaagga

SEQ ID NO: 1558309 - RNA, 19 nt, Artificial Sequence
  Description of Artificial Sequence: Synthetic oligonucleotide
  Antisense strand to SEQ ID NO: 1558308
uccuugcccauuaaagcuu

SEQ ID NO: 1558310 - RNA, 19 nt, Artificial Sequence
  Description of Artificial Sequence: Synthetic oligonucleotide
  Sense strand starting at position 3101 of SEQ ID NO: 1245381
agcagaauuugacaggauu

SEQ ID NO: 1558311 - RNA, 19 nt, Artificial Sequence
  Description of Artificial Sequence: Synthetic oligonucleotide
  Antisense strand to SEQ ID NO: 1558310
aauccugucaaauucugcu

SEQ ID NO: 1558312 - RNA, 19 nt, Artificial Sequence
  Description of Artificial Sequence: Synthetic oligonucleotide
  Sense strand starting at position 3149 of SEQ ID NO: 1245381
gaaaguucuucugugggua

SEQ ID NO: 1558313 - RNA, 19 nt, Artificial Sequence
  Description of Artificial Sequence: Synthetic oligonucleotide
  Antisense strand to SEQ ID NO: 1558312
uacccacagaagaacuuuc

SEQ ID NO: 1558314 - RNA, 19 nt, Artificial Sequence
  Description of Artificial Sequence: Synthetic oligonucleotide
  Sense strand starting at position 3150 of SEQ ID NO: 1245381
aaaguucuucuguggguaa

SEQ ID NO: 1558315 - RNA, 19 nt, Artificial Sequence
  Description of Artificial Sequence: Synthetic oligonucleotide
  Antisense strand to SEQ ID NO: 1558314
uuacccacagaagaacuuu

SEQ ID NO: 1558316 - RNA, 19 nt, Artificial Sequence
  Description of Artificial Sequence: Synthetic oligonucleotide
  Sense strand starting at position 3218 of SEQ ID NO: 1245381
agucaaucgacguggcaga

SEQ ID NO: 1558317 - RNA, 19 nt, Artificial Sequence
  Description of Artificial Sequence: Synthetic oligonucleotide
  Antisense strand to SEQ ID NO: 1558316
ucugccacgucgauugacu

SEQ ID NO: 1558318 - RNA, 19 nt, Artificial Sequence
  Description of Artificial Sequence: Synthetic oligonucleotide
  Sense strand starting at position 3782 of SEQ ID NO: 1245381
gcaauauugcaguggucug

SEQ ID NO: 1558319 - RNA, 19 nt, Artificial Sequence
  Description of Artificial Sequence: Synthetic oligonucleotide
  Antisense strand to SEQ ID NO: 1558318
cagaccacugcaauauugc

SEQ ID NO: 1558320 - RNA, 19 nt, Artificial Sequence
  Description of Artificial Sequence: Synthetic oligonucleotide
  Sense strand starting at position 3841 of SEQ ID NO: 1245381
ggagauacaucucaggauu

SEQ ID NO: 1558321 - RNA, 19 nt, Artificial Sequence
  Description of Artificial Sequence: Synthetic oligonucleotide
  Antisense strand to SEQ ID NO: 1558320
aauccugagauguaucucc

SEQ ID NO: 1558322 - RNA, 19 nt, Artificial Sequence
  Description of Artificial Sequence: Synthetic oligonucleotide
  Sense strand starting at position 3847 of SEQ ID NO: 1245381
acaucucaggauuguuaua

SEQ ID NO: 1558323 - RNA, 19 nt, Artificial Sequence
  Description of Artificial Sequence: Synthetic oligonucleotide
  Antisense strand to SEQ ID NO: 1558322
uauaacaauccugagaugu

SEQ ID NO: 1558324 - RNA, 19 nt, Artificial Sequence
  Description of Artificial Sequence: Synthetic oligonucleotide
  Sense strand starting at position 3849 of SEQ ID NO: 1245381
aucucaggauuguuauaag

SEQ ID NO: 1558325 - RNA, 19 nt, Artificial Sequence
  Description of Artificial Sequence: Synthetic oligonucleotide
  Antisense strand to SEQ ID NO: 1558324
cuuauaacaauccugagau

SEQ ID NO: 1558326 - RNA, 19 nt, Artificial Sequence
  Description of Artificial Sequence: Synthetic oligonucleotide
  Sense strand starting at position 3852 of SEQ ID NO: 1245381
ucaggauuguuauaaggac

SEQ ID NO: 1558327 - RNA, 19 nt, Artificial Sequence
  Description of Artificial Sequence: Synthetic oligonucleotide
  Antisense strand to SEQ ID NO: 1558326
guccuuauaacaauccuga

SEQ ID NO: 1558328 - RNA, 19 nt, Artificial Sequence
  Description of Artificial Sequence: Synthetic oligonucleotide
  Sense strand starting at position 3886 of SEQ ID NO: 1245381
auagaagauucuuagcaca

SEQ ID NO: 1558329 - RNA, 19 nt, Artificial Sequence
  Description of Artificial Sequence: Synthetic oligonucleotide
  Antisense strand to SEQ ID NO: 1558328
ugugcuaagaaucuucuau

SEQ ID NO: 1558330 - RNA, 19 nt, Artificial Sequence
  Description of Artificial Sequence: Synthetic oligonucleotide
  Sense strand starting at position 3888 of SEQ ID NO: 1245381
agaagauucuuagcacagu

SEQ ID NO: 1558331 - RNA, 19 nt, Artificial Sequence
  Description of Artificial Sequence: Synthetic oligonucleotide
  Antisense strand to SEQ ID NO: 1558330
acugugcuaagaaucuucu

SEQ ID NO: 1558332 - RNA, 19 nt, Artificial Sequence
  Description of Artificial Sequence: Synthetic oligonucleotide
  Sense strand starting at position 5 of SEQ ID NO: 1245382
caagauaauggcugaguca

SEQ ID NO: 1558333 - RNA, 19 nt, Artificial Sequence
  Description of Artificial Sequence: Synthetic oligonucleotide
  Antisense strand to SEQ ID NO: 1558332
ugacucagccauuaucuug

SEQ ID NO: 1558334 - RNA, 19 nt, Artificial Sequence
  Description of Artificial Sequence: Synthetic oligonucleotide
  Sense strand starting at position 196 of SEQ ID NO: 1245382
cuugcaauguaguuaugca

SEQ ID NO: 1558335 - RNA, 19 nt, Artificial Sequence
  Description of Artificial Sequence: Synthetic oligonucleotide
  Antisense strand to SEQ ID NO: 1558334
ugcauaacuacauugcaag

SEQ ID NO: 1558336 - RNA, 19 nt, Artificial Sequence
  Description of Artificial Sequence: Synthetic oligonucleotide
  Sense strand starting at position 300 of SEQ ID NO: 1245382
uggacucagccuuacacaa

SEQ ID NO: 1558337 - RNA, 19 nt, Artificial Sequence
  Description of Artificial Sequence: Synthetic oligonucleotide
  Antisense strand to SEQ ID NO: 1558336
uuguguaaggcugagucca

SEQ ID NO: 1558338 - RNA, 19 nt, Artificial Sequence
  Description of Artificial Sequence: Synthetic oligonucleotide
  Sense strand starting at position 346 of SEQ ID NO: 1245382
gcacuagaauugcuauaca

SEQ ID NO: 1558339 - RNA, 19 nt, Artificial Sequence
  Description of Artificial Sequence: Synthetic oligonucleotide
  Antisense strand to SEQ ID NO: 1558338
uguauagcaauucuagugc

SEQ ID NO: 1558340 - RNA, 19 nt, Artificial Sequence
  Description of Artificial Sequence: Synthetic oligonucleotide
  Sense strand starting at position 459 of SEQ ID NO: 1245382
ccuacuuucuauuagaugu

SEQ ID NO: 1558341 - RNA, 19 nt, Artificial Sequence
  Description of Artificial Sequence: Synthetic oligonucleotide
  Antisense strand to SEQ ID NO: 1558340
acaucuaauagaaaguagg

SEQ ID NO: 1558342 - RNA, 19 nt, Artificial Sequence
  Description of Artificial Sequence: Synthetic oligonucleotide
  Sense strand starting at position 556 of SEQ ID NO: 1245382
acuacauauugacaaggaa

SEQ ID NO: 1558343 - RNA, 19 nt, Artificial Sequence
  Description of Artificial Sequence: Synthetic oligonucleotide
  Antisense strand to SEQ ID NO: 1558342
uuccuugucaauauguagu

SEQ ID NO: 1558344 - RNA, 19 nt, Artificial Sequence
  Description of Artificial Sequence: Synthetic oligonucleotide
  Sense strand starting at position 592 of SEQ ID NO: 1245382
gggauucuuccaggaucac

SEQ ID NO: 1558345 - RNA, 19 nt, Artificial Sequence
  Description of Artificial Sequence: Synthetic oligonucleotide
  Antisense strand to SEQ ID NO: 1558344
gugauccuggaagaauccc

SEQ ID NO: 1558346 - RNA, 19 nt, Artificial Sequence
  Description of Artificial Sequence: Synthetic oligonucleotide
  Sense strand starting at position 682 of SEQ ID NO: 1245382
uuaucagccuucucaggau

SEQ ID NO: 1558347 - RNA, 19 nt, Artificial Sequence
  Description of Artificial Sequence: Synthetic oligonucleotide
  Antisense strand to SEQ ID NO: 1558346
auccugagaaggcugauaa

SEQ ID NO: 1558348 - RNA, 19 nt, Artificial Sequence
  Description of Artificial Sequence: Synthetic oligonucleotide
  Sense strand starting at position 799 of SEQ ID NO: 1245382
ggcacacugaaaugucgua

SEQ ID NO: 1558349 - RNA, 19 nt, Artificial Sequence
  Description of Artificial Sequence: Synthetic oligonucleotide
  Antisense strand to SEQ ID NO: 1558348
uacgacauuucagugugcc

SEQ ID NO: 1558350 - RNA, 19 nt, Artificial Sequence
  Description of Artificial Sequence: Synthetic oligonucleotide
  Sense strand starting at position 804 of SEQ ID NO: 1245382
acugaaaugucguagaagg

SEQ ID NO: 1558351 - RNA, 19 nt, Artificial Sequence
  Description of Artificial Sequence: Synthetic oligonucleotide
  Antisense strand to SEQ ID NO: 1558350
ccuucuacgacauuucagu

SEQ ID NO: 1558352 - RNA, 19 nt, Artificial Sequence
  Description of Artificial Sequence: Synthetic oligonucleotide
  Sense strand starting at position 806 of SEQ ID NO: 1245382
ugaaaugucguagaaggca

SEQ ID NO: 1558353 - RNA, 19 nt, Artificial Sequence
  Description of Artificial Sequence: Synthetic oligonucleotide
  Antisense strand to SEQ ID NO: 1558352
ugccuucuacgacauuuca

SEQ ID NO: 1558354 - RNA, 19 nt, Artificial Sequence
  Description of Artificial Sequence: Synthetic oligonucleotide
  Sense strand starting at position 982 of SEQ ID NO: 1245382
gaguucuaaaccuggcgga

SEQ ID NO: 1558355 - RNA, 19 nt, Artificial Sequence
  Description of Artificial Sequence: Synthetic oligonucleotide
  Antisense strand to SEQ ID NO: 1558354
uccgccagguuuagaacuc

SEQ ID NO: 1558356 - RNA, 19 nt, Artificial Sequence
  Description of Artificial Sequence: Synthetic oligonucleotide
  Sense strand starting at position 983 of SEQ ID NO: 1245382
aguucuaaaccuggcggaa

SEQ ID NO: 1558357 - RNA, 19 nt, Artificial Sequence
  Description of Artificial Sequence: Synthetic oligonucleotide
  Antisense strand to SEQ ID NO: 1558356
uuccgccagguuuagaacu

SEQ ID NO: 1558358 - RNA, 19 nt, Artificial Sequence
  Description of Artificial Sequence: Synthetic oligonucleotide
  Sense strand starting at position 2210 of SEQ ID NO: 1245382
uagagaaacugcucuggca

SEQ ID NO: 1558359 - RNA, 19 nt, Artificial Sequence
  Description of Artificial Sequence: Synthetic oligonucleotide
  Antisense strand to SEQ ID NO: 1558358
ugccagagcaguuucucua

SEQ ID NO: 1558360 - RNA, 19 nt, Artificial Sequence
  Description of Artificial Sequence: Synthetic oligonucleotide
  Sense strand starting at position 2385 of SEQ ID NO: 1245382
uguaguaacggcuguuuga

SEQ ID NO: 1558361 - RNA, 19 nt, Artificial Sequence
  Description of Artificial Sequence: Synthetic oligonucleotide
  Antisense strand to SEQ ID NO: 1558360
ucaaacagccguuacuaca

SEQ ID NO: 1558362 - RNA, 19 nt, Artificial Sequence
  Description of Artificial Sequence: Synthetic oligonucleotide
  Sense strand starting at position 2393 of SEQ ID NO: 1245382
cggcuguuugaggguggaa

SEQ ID NO: 1558363 - RNA, 19 nt, Artificial Sequence
  Description of Artificial Sequence: Synthetic oligonucleotide
  Antisense strand to SEQ ID NO: 1558362
uuccacccucaaacagccg

SEQ ID NO: 1558364 - RNA, 19 nt, Artificial Sequence
  Description of Artificial Sequence: Synthetic oligonucleotide
  Sense strand starting at position 2395 of SEQ ID NO: 1245382
gcuguuugaggguggaaag

SEQ ID NO: 1558365 - RNA, 19 nt, Artificial Sequence
  Description of Artificial Sequence: Synthetic oligonucleotide
  Antisense strand to SEQ ID NO: 1558364
cuuuccacccucaaacagc

SEQ ID NO: 1558366 - RNA, 19 nt, Artificial Sequence
  Description of Artificial Sequence: Synthetic oligonucleotide
  Sense strand starting at position 2414 of SEQ ID NO: 1245382
gagagcuaggucuguugga

SEQ ID NO: 1558367 - RNA, 19 nt, Artificial Sequence
  Description of Artificial Sequence: Synthetic oligonucleotide
  Antisense strand to SEQ ID NO: 1558366
uccaacagaccuagcucuc

SEQ ID NO: 1558368 - RNA, 19 nt, Artificial Sequence
  Description of Artificial Sequence: Synthetic oligonucleotide
  Sense strand starting at position 2470 of SEQ ID NO: 1245382
cucagagcgcgucuaguuu

SEQ ID NO: 1558369 - RNA, 19 nt, Artificial Sequence
  Description of Artificial Sequence: Synthetic oligonucleotide
  Antisense strand to SEQ ID NO: 1558368
aaacuagacgcgcucugag

SEQ ID NO: 1558370 - RNA, 19 nt, Artificial Sequence
  Description of Artificial Sequence: Synthetic oligonucleotide
  Sense strand starting at position 2551 of SEQ ID NO: 1245382
aaaucugcccuguggagaa

SEQ ID NO: 1558371 - RNA, 19 nt, Artificial Sequence
  Description of Artificial Sequence: Synthetic oligonucleotide
  Antisense strand to SEQ ID NO: 1558370
uucuccacagggcagauuu

SEQ ID NO: 1558372 - RNA, 19 nt, Artificial Sequence
  Description of Artificial Sequence: Synthetic oligonucleotide
  Sense strand starting at position 2581 of SEQ ID NO: 1245382
ggauguguccguuugcucu

SEQ ID NO: 1558373 - RNA, 19 nt, Artificial Sequence
  Description of Artificial Sequence: Synthetic oligonucleotide
  Antisense strand to SEQ ID NO: 1558372
agagcaaacggacacaucc

SEQ ID NO: 1558374 - RNA, 19 nt, Artificial Sequence
  Description of Artificial Sequence: Synthetic oligonucleotide
  Sense strand starting at position 2583 of SEQ ID NO: 1245382
auguguccguuugcucuaa

SEQ ID NO: 1558375 - RNA, 19 nt, Artificial Sequence
  Description of Artificial Sequence: Synthetic oligonucleotide
  Antisense strand to SEQ ID NO: 1558374
uuagagcaaacggacacau

SEQ ID NO: 1558376 - RNA, 19 nt, Artificial Sequence
  Description of Artificial Sequence: Synthetic oligonucleotide
  Sense strand starting at position 2584 of SEQ ID NO: 1245382
uguguccguuugcucuaau

SEQ ID NO: 1558377 - RNA, 19 nt, Artificial Sequence
  Description of Artificial Sequence: Synthetic oligonucleotide
  Antisense strand to SEQ ID NO: 1558376
auuagagcaaacggacaca

SEQ ID NO: 1558378 - RNA, 19 nt, Artificial Sequence
  Description of Artificial Sequence: Synthetic oligonucleotide
  Sense strand starting at position 2585 of SEQ ID NO: 1245382
guguccguuugcucuaauu

SEQ ID NO: 1558379 - RNA, 19 nt, Artificial Sequence
  Description of Artificial Sequence: Synthetic oligonucleotide
  Antisense strand to SEQ ID NO: 1558378
aauuagagcaaacggacac

SEQ ID NO: 1558380 - RNA, 19 nt, Artificial Sequence
  Description of Artificial Sequence: Synthetic oligonucleotide
  Sense strand starting at position 2587 of SEQ ID NO: 1245382
guccguuugcucuaauucu

SEQ ID NO: 1558381 - RNA, 19 nt, Artificial Sequence
  Description of Artificial Sequence: Synthetic oligonucleotide
  Antisense strand to SEQ ID NO: 1558380
agaauuagagcaaacggac

SEQ ID NO: 1558382 - RNA, 19 nt, Artificial Sequence
  Description of Artificial Sequence: Synthetic oligonucleotide
  Sense strand starting at position 2671 of SEQ ID NO: 1245382
aguucucuccagugaugca

SEQ ID NO: 1558383 - RNA, 19 nt, Artificial Sequence
  Description of Artificial Sequence: Synthetic oligonucleotide
  Antisense strand to SEQ ID NO: 1558382
ugcaucacuggagagaacu

SEQ ID NO: 1558384 - RNA, 19 nt, Artificial Sequence
  Description of Artificial Sequence: Synthetic oligonucleotide
  Sense strand starting at position 2878 of SEQ ID NO: 1245382
uacgauaggcuguaguaaa

SEQ ID NO: 1558385 - RNA, 19 nt, Artificial Sequence
  Description of Artificial Sequence: Synthetic oligonucleotide
  Antisense strand to SEQ ID NO: 1558384
uuuacuacagccuaucgua

SEQ ID NO: 1558386 - RNA, 19 nt, Artificial Sequence
  Description of Artificial Sequence: Synthetic oligonucleotide
  Sense strand starting at position 2921 of SEQ ID NO: 1245382
gcagcaaacuugcugacaa

SEQ ID NO: 1558387 - RNA, 19 nt, Artificial Sequence
  Description of Artificial Sequence: Synthetic oligonucleotide
  Antisense strand to SEQ ID NO: 1558386
uugucagcaaguuugcugc

SEQ ID NO: 1558388 - RNA, 19 nt, Artificial Sequence
  Description of Artificial Sequence: Synthetic oligonucleotide
  Sense strand starting at position 2946 of SEQ ID NO: 1245382
agccgauugccaggguagu

SEQ ID NO: 1558389 - RNA, 19 nt, Artificial Sequence
  Description of Artificial Sequence: Synthetic oligonucleotide
  Antisense strand to SEQ ID NO: 1558388
acuacccuggcaaucggcu

SEQ ID NO: 1558390 - RNA, 19 nt, Artificial Sequence
  Description of Artificial Sequence: Synthetic oligonucleotide
  Sense strand starting at position 2988 of SEQ ID NO: 1245382
accaaugugcuguaaauaa

SEQ ID NO: 1558391 - RNA, 19 nt, Artificial Sequence
  Description of Artificial Sequence: Synthetic oligonucleotide
  Antisense strand to SEQ ID NO: 1558390
uuauuuacagcacauuggu

SEQ ID NO: 1558392 - RNA, 19 nt, Artificial Sequence
  Description of Artificial Sequence: Synthetic oligonucleotide
  Sense strand starting at position 3023 of SEQ ID NO: 1245382
gugauacgguuugaauuua

SEQ ID NO: 1558393 - RNA, 19 nt, Artificial Sequence
  Description of Artificial Sequence: Synthetic oligonucleotide
  Antisense strand to SEQ ID NO: 1558392
uaaauucaaaccguaucac

SEQ ID NO: 1558394 - RNA, 19 nt, Artificial Sequence
  Description of Artificial Sequence: Synthetic oligonucleotide
  Sense strand starting at position 3096 of SEQ ID NO: 1245382
cagcacaguuugucuagaa

SEQ ID NO: 1558395 - RNA, 19 nt, Artificial Sequence
  Description of Artificial Sequence: Synthetic oligonucleotide
  Antisense strand to SEQ ID NO: 1558394
uucuagacaaacugugcug

SEQ ID NO: 1558396 - RNA, 19 nt, Artificial Sequence
  Description of Artificial Sequence: Synthetic oligonucleotide
  Sense strand starting at position 3097 of SEQ ID NO: 1245382
agcacaguuugucuagaaa

SEQ ID NO: 1558397 - RNA, 19 nt, Artificial Sequence
  Description of Artificial Sequence: Synthetic oligonucleotide
  Antisense strand to SEQ ID NO: 1558396
uuucuagacaaacugugcu

SEQ ID NO: 1558398 - RNA, 19 nt, Artificial Sequence
  Description of Artificial Sequence: Synthetic oligonucleotide
  Sense strand starting at position 3165 of SEQ ID NO: 1245382
ucaugugcgauccagguau

SEQ ID NO: 1558399 - RNA, 19 nt, Artificial Sequence
  Description of Artificial Sequence: Synthetic oligonucleotide
  Antisense strand to SEQ ID NO: 1558398
auaccuggaucgcacauga

SEQ ID NO: 1558400 - RNA, 19 nt, Artificial Sequence
  Description of Artificial Sequence: Synthetic oligonucleotide
  Sense strand starting at position 3167 of SEQ ID NO: 1245382
augugcgauccagguauua

SEQ ID NO: 1558401 - RNA, 19 nt, Artificial Sequence
  Description of Artificial Sequence: Synthetic oligonucleotide
  Antisense strand to SEQ ID NO: 1558400
uaauaccuggaucgcacau

SEQ ID NO: 1558402 - RNA, 19 nt, Artificial Sequence
  Description of Artificial Sequence: Synthetic oligonucleotide
  Sense strand starting at position 3169 of SEQ ID NO: 1245382
gugcgauccagguauuagg

SEQ ID NO: 1558403 - RNA, 19 nt, Artificial Sequence
  Description of Artificial Sequence: Synthetic oligonucleotide
  Antisense strand to SEQ ID NO: 1558402
ccuaauaccuggaucgcac

SEQ ID NO: 1558404 - RNA, 19 nt, Artificial Sequence
  Description of Artificial Sequence: Synthetic oligonucleotide
  Sense strand starting at position 3269 of SEQ ID NO: 1245382
cccugaaauuccugggagu

SEQ ID NO: 1558405 - RNA, 19 nt, Artificial Sequence
  Description of Artificial Sequence: Synthetic oligonucleotide
  Antisense strand to SEQ ID NO: 1558404
acucccaggaauuucaggg

SEQ ID NO: 1558406 - RNA, 19 nt, Artificial Sequence
  Description of Artificial Sequence: Synthetic oligonucleotide
  Sense strand starting at position 3270 of SEQ ID NO: 1245382
ccugaaauuccugggagug

SEQ ID NO: 1558407 - RNA, 19 nt, Artificial Sequence
  Description of Artificial Sequence: Synthetic oligonucleotide
  Antisense strand to SEQ ID NO: 1558406
cacucccaggaauuucagg

SEQ ID NO: 1558408 - RNA, 19 nt, Artificial Sequence
  Description of Artificial Sequence: Synthetic oligonucleotide
  Sense strand starting at position 3271 of SEQ ID NO: 1245382
cugaaauuccugggaguga

SEQ ID NO: 1558409 - RNA, 19 nt, Artificial Sequence
  Description of Artificial Sequence: Synthetic oligonucleotide
  Antisense strand to SEQ ID NO: 1558408
ucacucccaggaauuucag

SEQ ID NO: 1558410 - RNA, 19 nt, Artificial Sequence
  Description of Artificial Sequence: Synthetic oligonucleotide
  Sense strand starting at position 3272 of SEQ ID NO: 1245382
ugaaauuccugggagugag

SEQ ID NO: 1558411 - RNA, 19 nt, Artificial Sequence
  Description of Artificial Sequence: Synthetic oligonucleotide
  Antisense strand to SEQ ID NO: 1558410
cucacucccaggaauuuca

SEQ ID NO: 1558412 - RNA, 19 nt, Artificial Sequence
  Description of Artificial Sequence: Synthetic oligonucleotide
  Sense strand starting at position 63 of SEQ ID NO: 1245383
ucagaagagucaccuuuaa

SEQ ID NO: 1558413 - RNA, 19 nt, Artificial Sequence
  Description of Artificial Sequence: Synthetic oligonucleotide
  Antisense strand to SEQ ID NO: 1558412
uuaaaggugacucuucuga

SEQ ID NO: 1558414 - RNA, 19 nt, Artificial Sequence
  Description of Artificial Sequence: Synthetic oligonucleotide
  Sense strand starting at position 184 of SEQ ID NO: 1245383
ucaagugaagauugcugaa

SEQ ID NO: 1558415 - RNA, 19 nt, Artificial Sequence
  Description of Artificial Sequence: Synthetic oligonucleotide
  Antisense strand to SEQ ID NO: 1558414
uucagcaaucuucacuuga

SEQ ID NO: 1558416 - RNA, 19 nt, Artificial Sequence
  Description of Artificial Sequence: Synthetic oligonucleotide
  Sense strand starting at position 186 of SEQ ID NO: 1245383
aagugaagauugcugaauc

SEQ ID NO: 1558417 - RNA, 19 nt, Artificial Sequence
  Description of Artificial Sequence: Synthetic oligonucleotide
  Antisense strand to SEQ ID NO: 1558416
gauucagcaaucuucacuu

SEQ ID NO: 1558418 - RNA, 19 nt, Artificial Sequence
  Description of Artificial Sequence: Synthetic oligonucleotide
  Sense strand starting at position 196 of SEQ ID NO: 1245383
ugcugaaucuuaguuuaau

SEQ ID NO: 1558419 - RNA, 19 nt, Artificial Sequence
  Description of Artificial Sequence: Synthetic oligonucleotide
  Antisense strand to SEQ ID NO: 1558418
auuaaacuaagauucagca

SEQ ID NO: 1558420 - RNA, 19 nt, Artificial Sequence
  Description of Artificial Sequence: Synthetic oligonucleotide
  Sense strand starting at position 197 of SEQ ID NO: 1245383
gcugaaucuuaguuuaaua

SEQ ID NO: 1558421 - RNA, 19 nt, Artificial Sequence
  Description of Artificial Sequence: Synthetic oligonucleotide
  Antisense strand to SEQ ID NO: 1558420
uauuaaacuaagauucagc

SEQ ID NO: 1558422 - RNA, 19 nt, Artificial Sequence
  Description of Artificial Sequence: Synthetic oligonucleotide
  Sense strand starting at position 210 of SEQ ID NO: 1245383
uuaauacaaccuuggugaa

SEQ ID NO: 1558423 - RNA, 19 nt, Artificial Sequence
  Description of Artificial Sequence: Synthetic oligonucleotide
  Antisense strand to SEQ ID NO: 1558422
uucaccaagguuguauuaa

SEQ ID NO: 1558424 - RNA, 19 nt, Artificial Sequence
  Description of Artificial Sequence: Synthetic oligonucleotide
  Sense strand starting at position 651 of SEQ ID NO: 1245383
aauaaucuucuaggucgau

SEQ ID NO: 1558425 - RNA, 19 nt, Artificial Sequence
  Description of Artificial Sequence: Synthetic oligonucleotide
  Antisense strand to SEQ ID NO: 1558424
aucgaccuagaagauuauu

SEQ ID NO: 1558426 - RNA, 19 nt, Artificial Sequence
  Description of Artificial Sequence: Synthetic oligonucleotide
  Sense strand starting at position 652 of SEQ ID NO: 1245383
auaaucuucuaggucgauu

SEQ ID NO: 1558427 - RNA, 19 nt, Artificial Sequence
  Description of Artificial Sequence: Synthetic oligonucleotide
  Antisense strand to SEQ ID NO: 1558426
aaucgaccuagaagauuau

SEQ ID NO: 1558428 - RNA, 19 nt, Artificial Sequence
  Description of Artificial Sequence: Synthetic oligonucleotide
  Sense strand starting at position 734 of SEQ ID NO: 1245383
uuuaaucucuguuuaagug

SEQ ID NO: 1558429 - RNA, 19 nt, Artificial Sequence
  Description of Artificial Sequence: Synthetic oligonucleotide
  Antisense strand to SEQ ID NO: 1558428
cacuuaaacagagauuaaa

SEQ ID NO: 1558430 - RNA, 19 nt, Artificial Sequence
  Description of Artificial Sequence: Synthetic oligonucleotide
  Sense strand starting at position 754 of SEQ ID NO: 1245383
gucuacuuugaguggucuu

SEQ ID NO: 1558431 - RNA, 19 nt, Artificial Sequence
  Description of Artificial Sequence: Synthetic oligonucleotide
  Antisense strand to SEQ ID NO: 1558430
aagaccacucaaaguagac

SEQ ID NO: 1558432 - RNA, 19 nt, Artificial Sequence
  Description of Artificial Sequence: Synthetic oligonucleotide
  Sense strand starting at position 757 of SEQ ID NO: 1245383
uacuuugaguggucuuucu

SEQ ID NO: 1558433 - RNA, 19 nt, Artificial Sequence
  Description of Artificial Sequence: Synthetic oligonucleotide
  Antisense strand to SEQ ID NO: 1558432
agaaagaccacucaaagua

SEQ ID NO: 1558434 - RNA, 19 nt, Artificial Sequence
  Description of Artificial Sequence: Synthetic oligonucleotide
  Sense strand starting at position 781 of SEQ ID NO: 1245383
aucaauuaucauggguuaa

SEQ ID NO: 1558435 - RNA, 19 nt, Artificial Sequence
  Description of Artificial Sequence: Synthetic oligonucleotide
  Antisense strand to SEQ ID NO: 1558434
uuaacccaugauaauugau

SEQ ID NO: 1558436 - RNA, 19 nt, Artificial Sequence
  Description of Artificial Sequence: Synthetic oligonucleotide
  Sense strand starting at position 936 of SEQ ID NO: 1245383
cugggaguccucuacauua

SEQ ID NO: 1558437 - RNA, 19 nt, Artificial Sequence
  Description of Artificial Sequence: Synthetic oligonucleotide
  Antisense strand to SEQ ID NO: 1558436
uaauguagaggacucccag

SEQ ID NO: 1558438 - RNA, 19 nt, Artificial Sequence
  Description of Artificial Sequence: Synthetic oligonucleotide
  Sense strand starting at position 1117 of SEQ ID NO: 1245383
ugcucauugcgguagagga

SEQ ID NO: 1558439 - RNA, 19 nt, Artificial Sequence
  Description of Artificial Sequence: Synthetic oligonucleotide
  Antisense strand to SEQ ID NO: 1558438
uccucuaccgcaaugagca

SEQ ID NO: 1558440 - RNA, 19 nt, Artificial Sequence
  Description of Artificial Sequence: Synthetic oligonucleotide
  Sense strand starting at position 1158 of SEQ ID NO: 1245383
guuuaagaauacuccucga

SEQ ID NO: 1558441 - RNA, 19 nt, Artificial Sequence
  Description of Artificial Sequence: Synthetic oligonucleotide
  Antisense strand to SEQ ID NO: 1558440
ucgaggaguauucuuaaac

SEQ ID NO: 1558442 - RNA, 19 nt, Artificial Sequence
  Description of Artificial Sequence: Synthetic oligonucleotide
  Sense strand starting at position 1262 of SEQ ID NO: 1245383
cucagauucuuggucuguu

SEQ ID NO: 1558443 - RNA, 19 nt, Artificial Sequence
  Description of Artificial Sequence: Synthetic oligonucleotide
  Antisense strand to SEQ ID NO: 1558442
aacagaccaagaaucugag

SEQ ID NO: 1558444 - RNA, 19 nt, Artificial Sequence
  Description of Artificial Sequence: Synthetic oligonucleotide
  Sense strand starting at position 1322 of SEQ ID NO: 1245383
ugcugucagcuugagaaac

SEQ ID NO: 1558445 - RNA, 19 nt, Artificial Sequence
  Description of Artificial Sequence: Synthetic oligonucleotide
  Antisense strand to SEQ ID NO: 1558444
guuucucaagcugacagca

SEQ ID NO: 1558446 - RNA, 19 nt, Artificial Sequence
  Description of Artificial Sequence: Synthetic oligonucleotide
  Sense strand starting at position 1415 of SEQ ID NO: 1245383
uccguuaacccugauugga

SEQ ID NO: 1558447 - RNA, 19 nt, Artificial Sequence
  Description of Artificial Sequence: Synthetic oligonucleotide
  Antisense strand to SEQ ID NO: 1558446
uccaaucaggguuaacgga

SEQ ID NO: 1558448 - RNA, 19 nt, Artificial Sequence
  Description of Artificial Sequence: Synthetic oligonucleotide
  Sense strand starting at position 1417 of SEQ ID NO: 1245383
cguuaacccugauuggaga

SEQ ID NO: 1558449 - RNA, 19 nt, Artificial Sequence
  Description of Artificial Sequence: Synthetic oligonucleotide
  Antisense strand to SEQ ID NO: 1558448
ucuccaaucaggguuaacg

SEQ ID NO: 1558450 - RNA, 19 nt, Artificial Sequence
  Description of Artificial Sequence: Synthetic oligonucleotide
  Sense strand starting at position 1418 of SEQ ID NO: 1245383
guuaacccugauuggagaa

SEQ ID NO: 1558451 - RNA, 19 nt, Artificial Sequence
  Description of Artificial Sequence: Synthetic oligonucleotide
  Antisense strand to SEQ ID NO: 1558450
uucuccaaucaggguuaac

SEQ ID NO: 1558452 - RNA, 19 nt, Artificial Sequence
  Description of Artificial Sequence: Synthetic oligonucleotide
  Sense strand starting at position 1431 of SEQ ID NO: 1245383
ggagaaaccugcccagauc

SEQ ID NO: 1558453 - RNA, 19 nt, Artificial Sequence
  Description of Artificial Sequence: Synthetic oligonucleotide
  Antisense strand to SEQ ID NO: 1558452
gaucugggcagguuucucc

SEQ ID NO: 1558454 - RNA, 19 nt, Artificial Sequence
  Description of Artificial Sequence: Synthetic oligonucleotide
  Sense strand starting at position 1442 of SEQ ID NO: 1245383
cccagaucuuggcugguuu

SEQ ID NO: 1558455 - RNA, 19 nt, Artificial Sequence
  Description of Artificial Sequence: Synthetic oligonucleotide
  Antisense strand to SEQ ID NO: 1558454
aaaccagccaagaucuggg

SEQ ID NO: 1558456 - RNA, 19 nt, Artificial Sequence
  Description of Artificial Sequence: Synthetic oligonucleotide
  Sense strand starting at position 1446 of SEQ ID NO: 1245383
gaucuuggcugguuuggaa

SEQ ID NO: 1558457 - RNA, 19 nt, Artificial Sequence
  Description of Artificial Sequence: Synthetic oligonucleotide
  Antisense strand to SEQ ID NO: 1558456
uuccaaaccagccaagauc

SEQ ID NO: 1558458 - RNA, 19 nt, Artificial Sequence
  Description of Artificial Sequence: Synthetic oligonucleotide
  Sense strand starting at position 1483 of SEQ ID NO: 1245383
agugaagagucucacaaag

SEQ ID NO: 1558459 - RNA, 19 nt, Artificial Sequence
  Description of Artificial Sequence: Synthetic oligonucleotide
  Antisense strand to SEQ ID NO: 1558458
cuuugugagacucuucacu

SEQ ID NO: 1558460 - RNA, 19 nt, Artificial Sequence
  Description of Artificial Sequence: Synthetic oligonucleotide
  Sense strand starting at position 2417 of SEQ ID NO: 1245383
cgucucgguggugaauaau

SEQ ID NO: 1558461 - RNA, 19 nt, Artificial Sequence
  Description of Artificial Sequence: Synthetic oligonucleotide
  Antisense strand to SEQ ID NO: 1558460
auuauucaccaccgagacg

SEQ ID NO: 1558462 - RNA, 19 nt, Artificial Sequence
  Description of Artificial Sequence: Synthetic oligonucleotide
  Sense strand starting at position 2423 of SEQ ID NO: 1245383
gguggugaauaauucagga

SEQ ID NO: 1558463 - RNA, 19 nt, Artificial Sequence
  Description of Artificial Sequence: Synthetic oligonucleotide
  Antisense strand to SEQ ID NO: 1558462
uccugaauuauucaccacc

SEQ ID NO: 1558464 - RNA, 19 nt, Artificial Sequence
  Description of Artificial Sequence: Synthetic oligonucleotide
  Sense strand starting at position 2551 of SEQ ID NO: 1245383
gacuguuguguugggaaga

SEQ ID NO: 1558465 - RNA, 19 nt, Artificial Sequence
  Description of Artificial Sequence: Synthetic oligonucleotide
  Antisense strand to SEQ ID NO: 1558464
ucuucccaacacaacaguc

SEQ ID NO: 1558466 - RNA, 19 nt, Artificial Sequence
  Description of Artificial Sequence: Synthetic oligonucleotide
  Sense strand starting at position 2603 of SEQ ID NO: 1245383
ucgaguauguggucugaga

SEQ ID NO: 1558467 - RNA, 19 nt, Artificial Sequence
  Description of Artificial Sequence: Synthetic oligonucleotide
  Antisense strand to SEQ ID NO: 1558466
ucucagaccacauacucga

SEQ ID NO: 1558468 - RNA, 19 nt, Artificial Sequence
  Description of Artificial Sequence: Synthetic oligonucleotide
  Sense strand starting at position 2605 of SEQ ID NO: 1245383
gaguauguggucugagagg

SEQ ID NO: 1558469 - RNA, 19 nt, Artificial Sequence
  Description of Artificial Sequence: Synthetic oligonucleotide
  Antisense strand to SEQ ID NO: 1558468
ccucucagaccacauacuc

SEQ ID NO: 1558470 - RNA, 19 nt, Artificial Sequence
  Description of Artificial Sequence: Synthetic oligonucleotide
  Sense strand starting at position 2623 of SEQ ID NO: 1245383
ggaagcacuuguccuguaa

SEQ ID NO: 1558471 - RNA, 19 nt, Artificial Sequence
  Description of Artificial Sequence: Synthetic oligonucleotide
  Antisense strand to SEQ ID NO: 1558470
uuacaggacaagugcuucc

SEQ ID NO: 1558472 - RNA, 19 nt, Artificial Sequence
  Description of Artificial Sequence: Synthetic oligonucleotide
  Sense strand starting at position 2700 of SEQ ID NO: 1245383
gguugaaugcgucagggau

SEQ ID NO: 1558473 - RNA, 19 nt, Artificial Sequence
  Description of Artificial Sequence: Synthetic oligonucleotide
  Antisense strand to SEQ ID NO: 1558472
aucccugacgcauucaacc

SEQ ID NO: 1558474 - RNA, 19 nt, Artificial Sequence
  Description of Artificial Sequence: Synthetic oligonucleotide
  Sense strand starting at position 2704 of SEQ ID NO: 1245383
gaaugcgucagggauuaga

SEQ ID NO: 1558475 - RNA, 19 nt, Artificial Sequence
  Description of Artificial Sequence: Synthetic oligonucleotide
  Antisense strand to SEQ ID NO: 1558474
ucuaaucccugacgcauuc

SEQ ID NO: 1558476 - RNA, 19 nt, Artificial Sequence
  Description of Artificial Sequence: Synthetic oligonucleotide
  Sense strand starting at position 2797 of SEQ ID NO: 1245383
aguuaacauucucaaagga

SEQ ID NO: 1558477 - RNA, 19 nt, Artificial Sequence
  Description of Artificial Sequence: Synthetic oligonucleotide
  Antisense strand to SEQ ID NO: 1558476
uccuuugagaauguuaacu

SEQ ID NO: 1558478 - RNA, 19 nt, Artificial Sequence
  Description of Artificial Sequence: Synthetic oligonucleotide
  Sense strand starting at position 2941 of SEQ ID NO: 1245383
cccaguucuuguuugucca

SEQ ID NO: 1558479 - RNA, 19 nt, Artificial Sequence
  Description of Artificial Sequence: Synthetic oligonucleotide
  Antisense strand to SEQ ID NO: 1558478
uggacaaacaagaacuggg

SEQ ID NO: 1558480 - RNA, 19 nt, Artificial Sequence
  Description of Artificial Sequence: Synthetic oligonucleotide
  Sense strand starting at position 3012 of SEQ ID NO: 1245383
cccugagcuuaagcugaau

SEQ ID NO: 1558481 - RNA, 19 nt, Artificial Sequence
  Description of Artificial Sequence: Synthetic oligonucleotide
  Antisense strand to SEQ ID NO: 1558480
auucagcuuaagcucaggg

SEQ ID NO: 1558482 - RNA, 19 nt, Artificial Sequence
  Description of Artificial Sequence: Synthetic oligonucleotide
  Sense strand starting at position 3261 of SEQ ID NO: 1245383
cuggucucuccuuagaaua

SEQ ID NO: 1558483 - RNA, 19 nt, Artificial Sequence
  Description of Artificial Sequence: Synthetic oligonucleotide
  Antisense strand to SEQ ID NO: 1558482
uauucuaaggagagaccag

SEQ ID NO: 1558484 - RNA, 19 nt, Artificial Sequence
  Description of Artificial Sequence: Synthetic oligonucleotide
  Sense strand starting at position 3274 of SEQ ID NO: 1245383
agaauaguauugccaaauc

SEQ ID NO: 1558485 - RNA, 19 nt, Artificial Sequence
  Description of Artificial Sequence: Synthetic oligonucleotide
  Antisense strand to SEQ ID NO: 1558484
gauuuggcaauacuauucu

SEQ ID NO: 1558486 - RNA, 19 nt, Artificial Sequence
  Description of Artificial Sequence: Synthetic oligonucleotide
  Sense strand starting at position 3360 of SEQ ID NO: 1245383
uugugaauuugccuucgca

SEQ ID NO: 1558487 - RNA, 19 nt, Artificial Sequence
  Description of Artificial Sequence: Synthetic oligonucleotide
  Antisense strand to SEQ ID NO: 1558486
ugcgaaggcaaauucacaa

SEQ ID NO: 1558488 - RNA, 19 nt, Artificial Sequence
  Description of Artificial Sequence: Synthetic oligonucleotide
  Sense strand starting at position 3449 of SEQ ID NO: 1245383
ccuuguacauuccugagca

SEQ ID NO: 1558489 - RNA, 19 nt, Artificial Sequence
  Description of Artificial Sequence: Synthetic oligonucleotide
  Antisense strand to SEQ ID NO: 1558488
ugcucaggaauguacaagg

SEQ ID NO: 1558490 - RNA, 19 nt, Artificial Sequence
  Description of Artificial Sequence: Synthetic oligonucleotide
  Sense strand starting at position 3451 of SEQ ID NO: 1245383
uuguacauuccugagcaua

SEQ ID NO: 1558491 - RNA, 19 nt, Artificial Sequence
  Description of Artificial Sequence: Synthetic oligonucleotide
  Antisense strand to SEQ ID NO: 1558490
uaugcucaggaauguacaa

SEQ ID NO: 1558492 - RNA, 19 nt, Artificial Sequence
  Description of Artificial Sequence: Synthetic oligonucleotide
  Sense strand starting at position 353 of SEQ ID NO: 1245384
agcucacuacuuugaagau

SEQ ID NO: 1558493 - RNA, 19 nt, Artificial Sequence
  Description of Artificial Sequence: Synthetic oligonucleotide
  Antisense strand to SEQ ID NO: 1558492
aucuucaaaguagugagcu

SEQ ID NO: 1558494 - RNA, 19 nt, Artificial Sequence
  Description of Artificial Sequence: Synthetic oligonucleotide
  Sense strand starting at position 382 of SEQ ID NO: 1245384
aaguguguuacauggagaa

SEQ ID NO: 1558495 - RNA, 19 nt, Artificial Sequence
  Description of Artificial Sequence: Synthetic oligonucleotide
  Antisense strand to SEQ ID NO: 1558494
uucuccauguaacacacuu

SEQ ID NO: 1558496 - RNA, 19 nt, Artificial Sequence
  Description of Artificial Sequence: Synthetic oligonucleotide
  Sense strand starting at position 458 of SEQ ID NO: 1245384
guaagauacaagggucacu

SEQ ID NO: 1558497 - RNA, 19 nt, Artificial Sequence
  Description of Artificial Sequence: Synthetic oligonucleotide
  Antisense strand to SEQ ID NO: 1558496
agugacccuuguaucuuac

SEQ ID NO: 1558498 - RNA, 19 nt, Artificial Sequence
  Description of Artificial Sequence: Synthetic oligonucleotide
  Sense strand starting at position 546 of SEQ ID NO: 1245384
cccagucaccgagaucuuu

SEQ ID NO: 1558499 - RNA, 19 nt, Artificial Sequence
  Description of Artificial Sequence: Synthetic oligonucleotide
  Antisense strand to SEQ ID NO: 1558498
aaagaucucggugacuggg

SEQ ID NO: 1558500 - RNA, 19 nt, Artificial Sequence
  Description of Artificial Sequence: Synthetic oligonucleotide
  Sense strand starting at position 571 of SEQ ID NO: 1245384
uuaguuacagguggcaaua

SEQ ID NO: 1558501 - RNA, 19 nt, Artificial Sequence
  Description of Artificial Sequence: Synthetic oligonucleotide
  Antisense strand to SEQ ID NO: 1558500
uauugccaccuguaacuaa

SEQ ID NO: 1558502 - RNA, 19 nt, Artificial Sequence
  Description of Artificial Sequence: Synthetic oligonucleotide
  Sense strand starting at position 650 of SEQ ID NO: 1245384
aaauaaggauuggcaguaa

SEQ ID NO: 1558503 - RNA, 19 nt, Artificial Sequence
  Description of Artificial Sequence: Synthetic oligonucleotide
  Antisense strand to SEQ ID NO: 1558502
uuacugccaauccuuauuu

SEQ ID NO: 1558504 - RNA, 19 nt, Artificial Sequence
  Description of Artificial Sequence: Synthetic oligonucleotide
  Sense strand starting at position 726 of SEQ ID NO: 1245384
uauuuauagugguucguuu

SEQ ID NO: 1558505 - RNA, 19 nt, Artificial Sequence
  Description of Artificial Sequence: Synthetic oligonucleotide
  Antisense strand to SEQ ID NO: 1558504
aaacgaaccacuauaaaua

SEQ ID NO: 1558506 - RNA, 19 nt, Artificial Sequence
  Description of Artificial Sequence: Synthetic oligonucleotide
  Sense strand starting at position 767 of SEQ ID NO: 1245384
uguauuguucuggauggaa

SEQ ID NO: 1558507 - RNA, 19 nt, Artificial Sequence
  Description of Artificial Sequence: Synthetic oligonucleotide
  Antisense strand to SEQ ID NO: 1558506
uuccauccagaacaauaca

SEQ ID NO: 1558508 - RNA, 19 nt, Artificial Sequence
  Description of Artificial Sequence: Synthetic oligonucleotide
  Sense strand starting at position 769 of SEQ ID NO: 1245384
uauuguucuggauggaacu

SEQ ID NO: 1558509 - RNA, 19 nt, Artificial Sequence
  Description of Artificial Sequence: Synthetic oligonucleotide
  Antisense strand to SEQ ID NO: 1558508
aguuccauccagaacaaua

SEQ ID NO: 1558510 - RNA, 19 nt, Artificial Sequence
  Description of Artificial Sequence: Synthetic oligonucleotide
  Sense strand starting at position 770 of SEQ ID NO: 1245384
auuguucuggauggaacua

SEQ ID NO: 1558511 - RNA, 19 nt, Artificial Sequence
  Description of Artificial Sequence: Synthetic oligonucleotide
  Antisense strand to SEQ ID NO: 1558510
uaguuccauccagaacaau

SEQ ID NO: 1558512 - RNA, 19 nt, Artificial Sequence
  Description of Artificial Sequence: Synthetic oligonucleotide
  Sense strand starting at position 956 of SEQ ID NO: 1245384
aggcaauuccugcaaccuu

SEQ ID NO: 1558513 - RNA, 19 nt, Artificial Sequence
  Description of Artificial Sequence: Synthetic oligonucleotide
  Antisense strand to SEQ ID NO: 1558512
aagguugcaggaauugccu

SEQ ID NO: 1558514 - RNA, 19 nt, Artificial Sequence
  Description of Artificial Sequence: Synthetic oligonucleotide
  Sense strand starting at position 1180 of SEQ ID NO: 1245384
gugacauacuaagugggua

SEQ ID NO: 1558515 - RNA, 19 nt, Artificial Sequence
  Description of Artificial Sequence: Synthetic oligonucleotide
  Antisense strand to SEQ ID NO: 1558514
uacccacuuaguaugucac

SEQ ID NO: 1558516 - RNA, 19 nt, Artificial Sequence
  Description of Artificial Sequence: Synthetic oligonucleotide
  Sense strand starting at position 1181 of SEQ ID NO: 1245384
ugacauacuaaguggguaa

SEQ ID NO: 1558517 - RNA, 19 nt, Artificial Sequence
  Description of Artificial Sequence: Synthetic oligonucleotide
  Antisense strand to SEQ ID NO: 1558516
uuacccacuuaguauguca

SEQ ID NO: 1558518 - RNA, 19 nt, Artificial Sequence
  Description of Artificial Sequence: Synthetic oligonucleotide
  Sense strand starting at position 1299 of SEQ ID NO: 1245384
cuggcauccgcucagacaa

SEQ ID NO: 1558519 - RNA, 19 nt, Artificial Sequence
  Description of Artificial Sequence: Synthetic oligonucleotide
  Antisense strand to SEQ ID NO: 1558518
uugucugagcggaugccag

SEQ ID NO: 1558520 - RNA, 19 nt, Artificial Sequence
  Description of Artificial Sequence: Synthetic oligonucleotide
  Sense strand starting at position 1312 of SEQ ID NO: 1245384
agacaaguacuagggcaaa

SEQ ID NO: 1558521 - RNA, 19 nt, Artificial Sequence
  Description of Artificial Sequence: Synthetic oligonucleotide
  Antisense strand to SEQ ID NO: 1558520
uuugcccuaguacuugucu

SEQ ID NO: 1558522 - RNA, 19 nt, Artificial Sequence
  Description of Artificial Sequence: Synthetic oligonucleotide
  Sense strand starting at position 1513 of SEQ ID NO: 1245384
uuagauugcaccugggaac

SEQ ID NO: 1558523 - RNA, 19 nt, Artificial Sequence
  Description of Artificial Sequence: Synthetic oligonucleotide
  Antisense strand to SEQ ID NO: 1558522
guucccaggugcaaucuaa

SEQ ID NO: 1558524 - RNA, 19 nt, Artificial Sequence
  Description of Artificial Sequence: Synthetic oligonucleotide
  Sense strand starting at position 1773 of SEQ ID NO: 1245384
ugugguuucccauggagaa

SEQ ID NO: 1558525 - RNA, 19 nt, Artificial Sequence
  Description of Artificial Sequence: Synthetic oligonucleotide
  Antisense strand to SEQ ID NO: 1558524
uucuccaugggaaaccaca

SEQ ID NO: 1558526 - RNA, 19 nt, Artificial Sequence
  Description of Artificial Sequence: Synthetic oligonucleotide
  Sense strand starting at position 1774 of SEQ ID NO: 1245384
gugguuucccauggagaag

SEQ ID NO: 1558527 - RNA, 19 nt, Artificial Sequence
  Description of Artificial Sequence: Synthetic oligonucleotide
  Antisense strand to SEQ ID NO: 1558526
cuucuccaugggaaaccac

SEQ ID NO: 1558528 - RNA, 19 nt, Artificial Sequence
  Description of Artificial Sequence: Synthetic oligonucleotide
  Sense strand starting at position 2013 of SEQ ID NO: 1245384
ugcaguaaaucagcugaca

SEQ ID NO: 1558529 - RNA, 19 nt, Artificial Sequence
  Description of Artificial Sequence: Synthetic oligonucleotide
  Antisense strand to SEQ ID NO: 1558528
ugucagcugauuuacugca

SEQ ID NO: 1558530 - RNA, 19 nt, Artificial Sequence
  Description of Artificial Sequence: Synthetic oligonucleotide
  Sense strand starting at position 2082 of SEQ ID NO: 1245384
gcgggaaagacucaccauu

SEQ ID NO: 1558531 - RNA, 19 nt, Artificial Sequence
  Description of Artificial Sequence: Synthetic oligonucleotide
  Antisense strand to SEQ ID NO: 1558530
aauggugagucuuucccgc

SEQ ID NO: 1558532 - RNA, 19 nt, Artificial Sequence
  Description of Artificial Sequence: Synthetic oligonucleotide
  Sense strand starting at position 2345 of SEQ ID NO: 1245384
acugcuucccacugagaug

SEQ ID NO: 1558533 - RNA, 19 nt, Artificial Sequence
  Description of Artificial Sequence: Synthetic oligonucleotide
  Antisense strand to SEQ ID NO: 1558532
caucucagugggaagcagu

SEQ ID NO: 1558534 - RNA, 19 nt, Artificial Sequence
  Description of Artificial Sequence: Synthetic oligonucleotide
  Sense strand starting at position 2388 of SEQ ID NO: 1245384
acuggaaaguauguuggau

SEQ ID NO: 1558535 - RNA, 19 nt, Artificial Sequence
  Description of Artificial Sequence: Synthetic oligonucleotide
  Antisense strand to SEQ ID NO: 1558534
auccaacauacuuuccagu

SEQ ID NO: 1558536 - RNA, 19 nt, Artificial Sequence
  Description of Artificial Sequence: Synthetic oligonucleotide
  Sense strand starting at position 2457 of SEQ ID NO: 1245384
aguauagugcaggaugaga

SEQ ID NO: 1558537 - RNA, 19 nt, Artificial Sequence
  Description of Artificial Sequence: Synthetic oligonucleotide
  Antisense strand to SEQ ID NO: 1558536
ucucauccugcacuauacu

SEQ ID NO: 1558538 - RNA, 19 nt, Artificial Sequence
  Description of Artificial Sequence: Synthetic oligonucleotide
  Sense strand starting at position 2459 of SEQ ID NO: 1245384
uauagugcaggaugagaaa

SEQ ID NO: 1558539 - RNA, 19 nt, Artificial Sequence
  Description of Artificial Sequence: Synthetic oligonucleotide
  Antisense strand to SEQ ID NO: 1558538
uuucucauccugcacuaua

SEQ ID NO: 1558540 - RNA, 19 nt, Artificial Sequence
  Description of Artificial Sequence: Synthetic oligonucleotide
  Sense strand starting at position 2507 of SEQ ID NO: 1245384
augaauuauuucuagguug

SEQ ID NO: 1558541 - RNA, 19 nt, Artificial Sequence
  Description of Artificial Sequence: Synthetic oligonucleotide
  Antisense strand to SEQ ID NO: 1558540
caaccuagaaauaauucau

SEQ ID NO: 1558542 - RNA, 19 nt, Artificial Sequence
  Description of Artificial Sequence: Synthetic oligonucleotide
  Sense strand starting at position 2574 of SEQ ID NO: 1245384
uggucagauuuggaauaau

SEQ ID NO: 1558543 - RNA, 19 nt, Artificial Sequence
  Description of Artificial Sequence: Synthetic oligonucleotide
  Antisense strand to SEQ ID NO: 1558542
auuauuccaaaucugacca

SEQ ID NO: 1558544 - RNA, 19 nt, Artificial Sequence
  Description of Artificial Sequence: Synthetic oligonucleotide
  Sense strand starting at position 2587 of SEQ ID NO: 1245384
aauaauaauugggaaagga

SEQ ID NO: 1558545 - RNA, 19 nt, Artificial Sequence
  Description of Artificial Sequence: Synthetic oligonucleotide
  Antisense strand to SEQ ID NO: 1558544
uccuuucccaauuauuauu

SEQ ID NO: 1558546 - RNA, 19 nt, Artificial Sequence
  Description of Artificial Sequence: Synthetic oligonucleotide
  Sense strand starting at position 2612 of SEQ ID NO: 1245384
cuuugucaccagcauugaa

SEQ ID NO: 1558547 - RNA, 19 nt, Artificial Sequence
  Description of Artificial Sequence: Synthetic oligonucleotide
  Antisense strand to SEQ ID NO: 1558546
uucaaugcuggugacaaag

SEQ ID NO: 1558548 - RNA, 19 nt, Artificial Sequence
  Description of Artificial Sequence: Synthetic oligonucleotide
  Sense strand starting at position 2680 of SEQ ID NO: 1245384
auacaagggacgugaagua

SEQ ID NO: 1558549 - RNA, 19 nt, Artificial Sequence
  Description of Artificial Sequence: Synthetic oligonucleotide
  Antisense strand to SEQ ID NO: 1558548
uacuucacgucccuuguau

SEQ ID NO: 1558550 - RNA, 19 nt, Artificial Sequence
  Description of Artificial Sequence: Synthetic oligonucleotide
  Sense strand starting at position 2743 of SEQ ID NO: 1245384
ccgugagcggcuccuuuaa

SEQ ID NO: 1558551 - RNA, 19 nt, Artificial Sequence
  Description of Artificial Sequence: Synthetic oligonucleotide
  Antisense strand to SEQ ID NO: 1558550
uuaaaggagccgcucacgg

SEQ ID NO: 1558552 - RNA, 19 nt, Artificial Sequence
  Description of Artificial Sequence: Synthetic oligonucleotide
  Sense strand starting at position 2784 of SEQ ID NO: 1245384
ucucuuguggguugauaga

SEQ ID NO: 1558553 - RNA, 19 nt, Artificial Sequence
  Description of Artificial Sequence: Synthetic oligonucleotide
  Antisense strand to SEQ ID NO: 1558552
ucuaucaacccacaagaga

SEQ ID NO: 1558554 - RNA, 19 nt, Artificial Sequence
  Description of Artificial Sequence: Synthetic oligonucleotide
  Sense strand starting at position 2817 of SEQ ID NO: 1245384
cggccuagaccagguaaua

SEQ ID NO: 1558555 - RNA, 19 nt, Artificial Sequence
  Description of Artificial Sequence: Synthetic oligonucleotide
  Antisense strand to SEQ ID NO: 1558554
uauuaccuggucuaggccg

SEQ ID NO: 1558556 - RNA, 19 nt, Artificial Sequence
  Description of Artificial Sequence: Synthetic oligonucleotide
  Sense strand starting at position 3155 of SEQ ID NO: 1245384
cugcaauucucaucuggag

SEQ ID NO: 1558557 - RNA, 19 nt, Artificial Sequence
  Description of Artificial Sequence: Synthetic oligonucleotide
  Antisense strand to SEQ ID NO: 1558556
cuccagaugagaauugcag

SEQ ID NO: 1558558 - RNA, 19 nt, Artificial Sequence
  Description of Artificial Sequence: Synthetic oligonucleotide
  Sense strand starting at position 3315 of SEQ ID NO: 1245384
ccacaugggccuuacuaaa

SEQ ID NO: 1558559 - RNA, 19 nt, Artificial Sequence
  Description of Artificial Sequence: Synthetic oligonucleotide
  Antisense strand to SEQ ID NO: 1558558
uuuaguaaggcccaugugg

SEQ ID NO: 1558560 - RNA, 19 nt, Artificial Sequence
  Description of Artificial Sequence: Synthetic oligonucleotide
  Sense strand starting at position 3420 of SEQ ID NO: 1245384
uagauacagccauggauau

SEQ ID NO: 1558561 - RNA, 19 nt, Artificial Sequence
  Description of Artificial Sequence: Synthetic oligonucleotide
  Antisense strand to SEQ ID NO: 1558560
auauccauggcuguaucua

SEQ ID NO: 1558562 - RNA, 19 nt, Artificial Sequence
  Description of Artificial Sequence: Synthetic oligonucleotide
  Sense strand starting at position 3508 of SEQ ID NO: 1245384
ugccauauauuauugguua

SEQ ID NO: 1558563 - RNA, 19 nt, Artificial Sequence
  Description of Artificial Sequence: Synthetic oligonucleotide
  Antisense strand to SEQ ID NO: 1558562
uaaccaauaauauauggca

SEQ ID NO: 1558564 - RNA, 19 nt, Artificial Sequence
  Description of Artificial Sequence: Synthetic oligonucleotide
  Sense strand starting at position 3558 of SEQ ID NO: 1245384
gagaaaggauuauacaaga

SEQ ID NO: 1558565 - RNA, 19 nt, Artificial Sequence
  Description of Artificial Sequence: Synthetic oligonucleotide
  Antisense strand to SEQ ID NO: 1558564
ucuuguauaauccuuucuc

SEQ ID NO: 1558566 - RNA, 19 nt, Artificial Sequence
  Description of Artificial Sequence: Synthetic oligonucleotide
  Sense strand starting at position 3568 of SEQ ID NO: 1245384
uauacaagagugugacuua

SEQ ID NO: 1558567 - RNA, 19 nt, Artificial Sequence
  Description of Artificial Sequence: Synthetic oligonucleotide
  Antisense strand to SEQ ID NO: 1558566
uaagucacacucuuguaua

SEQ ID NO: 1558568 - RNA, 19 nt, Artificial Sequence
  Description of Artificial Sequence: Synthetic oligonucleotide
  Sense strand starting at position 3642 of SEQ ID NO: 1245384
uguaaaucaggugggaaau

SEQ ID NO: 1558569 - RNA, 19 nt, Artificial Sequence
  Description of Artificial Sequence: Synthetic oligonucleotide
  Antisense strand to SEQ ID NO: 1558568
auuucccaccugauuuaca

SEQ ID NO: 1558570 - RNA, 19 nt, Artificial Sequence
  Description of Artificial Sequence: Synthetic oligonucleotide
  Sense strand starting at position 3688 of SEQ ID NO: 1245384
gucgucauuguuguuguaa

SEQ ID NO: 1558571 - RNA, 19 nt, Artificial Sequence
  Description of Artificial Sequence: Synthetic oligonucleotide
  Antisense strand to SEQ ID NO: 1558570
uuacaacaacaaugacgac

SEQ ID NO: 1558572 - RNA, 19 nt, Artificial Sequence
  Description of Artificial Sequence: Synthetic oligonucleotide
  Sense strand starting at position 161 of SEQ ID NO: 1245385
gguuuaugaagucagcaaa

SEQ ID NO: 1558573 - RNA, 19 nt, Artificial Sequence
  Description of Artificial Sequence: Synthetic oligonucleotide
  Antisense strand to SEQ ID NO: 1558572
uuugcugacuucauaaacc

SEQ ID NO: 1558574 - RNA, 19 nt, Artificial Sequence
  Description of Artificial Sequence: Synthetic oligonucleotide
  Sense strand starting at position 208 of SEQ ID NO: 1245385
acauuacagugguuacaac

SEQ ID NO: 1558575 - RNA, 19 nt, Artificial Sequence
  Description of Artificial Sequence: Synthetic oligonucleotide
  Antisense strand to SEQ ID NO: 1558574
guuguaaccacuguaaugu

SEQ ID NO: 1558576 - RNA, 19 nt, Artificial Sequence
  Description of Artificial Sequence: Synthetic oligonucleotide
  Sense strand starting at position 216 of SEQ ID NO: 1245385
gugguuacaacagaguaua

SEQ ID NO: 1558577 - RNA, 19 nt, Artificial Sequence
  Description of Artificial Sequence: Synthetic oligonucleotide
  Antisense strand to SEQ ID NO: 1558576
uauacucuguuguaaccac

SEQ ID NO: 1558578 - RNA, 19 nt, Artificial Sequence
  Description of Artificial Sequence: Synthetic oligonucleotide
  Sense strand starting at position 517 of SEQ ID NO: 1245385
auauaugaacaucguaagu

SEQ ID NO: 1558579 - RNA, 19 nt, Artificial Sequence
  Description of Artificial Sequence: Synthetic oligonucleotide
  Antisense strand to SEQ ID NO: 1558578
acuuacgauguucauauau

SEQ ID NO: 1558580 - RNA, 19 nt, Artificial Sequence
  Description of Artificial Sequence: Synthetic oligonucleotide
  Sense strand starting at position 528 of SEQ ID NO: 1245385
ucguaagugaugcauacaa

SEQ ID NO: 1558581 - RNA, 19 nt, Artificial Sequence
  Description of Artificial Sequence: Synthetic oligonucleotide
  Antisense strand to SEQ ID NO: 1558580
uuguaugcaucacuuacga

SEQ ID NO: 1558582 - RNA, 19 nt, Artificial Sequence
  Description of Artificial Sequence: Synthetic oligonucleotide
  Sense strand starting at position 530 of SEQ ID NO: 1245385
guaagugaugcauacaaga

SEQ ID NO: 1558583 - RNA, 19 nt, Artificial Sequence
  Description of Artificial Sequence: Synthetic oligonucleotide
  Antisense strand to SEQ ID NO: 1558582
ucuuguaugcaucacuuac

SEQ ID NO: 1558584 - RNA, 19 nt, Artificial Sequence
  Description of Artificial Sequence: Synthetic oligonucleotide
  Sense strand starting at position 541 of SEQ ID NO: 1245385
auacaagauccuuggcuaa

SEQ ID NO: 1558585 - RNA, 19 nt, Artificial Sequence
  Description of Artificial Sequence: Synthetic oligonucleotide
  Antisense strand to SEQ ID NO: 1558584
uuagccaaggaucuuguau

SEQ ID NO: 1558586 - RNA, 19 nt, Artificial Sequence
  Description of Artificial Sequence: Synthetic oligonucleotide
  Sense strand starting at position 543 of SEQ ID NO: 1245385
acaagauccuuggcuaaua

SEQ ID NO: 1558587 - RNA, 19 nt, Artificial Sequence
  Description of Artificial Sequence: Synthetic oligonucleotide
  Antisense strand to SEQ ID NO: 1558586
uauuagccaaggaucuugu

SEQ ID NO: 1558588 - RNA, 19 nt, Artificial Sequence
  Description of Artificial Sequence: Synthetic oligonucleotide
  Sense strand starting at position 698 of SEQ ID NO: 1245385
uuuccuuagugcguaauuu

SEQ ID NO: 1558589 - RNA, 19 nt, Artificial Sequence
  Description of Artificial Sequence: Synthetic oligonucleotide
  Antisense strand to SEQ ID NO: 1558588
aaauuacgcacuaaggaaa

SEQ ID NO: 1558590 - RNA, 19 nt, Artificial Sequence
  Description of Artificial Sequence: Synthetic oligonucleotide
  Sense strand starting at position 699 of SEQ ID NO: 1245385
uuccuuagugcguaauuua

SEQ ID NO: 1558591 - RNA, 19 nt, Artificial Sequence
  Description of Artificial Sequence: Synthetic oligonucleotide
  Antisense strand to SEQ ID NO: 1558590
uaaauuacgcacuaaggaa

SEQ ID NO: 1558592 - RNA, 19 nt, Artificial Sequence
  Description of Artificial Sequence: Synthetic oligonucleotide
  Sense strand starting at position 702 of SEQ ID NO: 1245385
cuuagugcguaauuuaacu

SEQ ID NO: 1558593 - RNA, 19 nt, Artificial Sequence
  Description of Artificial Sequence: Synthetic oligonucleotide
  Antisense strand to SEQ ID NO: 1558592
aguuaaauuacgcacuaag

SEQ ID NO: 1558594 - RNA, 19 nt, Artificial Sequence
  Description of Artificial Sequence: Synthetic oligonucleotide
  Sense strand starting at position 726 of SEQ ID NO: 1245385
aguguaacaggaugguuua

SEQ ID NO: 1558595 - RNA, 19 nt, Artificial Sequence
  Description of Artificial Sequence: Synthetic oligonucleotide
  Antisense strand to SEQ ID NO: 1558594
uaaaccauccuguuacacu

SEQ ID NO: 1558596 - RNA, 19 nt, Artificial Sequence
  Description of Artificial Sequence: Synthetic oligonucleotide
  Sense strand starting at position 727 of SEQ ID NO: 1245385
guguaacaggaugguuuaa

SEQ ID NO: 1558597 - RNA, 19 nt, Artificial Sequence
  Description of Artificial Sequence: Synthetic oligonucleotide
  Antisense strand to SEQ ID NO: 1558596
uuaaaccauccuguuacac

SEQ ID NO: 1558598 - RNA, 19 nt, Artificial Sequence
  Description of Artificial Sequence: Synthetic oligonucleotide
  Sense strand starting at position 729 of SEQ ID NO: 1245385
guaacaggaugguuuaaau

SEQ ID NO: 1558599 - RNA, 19 nt, Artificial Sequence
  Description of Artificial Sequence: Synthetic oligonucleotide
  Antisense strand to SEQ ID NO: 1558598
auuuaaaccauccuguuac

SEQ ID NO: 1558600 - RNA, 19 nt, Artificial Sequence
  Description of Artificial Sequence: Synthetic oligonucleotide
  Sense strand starting at position 822 of SEQ ID NO: 1245385
ugugaaaucgacugugaaa

SEQ ID NO: 1558601 - RNA, 19 nt, Artificial Sequence
  Description of Artificial Sequence: Synthetic oligonucleotide
  Antisense strand to SEQ ID NO: 1558600
uuucacagucgauuucaca

SEQ ID NO: 1558602 - RNA, 19 nt, Artificial Sequence
  Description of Artificial Sequence: Synthetic oligonucleotide
  Sense strand starting at position 851 of SEQ ID NO: 1245385
guggaacguauauacauaa

SEQ ID NO: 1558603 - RNA, 19 nt, Artificial Sequence
  Description of Artificial Sequence: Synthetic oligonucleotide
  Antisense strand to SEQ ID NO: 1558602
uuauguauauacguuccac

SEQ ID NO: 1558604 - RNA, 19 nt, Artificial Sequence
  Description of Artificial Sequence: Synthetic oligonucleotide
  Sense strand starting at position 1639 of SEQ ID NO: 1245385
gggagaaguuucuucccaa

SEQ ID NO: 1558605 - RNA, 19 nt, Artificial Sequence
  Description of Artificial Sequence: Synthetic oligonucleotide
  Antisense strand to SEQ ID NO: 1558604
uugggaagaaacuucuccc

SEQ ID NO: 1558606 - RNA, 19 nt, Artificial Sequence
  Description of Artificial Sequence: Synthetic oligonucleotide
  Sense strand starting at position 1640 of SEQ ID NO: 1245385
ggagaaguuucuucccaac

SEQ ID NO: 1558607 - RNA, 19 nt, Artificial Sequence
  Description of Artificial Sequence: Synthetic oligonucleotide
  Antisense strand to SEQ ID NO: 1558606
guugggaagaaacuucucc

SEQ ID NO: 1558608 - RNA, 19 nt, Artificial Sequence
  Description of Artificial Sequence: Synthetic oligonucleotide
  Sense strand starting at position 2172 of SEQ ID NO: 1245385
cuuugcuguggucaggaua

SEQ ID NO: 1558609 - RNA, 19 nt, Artificial Sequence
  Description of Artificial Sequence: Synthetic oligonucleotide
  Antisense strand to SEQ ID NO: 1558608
uauccugaccacagcaaag

SEQ ID NO: 1558610 - RNA, 19 nt, Artificial Sequence
  Description of Artificial Sequence: Synthetic oligonucleotide
  Sense strand starting at position 2205 of SEQ ID NO: 1245385
gucacuucucccgacccaa

SEQ ID NO: 1558611 - RNA, 19 nt, Artificial Sequence
  Description of Artificial Sequence: Synthetic oligonucleotide
  Antisense strand to SEQ ID NO: 1558610
uugggucgggagaagugac

SEQ ID NO: 1558612 - RNA, 19 nt, Artificial Sequence
  Description of Artificial Sequence: Synthetic oligonucleotide
  Sense strand starting at position 2882 of SEQ ID NO: 1245385
gcuggaaucguguccgucu

SEQ ID NO: 1558613 - RNA, 19 nt, Artificial Sequence
  Description of Artificial Sequence: Synthetic oligonucleotide
  Antisense strand to SEQ ID NO: 1558612
agacggacacgauuccagc

SEQ ID NO: 1558614 - RNA, 19 nt, Artificial Sequence
  Description of Artificial Sequence: Synthetic oligonucleotide
  Sense strand starting at position 2916 of SEQ ID NO: 1245385
uccuaugagccuuguaaag

SEQ ID NO: 1558615 - RNA, 19 nt, Artificial Sequence
  Description of Artificial Sequence: Synthetic oligonucleotide
  Antisense strand to SEQ ID NO: 1558614
cuuuacaaggcucauagga

SEQ ID NO: 1558616 - RNA, 19 nt, Artificial Sequence
  Description of Artificial Sequence: Synthetic oligonucleotide
  Sense strand starting at position 2932 of SEQ ID NO: 1245385
aagccagucguugaagaag

SEQ ID NO: 1558617 - RNA, 19 nt, Artificial Sequence
  Description of Artificial Sequence: Synthetic oligonucleotide
  Antisense strand to SEQ ID NO: 1558616
cuucuucaacgacuggcuu

SEQ ID NO: 1558618 - RNA, 19 nt, Artificial Sequence
  Description of Artificial Sequence: Synthetic oligonucleotide
  Sense strand starting at position 2980 of SEQ ID NO: 1245385
cguaaagaugaagguuaau

SEQ ID NO: 1558619 - RNA, 19 nt, Artificial Sequence
  Description of Artificial Sequence: Synthetic oligonucleotide
  Antisense strand to SEQ ID NO: 1558618
auuaaccuucaucuuuacg

SEQ ID NO: 1558620 - RNA, 19 nt, Artificial Sequence
  Description of Artificial Sequence: Synthetic oligonucleotide
  Sense strand starting at position 2986 of SEQ ID NO: 1245385
gaugaagguuaaucaaggu

SEQ ID NO: 1558621 - RNA, 19 nt, Artificial Sequence
  Description of Artificial Sequence: Synthetic oligonucleotide
  Antisense strand to SEQ ID NO: 1558620
accuugauuaaccuucauc

SEQ ID NO: 1558622 - RNA, 19 nt, Artificial Sequence
  Description of Artificial Sequence: Synthetic oligonucleotide
  Sense strand starting at position 2995 of SEQ ID NO: 1245385
uaaucaagguccucaugga

SEQ ID NO: 1558623 - RNA, 19 nt, Artificial Sequence
  Description of Artificial Sequence: Synthetic oligonucleotide
  Antisense strand to SEQ ID NO: 1558622
uccaugaggaccuugauua

SEQ ID NO: 1558624 - RNA, 19 nt, Artificial Sequence
  Description of Artificial Sequence: Synthetic oligonucleotide
  Sense strand starting at position 3155 of SEQ ID NO: 1245385
cagaaucaucuucgacgga

SEQ ID NO: 1558625 - RNA, 19 nt, Artificial Sequence
  Description of Artificial Sequence: Synthetic oligonucleotide
  Antisense strand to SEQ ID NO: 1558624
uccgucgaagaugauucug

SEQ ID NO: 1558626 - RNA, 19 nt, Artificial Sequence
  Description of Artificial Sequence: Synthetic oligonucleotide
  Sense strand starting at position 3158 of SEQ ID NO: 1245385
aaucaucuucgacggauag

SEQ ID NO: 1558627 - RNA, 19 nt, Artificial Sequence
  Description of Artificial Sequence: Synthetic oligonucleotide
  Antisense strand to SEQ ID NO: 1558626
cuauccgucgaagaugauu

SEQ ID NO: 1558628 - RNA, 19 nt, Artificial Sequence
  Description of Artificial Sequence: Synthetic oligonucleotide
  Sense strand starting at position 3160 of SEQ ID NO: 1245385
ucaucuucgacggauagga

SEQ ID NO: 1558629 - RNA, 19 nt, Artificial Sequence
  Description of Artificial Sequence: Synthetic oligonucleotide
  Antisense strand to SEQ ID NO: 1558628
uccuauccgucgaagauga

SEQ ID NO: 1558630 - RNA, 19 nt, Artificial Sequence
  Description of Artificial Sequence: Synthetic oligonucleotide
  Sense strand starting at position 3164 of SEQ ID NO: 1245385
cuucgacggauaggaaaua

SEQ ID NO: 1558631 - RNA, 19 nt, Artificial Sequence
  Description of Artificial Sequence: Synthetic oligonucleotide
  Antisense strand to SEQ ID NO: 1558630
uauuuccuauccgucgaag

SEQ ID NO: 1558632 - RNA, 19 nt, Artificial Sequence
  Description of Artificial Sequence: Synthetic oligonucleotide
  Sense strand starting at position 3233 of SEQ ID NO: 1245385
cauauaaggguuugaacau

SEQ ID NO: 1558633 - RNA, 19 nt, Artificial Sequence
  Description of Artificial Sequence: Synthetic oligonucleotide
  Antisense strand to SEQ ID NO: 1558632
auguucaaacccuuauaug

SEQ ID NO: 1558634 - RNA, 19 nt, Artificial Sequence
  Description of Artificial Sequence: Synthetic oligonucleotide
  Sense strand starting at position 3291 of SEQ ID NO: 1245385
aggcguuaaagagacacau

SEQ ID NO: 1558635 - RNA, 19 nt, Artificial Sequence
  Description of Artificial Sequence: Synthetic oligonucleotide
  Antisense strand to SEQ ID NO: 1558634
augugucucuuuaacgccu

SEQ ID NO: 1558636 - RNA, 19 nt, Artificial Sequence
  Description of Artificial Sequence: Synthetic oligonucleotide
  Sense strand starting at position 3293 of SEQ ID NO: 1245385
gcguuaaagagacacauaa

SEQ ID NO: 1558637 - RNA, 19 nt, Artificial Sequence
  Description of Artificial Sequence: Synthetic oligonucleotide
  Antisense strand to SEQ ID NO: 1558636
uuaugugucucuuuaacgc

SEQ ID NO: 1558638 - RNA, 19 nt, Artificial Sequence
  Description of Artificial Sequence: Synthetic oligonucleotide
  Sense strand starting at position 3697 of SEQ ID NO: 1245385
cuuugaagauguucuauau

SEQ ID NO: 1558639 - RNA, 19 nt, Artificial Sequence
  Description of Artificial Sequence: Synthetic oligonucleotide
  Antisense strand to SEQ ID NO: 1558638
auauagaacaucuucaaag

SEQ ID NO: 1558640 - RNA, 19 nt, Artificial Sequence
  Description of Artificial Sequence: Synthetic oligonucleotide
  Sense strand starting at position 3703 of SEQ ID NO: 1245385
agauguucuauauggaguu

SEQ ID NO: 1558641 - RNA, 19 nt, Artificial Sequence
  Description of Artificial Sequence: Synthetic oligonucleotide
  Antisense strand to SEQ ID NO: 1558640
aacuccauauagaacaucu

SEQ ID NO: 1558642 - RNA, 19 nt, Artificial Sequence
  Description of Artificial Sequence: Synthetic oligonucleotide
  Sense strand starting at position 3740 of SEQ ID NO: 1245385
gucagaaugucaccuacaa

SEQ ID NO: 1558643 - RNA, 19 nt, Artificial Sequence
  Description of Artificial Sequence: Synthetic oligonucleotide
  Antisense strand to SEQ ID NO: 1558642
uuguaggugacauucugac

SEQ ID NO: 1558644 - RNA, 19 nt, Artificial Sequence
  Description of Artificial Sequence: Synthetic oligonucleotide
  Sense strand starting at position 3873 of SEQ ID NO: 1245385
uguaaauaaccuggaaagu

SEQ ID NO: 1558645 - RNA, 19 nt, Artificial Sequence
  Description of Artificial Sequence: Synthetic oligonucleotide
  Antisense strand to SEQ ID NO: 1558644
acuuuccagguuauuuaca

SEQ ID NO: 1558646 - RNA, 19 nt, Artificial Sequence
  Description of Artificial Sequence: Synthetic oligonucleotide
  Sense strand starting at position 3916 of SEQ ID NO: 1245385
acuuguuuccaggaauauu

SEQ ID NO: 1558647 - RNA, 19 nt, Artificial Sequence
  Description of Artificial Sequence: Synthetic oligonucleotide
  Antisense strand to SEQ ID NO: 1558646
aauauuccuggaaacaagu

SEQ ID NO: 1558648 - RNA, 19 nt, Artificial Sequence
  Description of Artificial Sequence: Synthetic oligonucleotide
  Sense strand starting at position 3968 of SEQ ID NO: 1245385
uggaaagucuuacugaguu

SEQ ID NO: 1558649 - RNA, 19 nt, Artificial Sequence
  Description of Artificial Sequence: Synthetic oligonucleotide
  Antisense strand to SEQ ID NO: 1558648
aacucaguaagacuuucca

SEQ ID NO: 1558650 - RNA, 19 nt, Artificial Sequence
  Description of Artificial Sequence: Synthetic oligonucleotide
  Sense strand starting at position 3980 of SEQ ID NO: 1245385
cugaguuugguguaacaaa

SEQ ID NO: 1558651 - RNA, 19 nt, Artificial Sequence
  Description of Artificial Sequence: Synthetic oligonucleotide
  Antisense strand to SEQ ID NO: 1558650
uuuguuacaccaaacucag

SEQ ID NO: 1558652 - RNA, 19 nt, Artificial Sequence
  Description of Artificial Sequence: Synthetic oligonucleotide
  Sense strand starting at position 19 of SEQ ID NO: 1245386
ggaacuucuugcccguuaa

SEQ ID NO: 1558653 - RNA, 19 nt, Artificial Sequence
  Description of Artificial Sequence: Synthetic oligonucleotide
  Antisense strand to SEQ ID NO: 1558652
uuaacgggcaagaaguucc

SEQ ID NO: 1558654 - RNA, 19 nt, Artificial Sequence
  Description of Artificial Sequence: Synthetic oligonucleotide
  Sense strand starting at position 20 of SEQ ID NO: 1245386
gaacuucuugcccguuaaa

SEQ ID NO: 1558655 - RNA, 19 nt, Artificial Sequence
  Description of Artificial Sequence: Synthetic oligonucleotide
  Antisense strand to SEQ ID NO: 1558654
uuuaacgggcaagaaguuc

SEQ ID NO: 1558656 - RNA, 19 nt, Artificial Sequence
  Description of Artificial Sequence: Synthetic oligonucleotide
  Sense strand starting at position 23 of SEQ ID NO: 1245386
cuucuugcccguuaaaguu

SEQ ID NO: 1558657 - RNA, 19 nt, Artificial Sequence
  Description of Artificial Sequence: Synthetic oligonucleotide
  Antisense strand to SEQ ID NO: 1558656
aacuuuaacgggcaagaag

SEQ ID NO: 1558658 - RNA, 19 nt, Artificial Sequence
  Description of Artificial Sequence: Synthetic oligonucleotide
  Sense strand starting at position 31 of SEQ ID NO: 1245386
ccguuaaaguuuguuugga

SEQ ID NO: 1558659 - RNA, 19 nt, Artificial Sequence
  Description of Artificial Sequence: Synthetic oligonucleotide
  Antisense strand to SEQ ID NO: 1558658
uccaaacaaacuuuaacgg

SEQ ID NO: 1558660 - RNA, 19 nt, Artificial Sequence
  Description of Artificial Sequence: Synthetic oligonucleotide
  Sense strand starting at position 32 of SEQ ID NO: 1245386
cguuaaaguuuguuuggaa

SEQ ID NO: 1558661 - RNA, 19 nt, Artificial Sequence
  Description of Artificial Sequence: Synthetic oligonucleotide
  Antisense strand to SEQ ID NO: 1558660
uuccaaacaaacuuuaacg

SEQ ID NO: 1558662 - RNA, 19 nt, Artificial Sequence
  Description of Artificial Sequence: Synthetic oligonucleotide
  Sense strand starting at position 33 of SEQ ID NO: 1245386
guuaaaguuuguuuggaaa

SEQ ID NO: 1558663 - RNA, 19 nt, Artificial Sequence
  Description of Artificial Sequence: Synthetic oligonucleotide
  Antisense strand to SEQ ID NO: 1558662
uuuccaaacaaacuuuaac

SEQ ID NO: 1558664 - RNA, 19 nt, Artificial Sequence
  Description of Artificial Sequence: Synthetic oligonucleotide
  Sense strand starting at position 36 of SEQ ID NO: 1245386
aaaguuuguuuggaaaucu

SEQ ID NO: 1558665 - RNA, 19 nt, Artificial Sequence
  Description of Artificial Sequence: Synthetic oligonucleotide
  Antisense strand to SEQ ID NO: 1558664
agauuuccaaacaaacuuu

SEQ ID NO: 1558666 - RNA, 19 nt, Artificial Sequence
  Description of Artificial Sequence: Synthetic oligonucleotide
  Sense strand starting at position 351 of SEQ ID NO: 1245386
uuuauaucgugaucagcau

SEQ ID NO: 1558667 - RNA, 19 nt, Artificial Sequence
  Description of Artificial Sequence: Synthetic oligonucleotide
  Antisense strand to SEQ ID NO: 1558666
augcugaucacgauauaaa

SEQ ID NO: 1558668 - RNA, 19 nt, Artificial Sequence
  Description of Artificial Sequence: Synthetic oligonucleotide
  Sense strand starting at position 352 of SEQ ID NO: 1245386
uuauaucgugaucagcauu

SEQ ID NO: 1558669 - RNA, 19 nt, Artificial Sequence
  Description of Artificial Sequence: Synthetic oligonucleotide
  Antisense strand to SEQ ID NO: 1558668
aaugcugaucacgauauaa

SEQ ID NO: 1558670 - RNA, 19 nt, Artificial Sequence
  Description of Artificial Sequence: Synthetic oligonucleotide
  Sense strand starting at position 355 of SEQ ID NO: 1245386
uaucgugaucagcauucuu

SEQ ID NO: 1558671 - RNA, 19 nt, Artificial Sequence
  Description of Artificial Sequence: Synthetic oligonucleotide
  Antisense strand to SEQ ID NO: 1558670
aagaaugcugaucacgaua

SEQ ID NO: 1558672 - RNA, 19 nt, Artificial Sequence
  Description of Artificial Sequence: Synthetic oligonucleotide
  Sense strand starting at position 378 of SEQ ID NO: 1245386
acuacagucuuguuaggaa

SEQ ID NO: 1558673 - RNA, 19 nt, Artificial Sequence
  Description of Artificial Sequence: Synthetic oligonucleotide
  Antisense strand to SEQ ID NO: 1558672
uuccuaacaagacuguagu

SEQ ID NO: 1558674 - RNA, 19 nt, Artificial Sequence
  Description of Artificial Sequence: Synthetic oligonucleotide
  Sense strand starting at position 385 of SEQ ID NO: 1245386
ucuuguuaggaaggcuaau

SEQ ID NO: 1558675 - RNA, 19 nt, Artificial Sequence
  Description of Artificial Sequence: Synthetic oligonucleotide
  Antisense strand to SEQ ID NO: 1558674
auuagccuuccuaacaaga

SEQ ID NO: 1558676 - RNA, 19 nt, Artificial Sequence
  Description of Artificial Sequence: Synthetic oligonucleotide
  Sense strand starting at position 391 of SEQ ID NO: 1245386
uaggaaggcuaauaggaau

SEQ ID NO: 1558677 - RNA, 19 nt, Artificial Sequence
  Description of Artificial Sequence: Synthetic oligonucleotide
  Antisense strand to SEQ ID NO: 1558676
auuccuauuagccuuccua

SEQ ID NO: 1558678 - RNA, 19 nt, Artificial Sequence
  Description of Artificial Sequence: Synthetic oligonucleotide
  Sense strand starting at position 435 of SEQ ID NO: 1245386
gcaucaagcuacuuaggaa

SEQ ID NO: 1558679 - RNA, 19 nt, Artificial Sequence
  Description of Artificial Sequence: Synthetic oligonucleotide
  Antisense strand to SEQ ID NO: 1558678
uuccuaaguagcuugaugc

SEQ ID NO: 1558680 - RNA, 19 nt, Artificial Sequence
  Description of Artificial Sequence: Synthetic oligonucleotide
  Sense strand starting at position 573 of SEQ ID NO: 1245386
caugcagcaccguaaacau

SEQ ID NO: 1558681 - RNA, 19 nt, Artificial Sequence
  Description of Artificial Sequence: Synthetic oligonucleotide
  Antisense strand to SEQ ID NO: 1558680
auguuuacggugcugcaug

SEQ ID NO: 1558682 - RNA, 19 nt, Artificial Sequence
  Description of Artificial Sequence: Synthetic oligonucleotide
  Sense strand starting at position 583 of SEQ ID NO: 1245386
cguaaacauuucgauggga

SEQ ID NO: 1558683 - RNA, 19 nt, Artificial Sequence
  Description of Artificial Sequence: Synthetic oligonucleotide
  Antisense strand to SEQ ID NO: 1558682
ucccaucgaaauguuuacg

SEQ ID NO: 1558684 - RNA, 19 nt, Artificial Sequence
  Description of Artificial Sequence: Synthetic oligonucleotide
  Sense strand starting at position 686 of SEQ ID NO: 1245386
cgggcauggcuccgauaaa

SEQ ID NO: 1558685 - RNA, 19 nt, Artificial Sequence
  Description of Artificial Sequence: Synthetic oligonucleotide
  Antisense strand to SEQ ID NO: 1558684
uuuaucggagccaugcccg

SEQ ID NO: 1558686 - RNA, 19 nt, Artificial Sequence
  Description of Artificial Sequence: Synthetic oligonucleotide
  Sense strand starting at position 727 of SEQ ID NO: 1245386
guugcuucgccaguuacua

SEQ ID NO: 1558687 - RNA, 19 nt, Artificial Sequence
  Description of Artificial Sequence: Synthetic oligonucleotide
  Antisense strand to SEQ ID NO: 1558686
uaguaacuggcgaagcaac

SEQ ID NO: 1558688 - RNA, 19 nt, Artificial Sequence
  Description of Artificial Sequence: Synthetic oligonucleotide
  Sense strand starting at position 738 of SEQ ID NO: 1245386
aguuacuaaagaugaguga

SEQ ID NO: 1558689 - RNA, 19 nt, Artificial Sequence
  Description of Artificial Sequence: Synthetic oligonucleotide
  Antisense strand to SEQ ID NO: 1558688
ucacucaucuuuaguaacu

SEQ ID NO: 1558690 - RNA, 19 nt, Artificial Sequence
  Description of Artificial Sequence: Synthetic oligonucleotide
  Sense strand starting at position 816 of SEQ ID NO: 1245386
cccggugucaccugaaugu

SEQ ID NO: 1558691 - RNA, 19 nt, Artificial Sequence
  Description of Artificial Sequence: Synthetic oligonucleotide
  Antisense strand to SEQ ID NO: 1558690
acauucaggugacaccggg

SEQ ID NO: 1558692 - RNA, 19 nt, Artificial Sequence
  Description of Artificial Sequence: Synthetic oligonucleotide
  Sense strand starting at position 823 of SEQ ID NO: 1245386
ucaccugaaugucugcaaa

SEQ ID NO: 1558693 - RNA, 19 nt, Artificial Sequence
  Description of Artificial Sequence: Synthetic oligonucleotide
  Antisense strand to SEQ ID NO: 1558692
uuugcagacauucagguga

SEQ ID NO: 1558694 - RNA, 19 nt, Artificial Sequence
  Description of Artificial Sequence: Synthetic oligonucleotide
  Sense strand starting at position 1139 of SEQ ID NO: 1245386
agauuaugucaacgcagga

SEQ ID NO: 1558695 - RNA, 19 nt, Artificial Sequence
  Description of Artificial Sequence: Synthetic oligonucleotide
  Antisense strand to SEQ ID NO: 1558694
uccugcguugacauaaucu

SEQ ID NO: 1558696 - RNA, 19 nt, Artificial Sequence
  Description of Artificial Sequence: Synthetic oligonucleotide
  Sense strand starting at position 1301 of SEQ ID NO: 1245386
guucgguggcaucggauau

SEQ ID NO: 1558697 - RNA, 19 nt, Artificial Sequence
  Description of Artificial Sequence: Synthetic oligonucleotide
  Antisense strand to SEQ ID NO: 1558696
auauccgaugccaccgaac

SEQ ID NO: 1558698 - RNA, 19 nt, Artificial Sequence
  Description of Artificial Sequence: Synthetic oligonucleotide
  Sense strand starting at position 1302 of SEQ ID NO: 1245386
uucgguggcaucggauauu

SEQ ID NO: 1558699 - RNA, 19 nt, Artificial Sequence
  Description of Artificial Sequence: Synthetic oligonucleotide
  Antisense strand to SEQ ID NO: 1558698
aauauccgaugccaccgaa

SEQ ID NO: 1558700 - RNA, 19 nt, Artificial Sequence
  Description of Artificial Sequence: Synthetic oligonucleotide
  Sense strand starting at position 2586 of SEQ ID NO: 1245386
guagaucuacaagacuguu

SEQ ID NO: 1558701 - RNA, 19 nt, Artificial Sequence
  Description of Artificial Sequence: Synthetic oligonucleotide
  Antisense strand to SEQ ID NO: 1558700
aacagucuuguagaucuac

SEQ ID NO: 1558702 - RNA, 19 nt, Artificial Sequence
  Description of Artificial Sequence: Synthetic oligonucleotide
  Sense strand starting at position 2594 of SEQ ID NO: 1245386
acaagacuguuacagguuu

SEQ ID NO: 1558703 - RNA, 19 nt, Artificial Sequence
  Description of Artificial Sequence: Synthetic oligonucleotide
  Antisense strand to SEQ ID NO: 1558702
aaaccuguaacagucuugu

SEQ ID NO: 1558704 - RNA, 19 nt, Artificial Sequence
  Description of Artificial Sequence: Synthetic oligonucleotide
  Sense strand starting at position 2650 of SEQ ID NO: 1245386
gccaaauucccagagcaca

SEQ ID NO: 1558705 - RNA, 19 nt, Artificial Sequence
  Description of Artificial Sequence: Synthetic oligonucleotide
  Antisense strand to SEQ ID NO: 1558704
ugugcucugggaauuuggc

SEQ ID NO: 1558706 - RNA, 19 nt, Artificial Sequence
  Description of Artificial Sequence: Synthetic oligonucleotide
  Sense strand starting at position 2761 of SEQ ID NO: 1245386
gcuagaaagaucugucguu

SEQ ID NO: 1558707 - RNA, 19 nt, Artificial Sequence
  Description of Artificial Sequence: Synthetic oligonucleotide
  Antisense strand to SEQ ID NO: 1558706
aacgacagaucuuucuagc

SEQ ID NO: 1558708 - RNA, 19 nt, Artificial Sequence
  Description of Artificial Sequence: Synthetic oligonucleotide
  Sense strand starting at position 2762 of SEQ ID NO: 1245386
cuagaaagaucugucguuc

SEQ ID NO: 1558709 - RNA, 19 nt, Artificial Sequence
  Description of Artificial Sequence: Synthetic oligonucleotide
  Antisense strand to SEQ ID NO: 1558708
gaacgacagaucuuucuag

SEQ ID NO: 1558710 - RNA, 19 nt, Artificial Sequence
  Description of Artificial Sequence: Synthetic oligonucleotide
  Sense strand starting at position 2766 of SEQ ID NO: 1245386
aaagaucugucguuccauc

SEQ ID NO: 1558711 - RNA, 19 nt, Artificial Sequence
  Description of Artificial Sequence: Synthetic oligonucleotide
  Antisense strand to SEQ ID NO: 1558710
gauggaacgacagaucuuu

SEQ ID NO: 1558712 - RNA, 19 nt, Artificial Sequence
  Description of Artificial Sequence: Synthetic oligonucleotide
  Sense strand starting at position 3103 of SEQ ID NO: 1245386
uguguaugaaugugcaagu

SEQ ID NO: 1558713 - RNA, 19 nt, Artificial Sequence
  Description of Artificial Sequence: Synthetic oligonucleotide
  Antisense strand to SEQ ID NO: 1558712
acuugcacauucauacaca

SEQ ID NO: 1558714 - RNA, 19 nt, Artificial Sequence
  Description of Artificial Sequence: Synthetic oligonucleotide
  Sense strand starting at position 3177 of SEQ ID NO: 1245386
aggaacuaaugucuacuua

SEQ ID NO: 1558715 - RNA, 19 nt, Artificial Sequence
  Description of Artificial Sequence: Synthetic oligonucleotide
  Antisense strand to SEQ ID NO: 1558714
uaaguagacauuaguuccu

SEQ ID NO: 1558716 - RNA, 19 nt, Artificial Sequence
  Description of Artificial Sequence: Synthetic oligonucleotide
  Sense strand starting at position 3220 of SEQ ID NO: 1245386
gguaucagccaguggguua

SEQ ID NO: 1558717 - RNA, 19 nt, Artificial Sequence
  Description of Artificial Sequence: Synthetic oligonucleotide
  Antisense strand to SEQ ID NO: 1558716
uaacccacuggcugauacc

SEQ ID NO: 1558718 - RNA, 19 nt, Artificial Sequence
  Description of Artificial Sequence: Synthetic oligonucleotide
  Sense strand starting at position 3225 of SEQ ID NO: 1245386
cagccaguggguuacaaua

SEQ ID NO: 1558719 - RNA, 19 nt, Artificial Sequence
  Description of Artificial Sequence: Synthetic oligonucleotide
  Antisense strand to SEQ ID NO: 1558718
uauuguaacccacuggcug

SEQ ID NO: 1558720 - RNA, 19 nt, Artificial Sequence
  Description of Artificial Sequence: Synthetic oligonucleotide
  Sense strand starting at position 3280 of SEQ ID NO: 1245386
uauguuaugcuguauuaag

SEQ ID NO: 1558721 - RNA, 19 nt, Artificial Sequence
  Description of Artificial Sequence: Synthetic oligonucleotide
  Antisense strand to SEQ ID NO: 1558720
cuuaauacagcauaacaua

SEQ ID NO: 1558722 - RNA, 19 nt, Artificial Sequence
  Description of Artificial Sequence: Synthetic oligonucleotide
  Sense strand starting at position 3314 of SEQ ID NO: 1245386
cauauuguuuagcuccgaa

SEQ ID NO: 1558723 - RNA, 19 nt, Artificial Sequence
  Description of Artificial Sequence: Synthetic oligonucleotide
  Antisense strand to SEQ ID NO: 1558722
uucggagcuaaacaauaug

SEQ ID NO: 1558724 - RNA, 19 nt, Artificial Sequence
  Description of Artificial Sequence: Synthetic oligonucleotide
  Sense strand starting at position 3363 of SEQ ID NO: 1245386
acagguaugguuugugaga

SEQ ID NO: 1558725 - RNA, 19 nt, Artificial Sequence
  Description of Artificial Sequence: Synthetic oligonucleotide
  Antisense strand to SEQ ID NO: 1558724
ucucacaaaccauaccugu

SEQ ID NO: 1558726 - RNA, 19 nt, Artificial Sequence
  Description of Artificial Sequence: Synthetic oligonucleotide
  Sense strand starting at position 3364 of SEQ ID NO: 1245386
cagguaugguuugugagag

SEQ ID NO: 1558727 - RNA, 19 nt, Artificial Sequence
  Description of Artificial Sequence: Synthetic oligonucleotide
  Antisense strand to SEQ ID NO: 1558726
cucucacaaaccauaccug

SEQ ID NO: 1558728 - RNA, 19 nt, Artificial Sequence
  Description of Artificial Sequence: Synthetic oligonucleotide
  Sense strand starting at position 3370 of SEQ ID NO: 1245386
ugguuugugagagaccuau

SEQ ID NO: 1558729 - RNA, 19 nt, Artificial Sequence
  Description of Artificial Sequence: Synthetic oligonucleotide
  Antisense strand to SEQ ID NO: 1558728
auaggucucucacaaacca

SEQ ID NO: 1558730 - RNA, 19 nt, Artificial Sequence
  Description of Artificial Sequence: Synthetic oligonucleotide
  Sense strand starting at position 3380 of SEQ ID NO: 1245386
gagaccuauuuguaauugu

SEQ ID NO: 1558731 - RNA, 19 nt, Artificial Sequence
  Description of Artificial Sequence: Synthetic oligonucleotide
  Antisense strand to SEQ ID NO: 1558730
acaauuacaaauaggucuc

SEQ ID NO: 1558732 - RNA, 19 nt, Artificial Sequence
  Description of Artificial Sequence: Synthetic oligonucleotide
  Sense strand starting at position 6 of SEQ ID NO: 1245387
cgggaugucucaucugaag

SEQ ID NO: 1558733 - RNA, 19 nt, Artificial Sequence
  Description of Artificial Sequence: Synthetic oligonucleotide
  Antisense strand to SEQ ID NO: 1558732
cuucagaugagacaucccg

SEQ ID NO: 1558734 - RNA, 19 nt, Artificial Sequence
  Description of Artificial Sequence: Synthetic oligonucleotide
  Sense strand starting at position 8 of SEQ ID NO: 1245387
ggaugucucaucugaaguu

SEQ ID NO: 1558735 - RNA, 19 nt, Artificial Sequence
  Description of Artificial Sequence: Synthetic oligonucleotide
  Antisense strand to SEQ ID NO: 1558734
aacuucagaugagacaucc

SEQ ID NO: 1558736 - RNA, 19 nt, Artificial Sequence
  Description of Artificial Sequence: Synthetic oligonucleotide
  Sense strand starting at position 15 of SEQ ID NO: 1245387
ucaucugaaguuugagguu

SEQ ID NO: 1558737 - RNA, 19 nt, Artificial Sequence
  Description of Artificial Sequence: Synthetic oligonucleotide
  Antisense strand to SEQ ID NO: 1558736
aaccucaaacuucagauga

SEQ ID NO: 1558738 - RNA, 19 nt, Artificial Sequence
  Description of Artificial Sequence: Synthetic oligonucleotide
  Sense strand starting at position 21 of SEQ ID NO: 1245387
gaaguuugagguuaggcaa

SEQ ID NO: 1558739 - RNA, 19 nt, Artificial Sequence
  Description of Artificial Sequence: Synthetic oligonucleotide
  Antisense strand to SEQ ID NO: 1558738
uugccuaaccucaaacuuc

SEQ ID NO: 1558740 - RNA, 19 nt, Artificial Sequence
  Description of Artificial Sequence: Synthetic oligonucleotide
  Sense strand starting at position 24 of SEQ ID NO: 1245387
guuugagguuaggcaacau

SEQ ID NO: 1558741 - RNA, 19 nt, Artificial Sequence
  Description of Artificial Sequence: Synthetic oligonucleotide
  Antisense strand to SEQ ID NO: 1558740
auguugccuaaccucaaac

SEQ ID NO: 1558742 - RNA, 19 nt, Artificial Sequence
  Description of Artificial Sequence: Synthetic oligonucleotide
  Sense strand starting at position 50 of SEQ ID NO: 1245387
agaugauucugacuugauc

SEQ ID NO: 1558743 - RNA, 19 nt, Artificial Sequence
  Description of Artificial Sequence: Synthetic oligonucleotide
  Antisense strand to SEQ ID NO: 1558742
gaucaagucagaaucaucu

SEQ ID NO: 1558744 - RNA, 19 nt, Artificial Sequence
  Description of Artificial Sequence: Synthetic oligonucleotide
  Sense strand starting at position 75 of SEQ ID NO: 1245387
cguguuucugccucucuau

SEQ ID NO: 1558745 - RNA, 19 nt, Artificial Sequence
  Description of Artificial Sequence: Synthetic oligonucleotide
  Antisense strand to SEQ ID NO: 1558744
auagagaggcagaaacacg

SEQ ID NO: 1558746 - RNA, 19 nt, Artificial Sequence
  Description of Artificial Sequence: Synthetic oligonucleotide
  Sense strand starting at position 114 of SEQ ID NO: 1245387
uguaaucauccagaggcua

SEQ ID NO: 1558747 - RNA, 19 nt, Artificial Sequence
  Description of Artificial Sequence: Synthetic oligonucleotide
  Antisense strand to SEQ ID NO: 1558746
uagccucuggaugauuaca

SEQ ID NO: 1558748 - RNA, 19 nt, Artificial Sequence
  Description of Artificial Sequence: Synthetic oligonucleotide
  Sense strand starting at position 165 of SEQ ID NO: 1245387
uuacuacuguugucacuaa

SEQ ID NO: 1558749 - RNA, 19 nt, Artificial Sequence
  Description of Artificial Sequence: Synthetic oligonucleotide
  Antisense strand to SEQ ID NO: 1558748
uuagugacaacaguaguaa

SEQ ID NO: 1558750 - RNA, 19 nt, Artificial Sequence
  Description of Artificial Sequence: Synthetic oligonucleotide
  Sense strand starting at position 235 of SEQ ID NO: 1245387
gccuuagacuagcuaugac

SEQ ID NO: 1558751 - RNA, 19 nt, Artificial Sequence
  Description of Artificial Sequence: Synthetic oligonucleotide
  Antisense strand to SEQ ID NO: 1558750
gucauagcuagucuaaggc

SEQ ID NO: 1558752 - RNA, 19 nt, Artificial Sequence
  Description of Artificial Sequence: Synthetic oligonucleotide
  Sense strand starting at position 252 of SEQ ID NO: 1245387
acaacauaucaauguguug

SEQ ID NO: 1558753 - RNA, 19 nt, Artificial Sequence
  Description of Artificial Sequence: Synthetic oligonucleotide
  Antisense strand to SEQ ID NO: 1558752
caacacauugauauguugu

SEQ ID NO: 1558754 - RNA, 19 nt, Artificial Sequence
  Description of Artificial Sequence: Synthetic oligonucleotide
  Sense strand starting at position 348 of SEQ ID NO: 1245387
gagaccauguguguccaaa

SEQ ID NO: 1558755 - RNA, 19 nt, Artificial Sequence
  Description of Artificial Sequence: Synthetic oligonucleotide
  Antisense strand to SEQ ID NO: 1558754
uuuggacacacauggucuc

SEQ ID NO: 1558756 - RNA, 19 nt, Artificial Sequence
  Description of Artificial Sequence: Synthetic oligonucleotide
  Sense strand starting at position 2651 of SEQ ID NO: 1245387
uucggagagcucugauaac

SEQ ID NO: 1558757 - RNA, 19 nt, Artificial Sequence
  Description of Artificial Sequence: Synthetic oligonucleotide
  Antisense strand to SEQ ID NO: 1558756
guuaucagagcucuccgaa

SEQ ID NO: 1558758 - RNA, 19 nt, Artificial Sequence
  Description of Artificial Sequence: Synthetic oligonucleotide
  Sense strand starting at position 2897 of SEQ ID NO: 1245387
cgaaacgcguaauuuaaua

SEQ ID NO: 1558759 - RNA, 19 nt, Artificial Sequence
  Description of Artificial Sequence: Synthetic oligonucleotide
  Antisense strand to SEQ ID NO: 1558758
uauuaaauuacgcguuucg

SEQ ID NO: 1558760 - RNA, 19 nt, Artificial Sequence
  Description of Artificial Sequence: Synthetic oligonucleotide
  Sense strand starting at position 2938 of SEQ ID NO: 1245387
uccucuugggcuuauugaa

SEQ ID NO: 1558761 - RNA, 19 nt, Artificial Sequence
  Description of Artificial Sequence: Synthetic oligonucleotide
  Antisense strand to SEQ ID NO: 1558760
uucaauaagcccaagagga

SEQ ID NO: 1558762 - RNA, 19 nt, Artificial Sequence
  Description of Artificial Sequence: Synthetic oligonucleotide
  Sense strand starting at position 2963 of SEQ ID NO: 1245387
auaagauagugcuugcaac

SEQ ID NO: 1558763 - RNA, 19 nt, Artificial Sequence
  Description of Artificial Sequence: Synthetic oligonucleotide
  Antisense strand to SEQ ID NO: 1558762
guugcaagcacuaucuuau

SEQ ID NO: 1558764 - RNA, 19 nt, Artificial Sequence
  Description of Artificial Sequence: Synthetic oligonucleotide
  Sense strand starting at position 2964 of SEQ ID NO: 1245387
uaagauagugcuugcaaca

SEQ ID NO: 1558765 - RNA, 19 nt, Artificial Sequence
  Description of Artificial Sequence: Synthetic oligonucleotide
  Antisense strand to SEQ ID NO: 1558764
uguugcaagcacuaucuua

SEQ ID NO: 1558766 - RNA, 19 nt, Artificial Sequence
  Description of Artificial Sequence: Synthetic oligonucleotide
  Sense strand starting at position 2991 of SEQ ID NO: 1245387
aguaaacauuugggaaaua

SEQ ID NO: 1558767 - RNA, 19 nt, Artificial Sequence
  Description of Artificial Sequence: Synthetic oligonucleotide
  Antisense strand to SEQ ID NO: 1558766
uauuucccaaauguuuacu

SEQ ID NO: 1558768 - RNA, 19 nt, Artificial Sequence
  Description of Artificial Sequence: Synthetic oligonucleotide
  Sense strand starting at position 2992 of SEQ ID NO: 1245387
guaaacauuugggaaauaa

SEQ ID NO: 1558769 - RNA, 19 nt, Artificial Sequence
  Description of Artificial Sequence: Synthetic oligonucleotide
  Antisense strand to SEQ ID NO: 1558768
uuauuucccaaauguuuac

SEQ ID NO: 1558770 - RNA, 19 nt, Artificial Sequence
  Description of Artificial Sequence: Synthetic oligonucleotide
  Sense strand starting at position 3002 of SEQ ID NO: 1245387
gggaaauaauaugaugauu

SEQ ID NO: 1558771 - RNA, 19 nt, Artificial Sequence
  Description of Artificial Sequence: Synthetic oligonucleotide
  Antisense strand to SEQ ID NO: 1558770
aaucaucauauuauuuccc

SEQ ID NO: 1558772 - RNA, 19 nt, Artificial Sequence
  Description of Artificial Sequence: Synthetic oligonucleotide
  Sense strand starting at position 3014 of SEQ ID NO: 1245387
gaugauuggauguguuaau

SEQ ID NO: 1558773 - RNA, 19 nt, Artificial Sequence
  Description of Artificial Sequence: Synthetic oligonucleotide
  Antisense strand to SEQ ID NO: 1558772
auuaacacauccaaucauc

SEQ ID NO: 1558774 - RNA, 19 nt, Artificial Sequence
  Description of Artificial Sequence: Synthetic oligonucleotide
  Sense strand starting at position 3047 of SEQ ID NO: 1245387
ucuauauggccucaguuga

SEQ ID NO: 1558775 - RNA, 19 nt, Artificial Sequence
  Description of Artificial Sequence: Synthetic oligonucleotide
  Antisense strand to SEQ ID NO: 1558774
ucaacugaggccauauaga

SEQ ID NO: 1558776 - RNA, 19 nt, Artificial Sequence
  Description of Artificial Sequence: Synthetic oligonucleotide
  Sense strand starting at position 3075 of SEQ ID NO: 1245387
guuaauugacuuugguuua

SEQ ID NO: 1558777 - RNA, 19 nt, Artificial Sequence
  Description of Artificial Sequence: Synthetic oligonucleotide
  Antisense strand to SEQ ID NO: 1558776
uaaaccaaagucaauuaac

SEQ ID NO: 1558778 - RNA, 19 nt, Artificial Sequence
  Description of Artificial Sequence: Synthetic oligonucleotide
  Sense strand starting at position 3176 of SEQ ID NO: 1245387
auggaagagaccgguugua

SEQ ID NO: 1558779 - RNA, 19 nt, Artificial Sequence
  Description of Artificial Sequence: Synthetic oligonucleotide
  Antisense strand to SEQ ID NO: 1558778
uacaaccggucucuuccau

SEQ ID NO: 1558780 - RNA, 19 nt, Artificial Sequence
  Description of Artificial Sequence: Synthetic oligonucleotide
  Sense strand starting at position 3302 of SEQ ID NO: 1245387
gugaaauaaugcccagcua

SEQ ID NO: 1558781 - RNA, 19 nt, Artificial Sequence
  Description of Artificial Sequence: Synthetic oligonucleotide
  Antisense strand to SEQ ID NO: 1558780
uagcugggcauuauuucac

SEQ ID NO: 1558782 - RNA, 19 nt, Artificial Sequence
  Description of Artificial Sequence: Synthetic oligonucleotide
  Sense strand starting at position 3303 of SEQ ID NO: 1245387
ugaaauaaugcccagcuaa

SEQ ID NO: 1558783 - RNA, 19 nt, Artificial Sequence
  Description of Artificial Sequence: Synthetic oligonucleotide
  Antisense strand to SEQ ID NO: 1558782
uuagcugggcauuauuuca

SEQ ID NO: 1558784 - RNA, 19 nt, Artificial Sequence
  Description of Artificial Sequence: Synthetic oligonucleotide
  Sense strand starting at position 3321 of SEQ ID NO: 1245387
agguauuagcuccaugaug

SEQ ID NO: 1558785 - RNA, 19 nt, Artificial Sequence
  Description of Artificial Sequence: Synthetic oligonucleotide
  Antisense strand to SEQ ID NO: 1558784
caucauggagcuaauaccu

SEQ ID NO: 1558786 - RNA, 19 nt, Artificial Sequence
  Description of Artificial Sequence: Synthetic oligonucleotide
  Sense strand starting at position 3323 of SEQ ID NO: 1245387
guauuagcuccaugaugga

SEQ ID NO: 1558787 - RNA, 19 nt, Artificial Sequence
  Description of Artificial Sequence: Synthetic oligonucleotide
  Antisense strand to SEQ ID NO: 1558786
uccaucauggagcuaauac

SEQ ID NO: 1558788 - RNA, 19 nt, Artificial Sequence
  Description of Artificial Sequence: Synthetic oligonucleotide
  Sense strand starting at position 3436 of SEQ ID NO: 1245387
uaccguguacucgcuuuau

SEQ ID NO: 1558789 - RNA, 19 nt, Artificial Sequence
  Description of Artificial Sequence: Synthetic oligonucleotide
  Antisense strand to SEQ ID NO: 1558788
auaaagcgaguacacggua

SEQ ID NO: 1558790 - RNA, 19 nt, Artificial Sequence
  Description of Artificial Sequence: Synthetic oligonucleotide
  Sense strand starting at position 3438 of SEQ ID NO: 1245387
ccguguacucgcuuuauuc

SEQ ID NO: 1558791 - RNA, 19 nt, Artificial Sequence
  Description of Artificial Sequence: Synthetic oligonucleotide
  Antisense strand to SEQ ID NO: 1558790
gaauaaagcgaguacacgg

SEQ ID NO: 1558792 - RNA, 19 nt, Artificial Sequence
  Description of Artificial Sequence: Synthetic oligonucleotide
  Sense strand starting at position 3439 of SEQ ID NO: 1245387
cguguacucgcuuuauucu

SEQ ID NO: 1558793 - RNA, 19 nt, Artificial Sequence
  Description of Artificial Sequence: Synthetic oligonucleotide
  Antisense strand to SEQ ID NO: 1558792
agaauaaagcgaguacacg

SEQ ID NO: 1558794 - RNA, 19 nt, Artificial Sequence
  Description of Artificial Sequence: Synthetic oligonucleotide
  Sense strand starting at position 3521 of SEQ ID NO: 1245387
auaauaguacucugucaua

SEQ ID NO: 1558795 - RNA, 19 nt, Artificial Sequence
  Description of Artificial Sequence: Synthetic oligonucleotide
  Antisense strand to SEQ ID NO: 1558794
uaugacagaguacuauuau

SEQ ID NO: 1558796 - RNA, 19 nt, Artificial Sequence
  Description of Artificial Sequence: Synthetic oligonucleotide
  Sense strand starting at position 3668 of SEQ ID NO: 1245387
acucauucugcguguauuu

SEQ ID NO: 1558797 - RNA, 19 nt, Artificial Sequence
  Description of Artificial Sequence: Synthetic oligonucleotide
  Antisense strand to SEQ ID NO: 1558796
aaauacacgcagaaugagu

SEQ ID NO: 1558798 - RNA, 19 nt, Artificial Sequence
  Description of Artificial Sequence: Synthetic oligonucleotide
  Sense strand starting at position 3691 of SEQ ID NO: 1245387
ucugccuacuguguaaaga

SEQ ID NO: 1558799 - RNA, 19 nt, Artificial Sequence
  Description of Artificial Sequence: Synthetic oligonucleotide
  Antisense strand to SEQ ID NO: 1558798
ucuuuacacaguaggcaga

SEQ ID NO: 1558800 - RNA, 19 nt, Artificial Sequence
  Description of Artificial Sequence: Synthetic oligonucleotide
  Sense strand starting at position 3717 of SEQ ID NO: 1245387
uucgcauauggcuaggaaa

SEQ ID NO: 1558801 - RNA, 19 nt, Artificial Sequence
  Description of Artificial Sequence: Synthetic oligonucleotide
  Antisense strand to SEQ ID NO: 1558800
uuuccuagccauaugcgaa

SEQ ID NO: 1558802 - RNA, 19 nt, Artificial Sequence
  Description of Artificial Sequence: Synthetic oligonucleotide
  Sense strand starting at position 3780 of SEQ ID NO: 1245387
guucuaaagcacuagaaug

SEQ ID NO: 1558803 - RNA, 19 nt, Artificial Sequence
  Description of Artificial Sequence: Synthetic oligonucleotide
  Antisense strand to SEQ ID NO: 1558802
cauucuagugcuuuagaac

SEQ ID NO: 1558804 - RNA, 19 nt, Artificial Sequence
  Description of Artificial Sequence: Synthetic oligonucleotide
  Sense strand starting at position 3794 of SEQ ID NO: 1245387
gaaugcauuucucaaguga

SEQ ID NO: 1558805 - RNA, 19 nt, Artificial Sequence
  Description of Artificial Sequence: Synthetic oligonucleotide
  Antisense strand to SEQ ID NO: 1558804
ucacuugagaaaugcauuc

SEQ ID NO: 1558806 - RNA, 19 nt, Artificial Sequence
  Description of Artificial Sequence: Synthetic oligonucleotide
  Sense strand starting at position 3798 of SEQ ID NO: 1245387
gcauuucucaagugacggu

SEQ ID NO: 1558807 - RNA, 19 nt, Artificial Sequence
  Description of Artificial Sequence: Synthetic oligonucleotide
  Antisense strand to SEQ ID NO: 1558806
accgucacuugagaaaugc

SEQ ID NO: 1558808 - RNA, 19 nt, Artificial Sequence
  Description of Artificial Sequence: Synthetic oligonucleotide
  Sense strand starting at position 3807 of SEQ ID NO: 1245387
aagugacgguuccugacau

SEQ ID NO: 1558809 - RNA, 19 nt, Artificial Sequence
  Description of Artificial Sequence: Synthetic oligonucleotide
  Antisense strand to SEQ ID NO: 1558808
augucaggaaccgucacuu

SEQ ID NO: 1558810 - RNA, 19 nt, Artificial Sequence
  Description of Artificial Sequence: Synthetic oligonucleotide
  Sense strand starting at position 3847 of SEQ ID NO: 1245387
ccucuugucucauuuguuu

SEQ ID NO: 1558811 - RNA, 19 nt, Artificial Sequence
  Description of Artificial Sequence: Synthetic oligonucleotide
  Antisense strand to SEQ ID NO: 1558810
aaacaaaugagacaagagg

SEQ ID NO: 1558812 - RNA, 19 nt, Artificial Sequence
  Description of Artificial Sequence: Synthetic oligonucleotide
  Sense strand starting at position 140 of SEQ ID NO: 1245388
accugugugauguauuaau

SEQ ID NO: 1558813 - RNA, 19 nt, Artificial Sequence
  Description of Artificial Sequence: Synthetic oligonucleotide
  Antisense strand to SEQ ID NO: 1558812
auuaauacaucacacaggu

SEQ ID NO: 1558814 - RNA, 19 nt, Artificial Sequence
  Description of Artificial Sequence: Synthetic oligonucleotide
  Sense strand starting at position 151 of SEQ ID NO: 1245388
guauuaauagcauacacgu

SEQ ID NO: 1558815 - RNA, 19 nt, Artificial Sequence
  Description of Artificial Sequence: Synthetic oligonucleotide
  Antisense strand to SEQ ID NO: 1558814
acguguaugcuauuaauac

SEQ ID NO: 1558816 - RNA, 19 nt, Artificial Sequence
  Description of Artificial Sequence: Synthetic oligonucleotide
  Sense strand starting at position 188 of SEQ ID NO: 1245388
uugauaaauccagguguuu

SEQ ID NO: 1558817 - RNA, 19 nt, Artificial Sequence
  Description of Artificial Sequence: Synthetic oligonucleotide
  Antisense strand to SEQ ID NO: 1558816
aaacaccuggauuuaucaa

SEQ ID NO: 1558818 - RNA, 19 nt, Artificial Sequence
  Description of Artificial Sequence: Synthetic oligonucleotide
  Sense strand starting at position 340 of SEQ ID NO: 1245388
cagauaaguuguuuggugu

SEQ ID NO: 1558819 - RNA, 19 nt, Artificial Sequence
  Description of Artificial Sequence: Synthetic oligonucleotide
  Antisense strand to SEQ ID NO: 1558818
acaccaaacaacuuaucug

SEQ ID NO: 1558820 - RNA, 19 nt, Artificial Sequence
  Description of Artificial Sequence: Synthetic oligonucleotide
  Sense strand starting at position 499 of SEQ ID NO: 1245388
cgggaugucucaucugaag

SEQ ID NO: 1558821 - RNA, 19 nt, Artificial Sequence
  Description of Artificial Sequence: Synthetic oligonucleotide
  Antisense strand to SEQ ID NO: 1558820
cuucagaugagacaucccg

SEQ ID NO: 1558822 - RNA, 19 nt, Artificial Sequence
  Description of Artificial Sequence: Synthetic oligonucleotide
  Sense strand starting at position 501 of SEQ ID NO: 1245388
ggaugucucaucugaaguu

SEQ ID NO: 1558823 - RNA, 19 nt, Artificial Sequence
  Description of Artificial Sequence: Synthetic oligonucleotide
  Antisense strand to SEQ ID NO: 1558822
aacuucagaugagacaucc

SEQ ID NO: 1558824 - RNA, 19 nt, Artificial Sequence
  Description of Artificial Sequence: Synthetic oligonucleotide
  Sense strand starting at position 508 of SEQ ID NO: 1245388
ucaucugaaguuugagguu

SEQ ID NO: 1558825 - RNA, 19 nt, Artificial Sequence
  Description of Artificial Sequence: Synthetic oligonucleotide
  Antisense strand to SEQ ID NO: 1558824
aaccucaaacuucagauga

SEQ ID NO: 1558826 - RNA, 19 nt, Artificial Sequence
  Description of Artificial Sequence: Synthetic oligonucleotide
  Sense strand starting at position 514 of SEQ ID NO: 1245388
gaaguuugagguuaggcaa

SEQ ID NO: 1558827 - RNA, 19 nt, Artificial Sequence
  Description of Artificial Sequence: Synthetic oligonucleotide
  Antisense strand to SEQ ID NO: 1558826
uugccuaaccucaaacuuc

SEQ ID NO: 1558828 - RNA, 19 nt, Artificial Sequence
  Description of Artificial Sequence: Synthetic oligonucleotide
  Sense strand starting at position 517 of SEQ ID NO: 1245388
guuugagguuaggcaacau

SEQ ID NO: 1558829 - RNA, 19 nt, Artificial Sequence
  Description of Artificial Sequence: Synthetic oligonucleotide
  Antisense strand to SEQ ID NO: 1558828
auguugccuaaccucaaac

SEQ ID NO: 1558830 - RNA, 19 nt, Artificial Sequence
  Description of Artificial Sequence: Synthetic oligonucleotide
  Sense strand starting at position 543 of SEQ ID NO: 1245388
agaugauucugacuugauc

SEQ ID NO: 1558831 - RNA, 19 nt, Artificial Sequence
  Description of Artificial Sequence: Synthetic oligonucleotide
  Antisense strand to SEQ ID NO: 1558830
gaucaagucagaaucaucu

SEQ ID NO: 1558832 - RNA, 19 nt, Artificial Sequence
  Description of Artificial Sequence: Synthetic oligonucleotide
  Sense strand starting at position 556 of SEQ ID NO: 1245388
uugaucauucuacguguuu

SEQ ID NO: 1558833 - RNA, 19 nt, Artificial Sequence
  Description of Artificial Sequence: Synthetic oligonucleotide
  Antisense strand to SEQ ID NO: 1558832
aaacacguagaaugaucaa

SEQ ID NO: 1558834 - RNA, 19 nt, Artificial Sequence
  Description of Artificial Sequence: Synthetic oligonucleotide
  Sense strand starting at position 557 of SEQ ID NO: 1245388
ugaucauucuacguguuuc

SEQ ID NO: 1558835 - RNA, 19 nt, Artificial Sequence
  Description of Artificial Sequence: Synthetic oligonucleotide
  Antisense strand to SEQ ID NO: 1558834
gaaacacguagaaugauca

SEQ ID NO: 1558836 - RNA, 19 nt, Artificial Sequence
  Description of Artificial Sequence: Synthetic oligonucleotide
  Sense strand starting at position 568 of SEQ ID NO: 1245388
cguguuucugccucucuau

SEQ ID NO: 1558837 - RNA, 19 nt, Artificial Sequence
  Description of Artificial Sequence: Synthetic oligonucleotide
  Antisense strand to SEQ ID NO: 1558836
auagagaggcagaaacacg

SEQ ID NO: 1558838 - RNA, 19 nt, Artificial Sequence
  Description of Artificial Sequence: Synthetic oligonucleotide
  Sense strand starting at position 607 of SEQ ID NO: 1245388
uguaaucauccagaggcua

SEQ ID NO: 1558839 - RNA, 19 nt, Artificial Sequence
  Description of Artificial Sequence: Synthetic oligonucleotide
  Antisense strand to SEQ ID NO: 1558838
uagccucuggaugauuaca

SEQ ID NO: 1558840 - RNA, 19 nt, Artificial Sequence
  Description of Artificial Sequence: Synthetic oligonucleotide
  Sense strand starting at position 658 of SEQ ID NO: 1245388
uuacuacuguugucacuaa

SEQ ID NO: 1558841 - RNA, 19 nt, Artificial Sequence
  Description of Artificial Sequence: Synthetic oligonucleotide
  Antisense strand to SEQ ID NO: 1558840
uuagugacaacaguaguaa

SEQ ID NO: 1558842 - RNA, 19 nt, Artificial Sequence
  Description of Artificial Sequence: Synthetic oligonucleotide
  Sense strand starting at position 728 of SEQ ID NO: 1245388
gccuuagacuagcuaugac

SEQ ID NO: 1558843 - RNA, 19 nt, Artificial Sequence
  Description of Artificial Sequence: Synthetic oligonucleotide
  Antisense strand to SEQ ID NO: 1558842
gucauagcuagucuaaggc

SEQ ID NO: 1558844 - RNA, 19 nt, Artificial Sequence
  Description of Artificial Sequence: Synthetic oligonucleotide
  Sense strand starting at position 745 of SEQ ID NO: 1245388
acaacauaucaauguguug

SEQ ID NO: 1558845 - RNA, 19 nt, Artificial Sequence
  Description of Artificial Sequence: Synthetic oligonucleotide
  Antisense strand to SEQ ID NO: 1558844
caacacauugauauguugu

SEQ ID NO: 1558846 - RNA, 19 nt, Artificial Sequence
  Description of Artificial Sequence: Synthetic oligonucleotide
  Sense strand starting at position 841 of SEQ ID NO: 1245388
gagaccauguguguccaaa

SEQ ID NO: 1558847 - RNA, 19 nt, Artificial Sequence
  Description of Artificial Sequence: Synthetic oligonucleotide
  Antisense strand to SEQ ID NO: 1558846
uuuggacacacauggucuc

SEQ ID NO: 1558848 - RNA, 19 nt, Artificial Sequence
  Description of Artificial Sequence: Synthetic oligonucleotide
  Sense strand starting at position 2271 of SEQ ID NO: 1245388
gugcacgucccugauggua

SEQ ID NO: 1558849 - RNA, 19 nt, Artificial Sequence
  Description of Artificial Sequence: Synthetic oligonucleotide
  Antisense strand to SEQ ID NO: 1558848
uaccaucagggacgugcac

SEQ ID NO: 1558850 - RNA, 19 nt, Artificial Sequence
  Description of Artificial Sequence: Synthetic oligonucleotide
  Sense strand starting at position 3144 of SEQ ID NO: 1245388
uucggagagcucugauaac

SEQ ID NO: 1558851 - RNA, 19 nt, Artificial Sequence
  Description of Artificial Sequence: Synthetic oligonucleotide
  Antisense strand to SEQ ID NO: 1558850
guuaucagagcucuccgaa

SEQ ID NO: 1558852 - RNA, 19 nt, Artificial Sequence
  Description of Artificial Sequence: Synthetic oligonucleotide
  Sense strand starting at position 3163 of SEQ ID NO: 1245388
uuggcucuguccuuaacau

SEQ ID NO: 1558853 - RNA, 19 nt, Artificial Sequence
  Description of Artificial Sequence: Synthetic oligonucleotide
  Antisense strand to SEQ ID NO: 1558852
auguuaaggacagagccaa

SEQ ID NO: 1558854 - RNA, 19 nt, Artificial Sequence
  Description of Artificial Sequence: Synthetic oligonucleotide
  Sense strand starting at position 3390 of SEQ ID NO: 1245388
cgaaacgcguaauuuaaua

SEQ ID NO: 1558855 - RNA, 19 nt, Artificial Sequence
  Description of Artificial Sequence: Synthetic oligonucleotide
  Antisense strand to SEQ ID NO: 1558854
uauuaaauuacgcguuucg

SEQ ID NO: 1558856 - RNA, 19 nt, Artificial Sequence
  Description of Artificial Sequence: Synthetic oligonucleotide
  Sense strand starting at position 3431 of SEQ ID NO: 1245388
uccucuugggcuuauugaa

SEQ ID NO: 1558857 - RNA, 19 nt, Artificial Sequence
  Description of Artificial Sequence: Synthetic oligonucleotide
  Antisense strand to SEQ ID NO: 1558856
uucaauaagcccaagagga

SEQ ID NO: 1558858 - RNA, 19 nt, Artificial Sequence
  Description of Artificial Sequence: Synthetic oligonucleotide
  Sense strand starting at position 3456 of SEQ ID NO: 1245388
auaagauagugcuugcaac

SEQ ID NO: 1558859 - RNA, 19 nt, Artificial Sequence
  Description of Artificial Sequence: Synthetic oligonucleotide
  Antisense strand to SEQ ID NO: 1558858
guugcaagcacuaucuuau

SEQ ID NO: 1558860 - RNA, 19 nt, Artificial Sequence
  Description of Artificial Sequence: Synthetic oligonucleotide
  Sense strand starting at position 3457 of SEQ ID NO: 1245388
uaagauagugcuugcaaca

SEQ ID NO: 1558861 - RNA, 19 nt, Artificial Sequence
  Description of Artificial Sequence: Synthetic oligonucleotide
  Antisense strand to SEQ ID NO: 1558860
uguugcaagcacuaucuua

SEQ ID NO: 1558862 - RNA, 19 nt, Artificial Sequence
  Description of Artificial Sequence: Synthetic oligonucleotide
  Sense strand starting at position 3484 of SEQ ID NO: 1245388
aguaaacauuugggaaaua

SEQ ID NO: 1558863 - RNA, 19 nt, Artificial Sequence
  Description of Artificial Sequence: Synthetic oligonucleotide
  Antisense strand to SEQ ID NO: 1558862
uauuucccaaauguuuacu

SEQ ID NO: 1558864 - RNA, 19 nt, Artificial Sequence
  Description of Artificial Sequence: Synthetic oligonucleotide
  Sense strand starting at position 3485 of SEQ ID NO: 1245388
guaaacauuugggaaauaa

SEQ ID NO: 1558865 - RNA, 19 nt, Artificial Sequence
  Description of Artificial Sequence: Synthetic oligonucleotide
  Antisense strand to SEQ ID NO: 1558864
uuauuucccaaauguuuac

SEQ ID NO: 1558866 - RNA, 19 nt, Artificial Sequence
  Description of Artificial Sequence: Synthetic oligonucleotide
  Sense strand starting at position 3495 of SEQ ID NO: 1245388
gggaaauaauaugaugauu

SEQ ID NO: 1558867 - RNA, 19 nt, Artificial Sequence
  Description of Artificial Sequence: Synthetic oligonucleotide
  Antisense strand to SEQ ID NO: 1558866
aaucaucauauuauuuccc

SEQ ID NO: 1558868 - RNA, 19 nt, Artificial Sequence
  Description of Artificial Sequence: Synthetic oligonucleotide
  Sense strand starting at position 3507 of SEQ ID NO: 1245388
gaugauuggauguguuaau

SEQ ID NO: 1558869 - RNA, 19 nt, Artificial Sequence
  Description of Artificial Sequence: Synthetic oligonucleotide
  Antisense strand to SEQ ID NO: 1558868
auuaacacauccaaucauc

SEQ ID NO: 1558870 - RNA, 19 nt, Artificial Sequence
  Description of Artificial Sequence: Synthetic oligonucleotide
  Sense strand starting at position 3540 of SEQ ID NO: 1245388
ucuauauggccucaguuga

SEQ ID NO: 1558871 - RNA, 19 nt, Artificial Sequence
  Description of Artificial Sequence: Synthetic oligonucleotide
  Antisense strand to SEQ ID NO: 1558870
ucaacugaggccauauaga

SEQ ID NO: 1558872 - RNA, 19 nt, Artificial Sequence
  Description of Artificial Sequence: Synthetic oligonucleotide
  Sense strand starting at position 3568 of SEQ ID NO: 1245388
guuaauugacuuugguuua

SEQ ID NO: 1558873 - RNA, 19 nt, Artificial Sequence
  Description of Artificial Sequence: Synthetic oligonucleotide
  Antisense strand to SEQ ID NO: 1558872
uaaaccaaagucaauuaac

SEQ ID NO: 1558874 - RNA, 19 nt, Artificial Sequence
  Description of Artificial Sequence: Synthetic oligonucleotide
  Sense strand starting at position 3669 of SEQ ID NO: 1245388
auggaagagaccgguugua

SEQ ID NO: 1558875 - RNA, 19 nt, Artificial Sequence
  Description of Artificial Sequence: Synthetic oligonucleotide
  Antisense strand to SEQ ID NO: 1558874
uacaaccggucucuuccau

SEQ ID NO: 1558876 - RNA, 19 nt, Artificial Sequence
  Description of Artificial Sequence: Synthetic oligonucleotide
  Sense strand starting at position 3795 of SEQ ID NO: 1245388
gugaaauaaugcccagcua

SEQ ID NO: 1558877 - RNA, 19 nt, Artificial Sequence
  Description of Artificial Sequence: Synthetic oligonucleotide
  Antisense strand to SEQ ID NO: 1558876
uagcugggcauuauuucac

SEQ ID NO: 1558878 - RNA, 19 nt, Artificial Sequence
  Description of Artificial Sequence: Synthetic oligonucleotide
  Sense strand starting at position 3796 of SEQ ID NO: 1245388
ugaaauaaugcccagcuaa

SEQ ID NO: 1558879 - RNA, 19 nt, Artificial Sequence
  Description of Artificial Sequence: Synthetic oligonucleotide
  Antisense strand to SEQ ID NO: 1558878
uuagcugggcauuauuuca

SEQ ID NO: 1558880 - RNA, 19 nt, Artificial Sequence
  Description of Artificial Sequence: Synthetic oligonucleotide
  Sense strand starting at position 3814 of SEQ ID NO: 1245388
agguauuagcuccaugaug

SEQ ID NO: 1558881 - RNA, 19 nt, Artificial Sequence
  Description of Artificial Sequence: Synthetic oligonucleotide
  Antisense strand to SEQ ID NO: 1558880
caucauggagcuaauaccu

SEQ ID NO: 1558882 - RNA, 19 nt, Artificial Sequence
  Description of Artificial Sequence: Synthetic oligonucleotide
  Sense strand starting at position 3816 of SEQ ID NO: 1245388
guauuagcuccaugaugga

SEQ ID NO: 1558883 - RNA, 19 nt, Artificial Sequence
  Description of Artificial Sequence: Synthetic oligonucleotide
  Antisense strand to SEQ ID NO: 1558882
uccaucauggagcuaauac

SEQ ID NO: 1558884 - RNA, 19 nt, Artificial Sequence
  Description of Artificial Sequence: Synthetic oligonucleotide
  Sense strand starting at position 3892 of SEQ ID NO: 1245388
gucuucugccacgaaaguu

SEQ ID NO: 1558885 - RNA, 19 nt, Artificial Sequence
  Description of Artificial Sequence: Synthetic oligonucleotide
  Antisense strand to SEQ ID NO: 1558884
aacuuucguggcagaagac

SEQ ID NO: 1558886 - RNA, 19 nt, Artificial Sequence
  Description of Artificial Sequence: Synthetic oligonucleotide
  Sense strand starting at position 3929 of SEQ ID NO: 1245388
uaccguguacucgcuuuau

SEQ ID NO: 1558887 - RNA, 19 nt, Artificial Sequence
  Description of Artificial Sequence: Synthetic oligonucleotide
  Antisense strand to SEQ ID NO: 1558886
auaaagcgaguacacggua

SEQ ID NO: 1558888 - RNA, 19 nt, Artificial Sequence
  Description of Artificial Sequence: Synthetic oligonucleotide
  Sense strand starting at position 3931 of SEQ ID NO: 1245388
ccguguacucgcuuuauuc

SEQ ID NO: 1558889 - RNA, 19 nt, Artificial Sequence
  Description of Artificial Sequence: Synthetic oligonucleotide
  Antisense strand to SEQ ID NO: 1558888
gaauaaagcgaguacacgg

SEQ ID NO: 1558890 - RNA, 19 nt, Artificial Sequence
  Description of Artificial Sequence: Synthetic oligonucleotide
  Sense strand starting at position 3932 of SEQ ID NO: 1245388
cguguacucgcuuuauucu

SEQ ID NO: 1558891 - RNA, 19 nt, Artificial Sequence
  Description of Artificial Sequence: Synthetic oligonucleotide
  Antisense strand to SEQ ID NO: 1558890
agaauaaagcgaguacacg

SEQ ID NO: 1558892 - RNA, 19 nt, Artificial Sequence
  Description of Artificial Sequence: Synthetic oligonucleotide
  Sense strand starting at position 1793 of SEQ ID NO: 1245389
uucggagagcucugauaac

SEQ ID NO: 1558893 - RNA, 19 nt, Artificial Sequence
  Description of Artificial Sequence: Synthetic oligonucleotide
  Antisense strand to SEQ ID NO: 1558892
guuaucagagcucuccgaa

SEQ ID NO: 1558894 - RNA, 19 nt, Artificial Sequence
  Description of Artificial Sequence: Synthetic oligonucleotide
  Sense strand starting at position 1812 of SEQ ID NO: 1245389
uuggcucuguccuuaacau

SEQ ID NO: 1558895 - RNA, 19 nt, Artificial Sequence
  Description of Artificial Sequence: Synthetic oligonucleotide
  Antisense strand to SEQ ID NO: 1558894
auguuaaggacagagccaa

SEQ ID NO: 1558896 - RNA, 19 nt, Artificial Sequence
  Description of Artificial Sequence: Synthetic oligonucleotide
  Sense strand starting at position 2039 of SEQ ID NO: 1245389
cgaaacgcguaauuuaaua

SEQ ID NO: 1558897 - RNA, 19 nt, Artificial Sequence
  Description of Artificial Sequence: Synthetic oligonucleotide
  Antisense strand to SEQ ID NO: 1558896
uauuaaauuacgcguuucg

SEQ ID NO: 1558898 - RNA, 19 nt, Artificial Sequence
  Description of Artificial Sequence: Synthetic oligonucleotide
  Sense strand starting at position 2080 of SEQ ID NO: 1245389
uccucuugggcuuauugaa

SEQ ID NO: 1558899 - RNA, 19 nt, Artificial Sequence
  Description of Artificial Sequence: Synthetic oligonucleotide
  Antisense strand to SEQ ID NO: 1558898
uucaauaagcccaagagga

SEQ ID NO: 1558900 - RNA, 19 nt, Artificial Sequence
  Description of Artificial Sequence: Synthetic oligonucleotide
  Sense strand starting at position 2105 of SEQ ID NO: 1245389
auaagauagugcuugcaac

SEQ ID NO: 1558901 - RNA, 19 nt, Artificial Sequence
  Description of Artificial Sequence: Synthetic oligonucleotide
  Antisense strand to SEQ ID NO: 1558900
guugcaagcacuaucuuau

SEQ ID NO: 1558902 - RNA, 19 nt, Artificial Sequence
  Description of Artificial Sequence: Synthetic oligonucleotide
  Sense strand starting at position 2106 of SEQ ID NO: 1245389
uaagauagugcuugcaaca

SEQ ID NO: 1558903 - RNA, 19 nt, Artificial Sequence
  Description of Artificial Sequence: Synthetic oligonucleotide
  Antisense strand to SEQ ID NO: 1558902
uguugcaagcacuaucuua

SEQ ID NO: 1558904 - RNA, 19 nt, Artificial Sequence
  Description of Artificial Sequence: Synthetic oligonucleotide
  Sense strand starting at position 2133 of SEQ ID NO: 1245389
aguaaacauuugggaaaua

SEQ ID NO: 1558905 - RNA, 19 nt, Artificial Sequence
  Description of Artificial Sequence: Synthetic oligonucleotide
  Antisense strand to SEQ ID NO: 1558904
uauuucccaaauguuuacu

SEQ ID NO: 1558906 - RNA, 19 nt, Artificial Sequence
  Description of Artificial Sequence: Synthetic oligonucleotide
  Sense strand starting at position 2134 of SEQ ID NO: 1245389
guaaacauuugggaaauaa

SEQ ID NO: 1558907 - RNA, 19 nt, Artificial Sequence
  Description of Artificial Sequence: Synthetic oligonucleotide
  Antisense strand to SEQ ID NO: 1558906
uuauuucccaaauguuuac

SEQ ID NO: 1558908 - RNA, 19 nt, Artificial Sequence
  Description of Artificial Sequence: Synthetic oligonucleotide
  Sense strand starting at position 2144 of SEQ ID NO: 1245389
gggaaauaauaugaugauu

SEQ ID NO: 1558909 - RNA, 19 nt, Artificial Sequence
  Description of Artificial Sequence: Synthetic oligonucleotide
  Antisense strand to SEQ ID NO: 1558908
aaucaucauauuauuuccc

SEQ ID NO: 1558910 - RNA, 19 nt, Artificial Sequence
  Description of Artificial Sequence: Synthetic oligonucleotide
  Sense strand starting at position 2156 of SEQ ID NO: 1245389
gaugauuggauguguuaau

SEQ ID NO: 1558911 - RNA, 19 nt, Artificial Sequence
  Description of Artificial Sequence: Synthetic oligonucleotide
  Antisense strand to SEQ ID NO: 1558910
auuaacacauccaaucauc

SEQ ID NO: 1558912 - RNA, 19 nt, Artificial Sequence
  Description of Artificial Sequence: Synthetic oligonucleotide
  Sense strand starting at position 2189 of SEQ ID NO: 1245389
ucuauauggccucaguuga

SEQ ID NO: 1558913 - RNA, 19 nt, Artificial Sequence
  Description of Artificial Sequence: Synthetic oligonucleotide
  Antisense strand to SEQ ID NO: 1558912
ucaacugaggccauauaga

SEQ ID NO: 1558914 - RNA, 19 nt, Artificial Sequence
  Description of Artificial Sequence: Synthetic oligonucleotide
  Sense strand starting at position 2217 of SEQ ID NO: 1245389
guuaauugacuuugguuua

SEQ ID NO: 1558915 - RNA, 19 nt, Artificial Sequence
  Description of Artificial Sequence: Synthetic oligonucleotide
  Antisense strand to SEQ ID NO: 1558914
uaaaccaaagucaauuaac

SEQ ID NO: 1558916 - RNA, 19 nt, Artificial Sequence
  Description of Artificial Sequence: Synthetic oligonucleotide
  Sense strand starting at position 2318 of SEQ ID NO: 1245389
auggaagagaccgguugua

SEQ ID NO: 1558917 - RNA, 19 nt, Artificial Sequence
  Description of Artificial Sequence: Synthetic oligonucleotide
  Antisense strand to SEQ ID NO: 1558916
uacaaccggucucuuccau

SEQ ID NO: 1558918 - RNA, 19 nt, Artificial Sequence
  Description of Artificial Sequence: Synthetic oligonucleotide
  Sense strand starting at position 2444 of SEQ ID NO: 1245389
gugaaauaaugcccagcua

SEQ ID NO: 1558919 - RNA, 19 nt, Artificial Sequence
  Description of Artificial Sequence: Synthetic oligonucleotide
  Antisense strand to SEQ ID NO: 1558918
uagcugggcauuauuucac

SEQ ID NO: 1558920 - RNA, 19 nt, Artificial Sequence
  Description of Artificial Sequence: Synthetic oligonucleotide
  Sense strand starting at position 2445 of SEQ ID NO: 1245389
ugaaauaaugcccagcuaa

SEQ ID NO: 1558921 - RNA, 19 nt, Artificial Sequence
  Description of Artificial Sequence: Synthetic oligonucleotide
  Antisense strand to SEQ ID NO: 1558920
uuagcugggcauuauuuca

SEQ ID NO: 1558922 - RNA, 19 nt, Artificial Sequence
  Description of Artificial Sequence: Synthetic oligonucleotide
  Sense strand starting at position 2463 of SEQ ID NO: 1245389
agguauuagcuccaugaug

SEQ ID NO: 1558923 - RNA, 19 nt, Artificial Sequence
  Description of Artificial Sequence: Synthetic oligonucleotide
  Antisense strand to SEQ ID NO: 1558922
caucauggagcuaauaccu

SEQ ID NO: 1558924 - RNA, 19 nt, Artificial Sequence
  Description of Artificial Sequence: Synthetic oligonucleotide
  Sense strand starting at position 2465 of SEQ ID NO: 1245389
guauuagcuccaugaugga

SEQ ID NO: 1558925 - RNA, 19 nt, Artificial Sequence
  Description of Artificial Sequence: Synthetic oligonucleotide
  Antisense strand to SEQ ID NO: 1558924
uccaucauggagcuaauac

SEQ ID NO: 1558926 - RNA, 19 nt, Artificial Sequence
  Description of Artificial Sequence: Synthetic oligonucleotide
  Sense strand starting at position 2541 of SEQ ID NO: 1245389
gucuucugccacgaaaguu

SEQ ID NO: 1558927 - RNA, 19 nt, Artificial Sequence
  Description of Artificial Sequence: Synthetic oligonucleotide
  Antisense strand to SEQ ID NO: 1558926
aacuuucguggcagaagac

SEQ ID NO: 1558928 - RNA, 19 nt, Artificial Sequence
  Description of Artificial Sequence: Synthetic oligonucleotide
  Sense strand starting at position 2578 of SEQ ID NO: 1245389
uaccguguacucgcuuuau

SEQ ID NO: 1558929 - RNA, 19 nt, Artificial Sequence
  Description of Artificial Sequence: Synthetic oligonucleotide
  Antisense strand to SEQ ID NO: 1558928
auaaagcgaguacacggua

SEQ ID NO: 1558930 - RNA, 19 nt, Artificial Sequence
  Description of Artificial Sequence: Synthetic oligonucleotide
  Sense strand starting at position 2580 of SEQ ID NO: 1245389
ccguguacucgcuuuauuc

SEQ ID NO: 1558931 - RNA, 19 nt, Artificial Sequence
  Description of Artificial Sequence: Synthetic oligonucleotide
  Antisense strand to SEQ ID NO: 1558930
gaauaaagcgaguacacgg

SEQ ID NO: 1558932 - RNA, 19 nt, Artificial Sequence
  Description of Artificial Sequence: Synthetic oligonucleotide
  Sense strand starting at position 2581 of SEQ ID NO: 1245389
cguguacucgcuuuauucu

SEQ ID NO: 1558933 - RNA, 19 nt, Artificial Sequence
  Description of Artificial Sequence: Synthetic oligonucleotide
  Antisense strand to SEQ ID NO: 1558932
agaauaaagcgaguacacg

SEQ ID NO: 1558934 - RNA, 19 nt, Artificial Sequence
  Description of Artificial Sequence: Synthetic oligonucleotide
  Sense strand starting at position 2663 of SEQ ID NO: 1245389
auaauaguacucugucaua

SEQ ID NO: 1558935 - RNA, 19 nt, Artificial Sequence
  Description of Artificial Sequence: Synthetic oligonucleotide
  Antisense strand to SEQ ID NO: 1558934
uaugacagaguacuauuau

SEQ ID NO: 1558936 - RNA, 19 nt, Artificial Sequence
  Description of Artificial Sequence: Synthetic oligonucleotide
  Sense strand starting at position 2810 of SEQ ID NO: 1245389
acucauucugcguguauuu

SEQ ID NO: 1558937 - RNA, 19 nt, Artificial Sequence
  Description of Artificial Sequence: Synthetic oligonucleotide
  Antisense strand to SEQ ID NO: 1558936
aaauacacgcagaaugagu

SEQ ID NO: 1558938 - RNA, 19 nt, Artificial Sequence
  Description of Artificial Sequence: Synthetic oligonucleotide
  Sense strand starting at position 2833 of SEQ ID NO: 1245389
ucugccuacuguguaaaga

SEQ ID NO: 1558939 - RNA, 19 nt, Artificial Sequence
  Description of Artificial Sequence: Synthetic oligonucleotide
  Antisense strand to SEQ ID NO: 1558938
ucuuuacacaguaggcaga

SEQ ID NO: 1558940 - RNA, 19 nt, Artificial Sequence
  Description of Artificial Sequence: Synthetic oligonucleotide
  Sense strand starting at position 2859 of SEQ ID NO: 1245389
uucgcauauggcuaggaaa

SEQ ID NO: 1558941 - RNA, 19 nt, Artificial Sequence
  Description of Artificial Sequence: Synthetic oligonucleotide
  Antisense strand to SEQ ID NO: 1558940
uuuccuagccauaugcgaa

SEQ ID NO: 1558942 - RNA, 19 nt, Artificial Sequence
  Description of Artificial Sequence: Synthetic oligonucleotide
  Sense strand starting at position 2922 of SEQ ID NO: 1245389
guucuaaagcacuagaaug

SEQ ID NO: 1558943 - RNA, 19 nt, Artificial Sequence
  Description of Artificial Sequence: Synthetic oligonucleotide
  Antisense strand to SEQ ID NO: 1558942
cauucuagugcuuuagaac

SEQ ID NO: 1558944 - RNA, 19 nt, Artificial Sequence
  Description of Artificial Sequence: Synthetic oligonucleotide
  Sense strand starting at position 2936 of SEQ ID NO: 1245389
gaaugcauuucucaaguga

SEQ ID NO: 1558945 - RNA, 19 nt, Artificial Sequence
  Description of Artificial Sequence: Synthetic oligonucleotide
  Antisense strand to SEQ ID NO: 1558944
ucacuugagaaaugcauuc

SEQ ID NO: 1558946 - RNA, 19 nt, Artificial Sequence
  Description of Artificial Sequence: Synthetic oligonucleotide
  Sense strand starting at position 2940 of SEQ ID NO: 1245389
gcauuucucaagugacggu

SEQ ID NO: 1558947 - RNA, 19 nt, Artificial Sequence
  Description of Artificial Sequence: Synthetic oligonucleotide
  Antisense strand to SEQ ID NO: 1558946
accgucacuugagaaaugc

SEQ ID NO: 1558948 - RNA, 19 nt, Artificial Sequence
  Description of Artificial Sequence: Synthetic oligonucleotide
  Sense strand starting at position 2949 of SEQ ID NO: 1245389
aagugacgguuccugacau

SEQ ID NO: 1558949 - RNA, 19 nt, Artificial Sequence
  Description of Artificial Sequence: Synthetic oligonucleotide
  Antisense strand to SEQ ID NO: 1558948
augucaggaaccgucacuu

SEQ ID NO: 1558950 - RNA, 19 nt, Artificial Sequence
  Description of Artificial Sequence: Synthetic oligonucleotide
  Sense strand starting at position 2989 of SEQ ID NO: 1245389
ccucuugucucauuuguuu

SEQ ID NO: 1558951 - RNA, 19 nt, Artificial Sequence
  Description of Artificial Sequence: Synthetic oligonucleotide
  Antisense strand to SEQ ID NO: 1558950
aaacaaaugagacaagagg

SEQ ID NO: 1558952 - RNA, 19 nt, Artificial Sequence
  Description of Artificial Sequence: Synthetic oligonucleotide
  Sense strand starting at position 3234 of SEQ ID NO: 1245389
ccuugaauuugauacuaag

SEQ ID NO: 1558953 - RNA, 19 nt, Artificial Sequence
  Description of Artificial Sequence: Synthetic oligonucleotide
  Antisense strand to SEQ ID NO: 1558952
cuuaguaucaaauucaagg

SEQ ID NO: 1558954 - RNA, 19 nt, Artificial Sequence
  Description of Artificial Sequence: Synthetic oligonucleotide
  Sense strand starting at position 3313 of SEQ ID NO: 1245389
gacccaagguccuugacaa

SEQ ID NO: 1558955 - RNA, 19 nt, Artificial Sequence
  Description of Artificial Sequence: Synthetic oligonucleotide
  Antisense strand to SEQ ID NO: 1558954
uugucaaggaccuuggguc

SEQ ID NO: 1558956 - RNA, 19 nt, Artificial Sequence
  Description of Artificial Sequence: Synthetic oligonucleotide
  Sense strand starting at position 3314 of SEQ ID NO: 1245389
acccaagguccuugacaaa

SEQ ID NO: 1558957 - RNA, 19 nt, Artificial Sequence
  Description of Artificial Sequence: Synthetic oligonucleotide
  Antisense strand to SEQ ID NO: 1558956
uuugucaaggaccuugggu

SEQ ID NO: 1558958 - RNA, 19 nt, Artificial Sequence
  Description of Artificial Sequence: Synthetic oligonucleotide
  Sense strand starting at position 3352 of SEQ ID NO: 1245389
aacucugaugggugacauu

SEQ ID NO: 1558959 - RNA, 19 nt, Artificial Sequence
  Description of Artificial Sequence: Synthetic oligonucleotide
  Antisense strand to SEQ ID NO: 1558958
aaugucacccaucagaguu

SEQ ID NO: 1558960 - RNA, 19 nt, Artificial Sequence
  Description of Artificial Sequence: Synthetic oligonucleotide
  Sense strand starting at position 3413 of SEQ ID NO: 1245389
aguggaaccuguuucuaag

SEQ ID NO: 1558961 - RNA, 19 nt, Artificial Sequence
  Description of Artificial Sequence: Synthetic oligonucleotide
  Antisense strand to SEQ ID NO: 1558960
cuuagaaacagguuccacu

SEQ ID NO: 1558962 - RNA, 19 nt, Artificial Sequence
  Description of Artificial Sequence: Synthetic oligonucleotide
  Sense strand starting at position 3415 of SEQ ID NO: 1245389
uggaaccuguuucuaagaa

SEQ ID NO: 1558963 - RNA, 19 nt, Artificial Sequence
  Description of Artificial Sequence: Synthetic oligonucleotide
  Antisense strand to SEQ ID NO: 1558962
uucuuagaaacagguucca

SEQ ID NO: 1558964 - RNA, 19 nt, Artificial Sequence
  Description of Artificial Sequence: Synthetic oligonucleotide
  Sense strand starting at position 3484 of SEQ ID NO: 1245389
gucugaugugguuacagag

SEQ ID NO: 1558965 - RNA, 19 nt, Artificial Sequence
  Description of Artificial Sequence: Synthetic oligonucleotide
  Antisense strand to SEQ ID NO: 1558964
cucuguaaccacaucagac

SEQ ID NO: 1558966 - RNA, 19 nt, Artificial Sequence
  Description of Artificial Sequence: Synthetic oligonucleotide
  Sense strand starting at position 3553 of SEQ ID NO: 1245389
guugauuucucccucaugu

SEQ ID NO: 1558967 - RNA, 19 nt, Artificial Sequence
  Description of Artificial Sequence: Synthetic oligonucleotide
  Antisense strand to SEQ ID NO: 1558966
acaugagggagaaaucaac

SEQ ID NO: 1558968 - RNA, 19 nt, Artificial Sequence
  Description of Artificial Sequence: Synthetic oligonucleotide
  Sense strand starting at position 3828 of SEQ ID NO: 1245389
accuaugacugagaaguaa

SEQ ID NO: 1558969 - RNA, 19 nt, Artificial Sequence
  Description of Artificial Sequence: Synthetic oligonucleotide
  Antisense strand to SEQ ID NO: 1558968
uuacuucucagucauaggu

SEQ ID NO: 1558970 - RNA, 19 nt, Artificial Sequence
  Description of Artificial Sequence: Synthetic oligonucleotide
  Sense strand starting at position 3906 of SEQ ID NO: 1245389
uaauacaucugugcaagga

SEQ ID NO: 1558971 - RNA, 19 nt, Artificial Sequence
  Description of Artificial Sequence: Synthetic oligonucleotide
  Antisense strand to SEQ ID NO: 1558970
uccuugcacagauguauua

SEQ ID NO: 1558972 - RNA, 19 nt, Artificial Sequence
  Description of Artificial Sequence: Synthetic oligonucleotide
  Sense strand starting at position 40 of SEQ ID NO: 1245390
ggcgauuccugucucugca

SEQ ID NO: 1558973 - RNA, 19 nt, Artificial Sequence
  Description of Artificial Sequence: Synthetic oligonucleotide
  Antisense strand to SEQ ID NO: 1558972
ugcagagacaggaaucgcc

SEQ ID NO: 1558974 - RNA, 19 nt, Artificial Sequence
  Description of Artificial Sequence: Synthetic oligonucleotide
  Sense strand starting at position 44 of SEQ ID NO: 1245390
auuccugucucugcaguua

SEQ ID NO: 1558975 - RNA, 19 nt, Artificial Sequence
  Description of Artificial Sequence: Synthetic oligonucleotide
  Antisense strand to SEQ ID NO: 1558974
uaacugcagagacaggaau

SEQ ID NO: 1558976 - RNA, 19 nt, Artificial Sequence
  Description of Artificial Sequence: Synthetic oligonucleotide
  Sense strand starting at position 56 of SEQ ID NO: 1245390
gcaguuaaaguguaagauu

SEQ ID NO: 1558977 - RNA, 19 nt, Artificial Sequence
  Description of Artificial Sequence: Synthetic oligonucleotide
  Antisense strand to SEQ ID NO: 1558976
aaucuuacacuuuaacugc

SEQ ID NO: 1558978 - RNA, 19 nt, Artificial Sequence
  Description of Artificial Sequence: Synthetic oligonucleotide
  Sense strand starting at position 117 of SEQ ID NO: 1245390
cugcuacuaccuggacaau

SEQ ID NO: 1558979 - RNA, 19 nt, Artificial Sequence
  Description of Artificial Sequence: Synthetic oligonucleotide
  Antisense strand to SEQ ID NO: 1558978
auuguccagguaguagcag

SEQ ID NO: 1558980 - RNA, 19 nt, Artificial Sequence
  Description of Artificial Sequence: Synthetic oligonucleotide
  Sense strand starting at position 195 of SEQ ID NO: 1245390
ucugauguggccuaauaug

SEQ ID NO: 1558981 - RNA, 19 nt, Artificial Sequence
  Description of Artificial Sequence: Synthetic oligonucleotide
  Antisense strand to SEQ ID NO: 1558980
cauauuaggccacaucaga

SEQ ID NO: 1558982 - RNA, 19 nt, Artificial Sequence
  Description of Artificial Sequence: Synthetic oligonucleotide
  Sense strand starting at position 462 of SEQ ID NO: 1245390
ucuaucucaucuggagaaa

SEQ ID NO: 1558983 - RNA, 19 nt, Artificial Sequence
  Description of Artificial Sequence: Synthetic oligonucleotide
  Antisense strand to SEQ ID NO: 1558982
uuucuccagaugagauaga

SEQ ID NO: 1558984 - RNA, 19 nt, Artificial Sequence
  Description of Artificial Sequence: Synthetic oligonucleotide
  Sense strand starting at position 473 of SEQ ID NO: 1245390
uggagaaacugcucgauug

SEQ ID NO: 1558985 - RNA, 19 nt, Artificial Sequence
  Description of Artificial Sequence: Synthetic oligonucleotide
  Antisense strand to SEQ ID NO: 1558984
caaucgagcaguuucucca

SEQ ID NO: 1558986 - RNA, 19 nt, Artificial Sequence
  Description of Artificial Sequence: Synthetic oligonucleotide
  Sense strand starting at position 474 of SEQ ID NO: 1245390
ggagaaacugcucgauugu

SEQ ID NO: 1558987 - RNA, 19 nt, Artificial Sequence
  Description of Artificial Sequence: Synthetic oligonucleotide
  Antisense strand to SEQ ID NO: 1558986
acaaucgagcaguuucucc

SEQ ID NO: 1558988 - RNA, 19 nt, Artificial Sequence
  Description of Artificial Sequence: Synthetic oligonucleotide
  Sense strand starting at position 475 of SEQ ID NO: 1245390
gagaaacugcucgauuguu

SEQ ID NO: 1558989 - RNA, 19 nt, Artificial Sequence
  Description of Artificial Sequence: Synthetic oligonucleotide
  Antisense strand to SEQ ID NO: 1558988
aacaaucgagcaguuucuc

SEQ ID NO: 1558990 - RNA, 19 nt, Artificial Sequence
  Description of Artificial Sequence: Synthetic oligonucleotide
  Sense strand starting at position 562 of SEQ ID NO: 1245390
accaauaagucgcuggagu

SEQ ID NO: 1558991 - RNA, 19 nt, Artificial Sequence
  Description of Artificial Sequence: Synthetic oligonucleotide
  Antisense strand to SEQ ID NO: 1558990
acuccagcgacuuauuggu

SEQ ID NO: 1558992 - RNA, 19 nt, Artificial Sequence
  Description of Artificial Sequence: Synthetic oligonucleotide
  Sense strand starting at position 563 of SEQ ID NO: 1245390
ccaauaagucgcuggagug

SEQ ID NO: 1558993 - RNA, 19 nt, Artificial Sequence
  Description of Artificial Sequence: Synthetic oligonucleotide
  Antisense strand to SEQ ID NO: 1558992
cacuccagcgacuuauugg

SEQ ID NO: 1558994 - RNA, 19 nt, Artificial Sequence
  Description of Artificial Sequence: Synthetic oligonucleotide
  Sense strand starting at position 1130 of SEQ ID NO: 1245390
gccaaucgcuccuuuaauu

SEQ ID NO: 1558995 - RNA, 19 nt, Artificial Sequence
  Description of Artificial Sequence: Synthetic oligonucleotide
  Antisense strand to SEQ ID NO: 1558994
aauuaaaggagcgauuggc

SEQ ID NO: 1558996 - RNA, 19 nt, Artificial Sequence
  Description of Artificial Sequence: Synthetic oligonucleotide
  Sense strand starting at position 1140 of SEQ ID NO: 1245390
ccuuuaauuucugcccgua

SEQ ID NO: 1558997 - RNA, 19 nt, Artificial Sequence
  Description of Artificial Sequence: Synthetic oligonucleotide
  Antisense strand to SEQ ID NO: 1558996
uacgggcagaaauuaaagg

SEQ ID NO: 1558998 - RNA, 19 nt, Artificial Sequence
  Description of Artificial Sequence: Synthetic oligonucleotide
  Sense strand starting at position 1142 of SEQ ID NO: 1245390
uuuaauuucugcccguauc

SEQ ID NO: 1558999 - RNA, 19 nt, Artificial Sequence
  Description of Artificial Sequence: Synthetic oligonucleotide
  Antisense strand to SEQ ID NO: 1558998
gauacgggcagaaauuaaa

SEQ ID NO: 1559000 - RNA, 19 nt, Artificial Sequence
  Description of Artificial Sequence: Synthetic oligonucleotide
  Sense strand starting at position 1384 of SEQ ID NO: 1245390
gcgagaguugcucucugca

SEQ ID NO: 1559001 - RNA, 19 nt, Artificial Sequence
  Description of Artificial Sequence: Synthetic oligonucleotide
  Antisense strand to SEQ ID NO: 1559000
ugcagagagcaacucucgc

SEQ ID NO: 1559002 - RNA, 19 nt, Artificial Sequence
  Description of Artificial Sequence: Synthetic oligonucleotide
  Sense strand starting at position 1386 of SEQ ID NO: 1245390
gagaguugcucucugcaga

SEQ ID NO: 1559003 - RNA, 19 nt, Artificial Sequence
  Description of Artificial Sequence: Synthetic oligonucleotide
  Antisense strand to SEQ ID NO: 1559002
ucugcagagagcaacucuc

SEQ ID NO: 1559004 - RNA, 19 nt, Artificial Sequence
  Description of Artificial Sequence: Synthetic oligonucleotide
  Sense strand starting at position 1389 of SEQ ID NO: 1245390
aguugcucucugcagaguu

SEQ ID NO: 1559005 - RNA, 19 nt, Artificial Sequence
  Description of Artificial Sequence: Synthetic oligonucleotide
  Antisense strand to SEQ ID NO: 1559004
aacucugcagagagcaacu

SEQ ID NO: 1559006 - RNA, 19 nt, Artificial Sequence
  Description of Artificial Sequence: Synthetic oligonucleotide
  Sense strand starting at position 1809 of SEQ ID NO: 1245390
ggcgggagguugucauuga

SEQ ID NO: 1559007 - RNA, 19 nt, Artificial Sequence
  Description of Artificial Sequence: Synthetic oligonucleotide
  Antisense strand to SEQ ID NO: 1559006
ucaaugacaaccucccgcc

SEQ ID NO: 1559008 - RNA, 19 nt, Artificial Sequence
  Description of Artificial Sequence: Synthetic oligonucleotide
  Sense strand starting at position 1814 of SEQ ID NO: 1245390
gagguugucauugauucgu

SEQ ID NO: 1559009 - RNA, 19 nt, Artificial Sequence
  Description of Artificial Sequence: Synthetic oligonucleotide
  Antisense strand to SEQ ID NO: 1559008
acgaaucaaugacaaccuc

SEQ ID NO: 1559010 - RNA, 19 nt, Artificial Sequence
  Description of Artificial Sequence: Synthetic oligonucleotide
  Sense strand starting at position 1969 of SEQ ID NO: 1245390
gcgcguuacgcuucacuuu

SEQ ID NO: 1559011 - RNA, 19 nt, Artificial Sequence
  Description of Artificial Sequence: Synthetic oligonucleotide
  Antisense strand to SEQ ID NO: 1559010
aaagugaagcguaacgcgc

SEQ ID NO: 1559012 - RNA, 19 nt, Artificial Sequence
  Description of Artificial Sequence: Synthetic oligonucleotide
  Sense strand starting at position 2289 of SEQ ID NO: 1245390
cagggucgugaguguaacu

SEQ ID NO: 1559013 - RNA, 19 nt, Artificial Sequence
  Description of Artificial Sequence: Synthetic oligonucleotide
  Antisense strand to SEQ ID NO: 1559012
aguuacacucacgacccug

SEQ ID NO: 1559014 - RNA, 19 nt, Artificial Sequence
  Description of Artificial Sequence: Synthetic oligonucleotide
  Sense strand starting at position 2494 of SEQ ID NO: 1245390
uggagauuccggcagucca

SEQ ID NO: 1559015 - RNA, 19 nt, Artificial Sequence
  Description of Artificial Sequence: Synthetic oligonucleotide
  Antisense strand to SEQ ID NO: 1559014
uggacugccggaaucucca

SEQ ID NO: 1559016 - RNA, 19 nt, Artificial Sequence
  Description of Artificial Sequence: Synthetic oligonucleotide
  Sense strand starting at position 2710 of SEQ ID NO: 1245390
ccuugauaccucugcugac

SEQ ID NO: 1559017 - RNA, 19 nt, Artificial Sequence
  Description of Artificial Sequence: Synthetic oligonucleotide
  Antisense strand to SEQ ID NO: 1559016
gucagcagagguaucaagg

SEQ ID NO: 1559018 - RNA, 19 nt, Artificial Sequence
  Description of Artificial Sequence: Synthetic oligonucleotide
  Sense strand starting at position 2711 of SEQ ID NO: 1245390
cuugauaccucugcugacu

SEQ ID NO: 1559019 - RNA, 19 nt, Artificial Sequence
  Description of Artificial Sequence: Synthetic oligonucleotide
  Antisense strand to SEQ ID NO: 1559018
agucagcagagguaucaag

SEQ ID NO: 1559020 - RNA, 19 nt, Artificial Sequence
  Description of Artificial Sequence: Synthetic oligonucleotide
  Sense strand starting at position 2720 of SEQ ID NO: 1245390
ucugcugacuguucucaga

SEQ ID NO: 1559021 - RNA, 19 nt, Artificial Sequence
  Description of Artificial Sequence: Synthetic oligonucleotide
  Antisense strand to SEQ ID NO: 1559020
ucugagaacagucagcaga

SEQ ID NO: 1559022 - RNA, 19 nt, Artificial Sequence
  Description of Artificial Sequence: Synthetic oligonucleotide
  Sense strand starting at position 2722 of SEQ ID NO: 1245390
ugcugacuguucucagaaa

SEQ ID NO: 1559023 - RNA, 19 nt, Artificial Sequence
  Description of Artificial Sequence: Synthetic oligonucleotide
  Antisense strand to SEQ ID NO: 1559022
uuucugagaacagucagca

SEQ ID NO: 1559024 - RNA, 19 nt, Artificial Sequence
  Description of Artificial Sequence: Synthetic oligonucleotide
  Sense strand starting at position 2756 of SEQ ID NO: 1245390
gggagugaaucuuuccugu

SEQ ID NO: 1559025 - RNA, 19 nt, Artificial Sequence
  Description of Artificial Sequence: Synthetic oligonucleotide
  Antisense strand to SEQ ID NO: 1559024
acaggaaagauucacuccc

SEQ ID NO: 1559026 - RNA, 19 nt, Artificial Sequence
  Description of Artificial Sequence: Synthetic oligonucleotide
  Sense strand starting at position 2758 of SEQ ID NO: 1245390
gagugaaucuuuccuguug

SEQ ID NO: 1559027 - RNA, 19 nt, Artificial Sequence
  Description of Artificial Sequence: Synthetic oligonucleotide
  Antisense strand to SEQ ID NO: 1559026
caacaggaaagauucacuc

SEQ ID NO: 1559028 - RNA, 19 nt, Artificial Sequence
  Description of Artificial Sequence: Synthetic oligonucleotide
  Sense strand starting at position 2870 of SEQ ID NO: 1245390
ggccaugagccuuaaagga

SEQ ID NO: 1559029 - RNA, 19 nt, Artificial Sequence
  Description of Artificial Sequence: Synthetic oligonucleotide
  Antisense strand to SEQ ID NO: 1559028
uccuuuaaggcucauggcc

SEQ ID NO: 1559030 - RNA, 19 nt, Artificial Sequence
  Description of Artificial Sequence: Synthetic oligonucleotide
  Sense strand starting at position 2899 of SEQ ID NO: 1245390
agaaguaaaucucaaaggu

SEQ ID NO: 1559031 - RNA, 19 nt, Artificial Sequence
  Description of Artificial Sequence: Synthetic oligonucleotide
  Antisense strand to SEQ ID NO: 1559030
accuuugagauuuacuucu

SEQ ID NO: 1559032 - RNA, 19 nt, Artificial Sequence
  Description of Artificial Sequence: Synthetic oligonucleotide
  Sense strand starting at position 2916 of SEQ ID NO: 1245390
gugcauuggccaugaaggu

SEQ ID NO: 1559033 - RNA, 19 nt, Artificial Sequence
  Description of Artificial Sequence: Synthetic oligonucleotide
  Antisense strand to SEQ ID NO: 1559032
accuucauggccaaugcac

SEQ ID NO: 1559034 - RNA, 19 nt, Artificial Sequence
  Description of Artificial Sequence: Synthetic oligonucleotide
  Sense strand starting at position 3014 of SEQ ID NO: 1245390
cugaaauuccaauguuaga

SEQ ID NO: 1559035 - RNA, 19 nt, Artificial Sequence
  Description of Artificial Sequence: Synthetic oligonucleotide
  Antisense strand to SEQ ID NO: 1559034
ucuaacauuggaauuucag

SEQ ID NO: 1559036 - RNA, 19 nt, Artificial Sequence
  Description of Artificial Sequence: Synthetic oligonucleotide
  Sense strand starting at position 3084 of SEQ ID NO: 1245390
agggaaacuugugucagga

SEQ ID NO: 1559037 - RNA, 19 nt, Artificial Sequence
  Description of Artificial Sequence: Synthetic oligonucleotide
  Antisense strand to SEQ ID NO: 1559036
uccugacacaaguuucccu

SEQ ID NO: 1559038 - RNA, 19 nt, Artificial Sequence
  Description of Artificial Sequence: Synthetic oligonucleotide
  Sense strand starting at position 3086 of SEQ ID NO: 1245390
ggaaacuugugucaggaag

SEQ ID NO: 1559039 - RNA, 19 nt, Artificial Sequence
  Description of Artificial Sequence: Synthetic oligonucleotide
  Antisense strand to SEQ ID NO: 1559038
cuuccugacacaaguuucc

SEQ ID NO: 1559040 - RNA, 19 nt, Artificial Sequence
  Description of Artificial Sequence: Synthetic oligonucleotide
  Sense strand starting at position 3125 of SEQ ID NO: 1245390
cucugugguucccucuaaa

SEQ ID NO: 1559041 - RNA, 19 nt, Artificial Sequence
  Description of Artificial Sequence: Synthetic oligonucleotide
  Antisense strand to SEQ ID NO: 1559040
uuuagagggaaccacagag

SEQ ID NO: 1559042 - RNA, 19 nt, Artificial Sequence
  Description of Artificial Sequence: Synthetic oligonucleotide
  Sense strand starting at position 3306 of SEQ ID NO: 1245390
cagggaauugggugcugaa

SEQ ID NO: 1559043 - RNA, 19 nt, Artificial Sequence
  Description of Artificial Sequence: Synthetic oligonucleotide
  Antisense strand to SEQ ID NO: 1559042
uucagcacccaauucccug

SEQ ID NO: 1559044 - RNA, 19 nt, Artificial Sequence
  Description of Artificial Sequence: Synthetic oligonucleotide
  Sense strand starting at position 3355 of SEQ ID NO: 1245390
gguggacaguuuccaagau

SEQ ID NO: 1559045 - RNA, 19 nt, Artificial Sequence
  Description of Artificial Sequence: Synthetic oligonucleotide
  Antisense strand to SEQ ID NO: 1559044
aucuuggaaacuguccacc

SEQ ID NO: 1559046 - RNA, 19 nt, Artificial Sequence
  Description of Artificial Sequence: Synthetic oligonucleotide
  Sense strand starting at position 3441 of SEQ ID NO: 1245390
gucaaaucccuuuguccac

SEQ ID NO: 1559047 - RNA, 19 nt, Artificial Sequence
  Description of Artificial Sequence: Synthetic oligonucleotide
  Antisense strand to SEQ ID NO: 1559046
guggacaaagggauuugac

SEQ ID NO: 1559048 - RNA, 19 nt, Artificial Sequence
  Description of Artificial Sequence: Synthetic oligonucleotide
  Sense strand starting at position 3456 of SEQ ID NO: 1245390
ccacaaaggcacuaguuaa

SEQ ID NO: 1559049 - RNA, 19 nt, Artificial Sequence
  Description of Artificial Sequence: Synthetic oligonucleotide
  Antisense strand to SEQ ID NO: 1559048
uuaacuagugccuuugugg

SEQ ID NO: 1559050 - RNA, 19 nt, Artificial Sequence
  Description of Artificial Sequence: Synthetic oligonucleotide
  Sense strand starting at position 3565 of SEQ ID NO: 1245390
ccagaaguguuugcugugu

SEQ ID NO: 1559051 - RNA, 19 nt, Artificial Sequence
  Description of Artificial Sequence: Synthetic oligonucleotide
  Antisense strand to SEQ ID NO: 1559050
acacagcaaacacuucugg

SEQ ID NO: 1559052 - RNA, 19 nt, Artificial Sequence
  Description of Artificial Sequence: Synthetic oligonucleotide
  Sense strand starting at position 168 of SEQ ID NO: 1245391
ucuuuaauguuugcgacaa

SEQ ID NO: 1559053 - RNA, 19 nt, Artificial Sequence
  Description of Artificial Sequence: Synthetic oligonucleotide
  Antisense strand to SEQ ID NO: 1559052
uugucgcaaacauuaaaga

SEQ ID NO: 1559054 - RNA, 19 nt, Artificial Sequence
  Description of Artificial Sequence: Synthetic oligonucleotide
  Sense strand starting at position 172 of SEQ ID NO: 1245391
uaauguuugcgacaagugu

SEQ ID NO: 1559055 - RNA, 19 nt, Artificial Sequence
  Description of Artificial Sequence: Synthetic oligonucleotide
  Antisense strand to SEQ ID NO: 1559054
acacuugucgcaaacauua

SEQ ID NO: 1559056 - RNA, 19 nt, Artificial Sequence
  Description of Artificial Sequence: Synthetic oligonucleotide
  Sense strand starting at position 183 of SEQ ID NO: 1245391
acaagugucucaucuggau

SEQ ID NO: 1559057 - RNA, 19 nt, Artificial Sequence
  Description of Artificial Sequence: Synthetic oligonucleotide
  Antisense strand to SEQ ID NO: 1559056
auccagaugagacacuugu

SEQ ID NO: 1559058 - RNA, 19 nt, Artificial Sequence
  Description of Artificial Sequence: Synthetic oligonucleotide
  Sense strand starting at position 195 of SEQ ID NO: 1245391
ucuggauucucgucuacua

SEQ ID NO: 1559059 - RNA, 19 nt, Artificial Sequence
  Description of Artificial Sequence: Synthetic oligonucleotide
  Antisense strand to SEQ ID NO: 1559058
uaguagacgagaauccaga

SEQ ID NO: 1559060 - RNA, 19 nt, Artificial Sequence
  Description of Artificial Sequence: Synthetic oligonucleotide
  Sense strand starting at position 197 of SEQ ID NO: 1245391
uggauucucgucuacuaca

SEQ ID NO: 1559061 - RNA, 19 nt, Artificial Sequence
  Description of Artificial Sequence: Synthetic oligonucleotide
  Antisense strand to SEQ ID NO: 1559060
uguaguagacgagaaucca

SEQ ID NO: 1559062 - RNA, 19 nt, Artificial Sequence
  Description of Artificial Sequence: Synthetic oligonucleotide
  Sense strand starting at position 219 of SEQ ID NO: 1245391
ugguguuuaagugauucuu

SEQ ID NO: 1559063 - RNA, 19 nt, Artificial Sequence
  Description of Artificial Sequence: Synthetic oligonucleotide
  Antisense strand to SEQ ID NO: 1559062
aagaaucacuuaaacacca

SEQ ID NO: 1559064 - RNA, 19 nt, Artificial Sequence
  Description of Artificial Sequence: Synthetic oligonucleotide
  Sense strand starting at position 244 of SEQ ID NO: 1245391
aacauuaacgccuaucgua

SEQ ID NO: 1559065 - RNA, 19 nt, Artificial Sequence
  Description of Artificial Sequence: Synthetic oligonucleotide
  Antisense strand to SEQ ID NO: 1559064
uacgauaggcguuaauguu

SEQ ID NO: 1559066 - RNA, 19 nt, Artificial Sequence
  Description of Artificial Sequence: Synthetic oligonucleotide
  Sense strand starting at position 257 of SEQ ID NO: 1245391
aucguaaacgcucaacaaa

SEQ ID NO: 1559067 - RNA, 19 nt, Artificial Sequence
  Description of Artificial Sequence: Synthetic oligonucleotide
  Antisense strand to SEQ ID NO: 1559066
uuuguugagcguuuacgau

SEQ ID NO: 1559068 - RNA, 19 nt, Artificial Sequence
  Description of Artificial Sequence: Synthetic oligonucleotide
  Sense strand starting at position 260 of SEQ ID NO: 1245391
guaaacgcucaacaaauau

SEQ ID NO: 1559069 - RNA, 19 nt, Artificial Sequence
  Description of Artificial Sequence: Synthetic oligonucleotide
  Antisense strand to SEQ ID NO: 1559068
auauuuguugagcguuuac

SEQ ID NO: 1559070 - RNA, 19 nt, Artificial Sequence
  Description of Artificial Sequence: Synthetic oligonucleotide
  Sense strand starting at position 288 of SEQ ID NO: 1245391
ccaaucuguaggcaggaau

SEQ ID NO: 1559071 - RNA, 19 nt, Artificial Sequence
  Description of Artificial Sequence: Synthetic oligonucleotide
  Antisense strand to SEQ ID NO: 1559070
auuccugccuacagauugg

SEQ ID NO: 1559072 - RNA, 19 nt, Artificial Sequence
  Description of Artificial Sequence: Synthetic oligonucleotide
  Sense strand starting at position 301 of SEQ ID NO: 1245391
aggaaucaagcccgugaga

SEQ ID NO: 1559073 - RNA, 19 nt, Artificial Sequence
  Description of Artificial Sequence: Synthetic oligonucleotide
  Antisense strand to SEQ ID NO: 1559072
ucucacgggcuugauuccu

SEQ ID NO: 1559074 - RNA, 19 nt, Artificial Sequence
  Description of Artificial Sequence: Synthetic oligonucleotide
  Sense strand starting at position 303 of SEQ ID NO: 1245391
gaaucaagcccgugagaaa

SEQ ID NO: 1559075 - RNA, 19 nt, Artificial Sequence
  Description of Artificial Sequence: Synthetic oligonucleotide
  Antisense strand to SEQ ID NO: 1559074
uuucucacgggcuugauuc

SEQ ID NO: 1559076 - RNA, 19 nt, Artificial Sequence
  Description of Artificial Sequence: Synthetic oligonucleotide
  Sense strand starting at position 390 of SEQ ID NO: 1245391
cguuacuacucaucucaga

SEQ ID NO: 1559077 - RNA, 19 nt, Artificial Sequence
  Description of Artificial Sequence: Synthetic oligonucleotide
  Antisense strand to SEQ ID NO: 1559076
ucugagaugaguaguaacg

SEQ ID NO: 1559078 - RNA, 19 nt, Artificial Sequence
  Description of Artificial Sequence: Synthetic oligonucleotide
  Sense strand starting at position 2564 of SEQ ID NO: 1245391
gcuuccgugcgguccuaaa

SEQ ID NO: 1559079 - RNA, 19 nt, Artificial Sequence
  Description of Artificial Sequence: Synthetic oligonucleotide
  Antisense strand to SEQ ID NO: 1559078
uuuaggaccgcacggaagc

SEQ ID NO: 1559080 - RNA, 19 nt, Artificial Sequence
  Description of Artificial Sequence: Synthetic oligonucleotide
  Sense strand starting at position 2826 of SEQ ID NO: 1245391
ggguuucuccgaagugagu

SEQ ID NO: 1559081 - RNA, 19 nt, Artificial Sequence
  Description of Artificial Sequence: Synthetic oligonucleotide
  Antisense strand to SEQ ID NO: 1559080
acucacuucggagaaaccc

SEQ ID NO: 1559082 - RNA, 19 nt, Artificial Sequence
  Description of Artificial Sequence: Synthetic oligonucleotide
  Sense strand starting at position 2915 of SEQ ID NO: 1245391
ugucucccaccuugugaaa

SEQ ID NO: 1559083 - RNA, 19 nt, Artificial Sequence
  Description of Artificial Sequence: Synthetic oligonucleotide
  Antisense strand to SEQ ID NO: 1559082
uuucacaaggugggagaca

SEQ ID NO: 1559084 - RNA, 19 nt, Artificial Sequence
  Description of Artificial Sequence: Synthetic oligonucleotide
  Sense strand starting at position 2926 of SEQ ID NO: 1245391
uugugaaacuuugccaggu

SEQ ID NO: 1559085 - RNA, 19 nt, Artificial Sequence
  Description of Artificial Sequence: Synthetic oligonucleotide
  Antisense strand to SEQ ID NO: 1559084
accuggcaaaguuucacaa

SEQ ID NO: 1559086 - RNA, 19 nt, Artificial Sequence
  Description of Artificial Sequence: Synthetic oligonucleotide
  Sense strand starting at position 3241 of SEQ ID NO: 1245391
aaugacauuucggugccua

SEQ ID NO: 1559087 - RNA, 19 nt, Artificial Sequence
  Description of Artificial Sequence: Synthetic oligonucleotide
  Antisense strand to SEQ ID NO: 1559086
uaggcaccgaaaugucauu

SEQ ID NO: 1559088 - RNA, 19 nt, Artificial Sequence
  Description of Artificial Sequence: Synthetic oligonucleotide
  Sense strand starting at position 3242 of SEQ ID NO: 1245391
augacauuucggugccuaa

SEQ ID NO: 1559089 - RNA, 19 nt, Artificial Sequence
  Description of Artificial Sequence: Synthetic oligonucleotide
  Antisense strand to SEQ ID NO: 1559088
uuaggcaccgaaaugucau

SEQ ID NO: 1559090 - RNA, 19 nt, Artificial Sequence
  Description of Artificial Sequence: Synthetic oligonucleotide
  Sense strand starting at position 3274 of SEQ ID NO: 1245391
cuuguucugcugugaauuu

SEQ ID NO: 1559091 - RNA, 19 nt, Artificial Sequence
  Description of Artificial Sequence: Synthetic oligonucleotide
  Antisense strand to SEQ ID NO: 1559090
aaauucacagcagaacaag

SEQ ID NO: 1559092 - RNA, 19 nt, Artificial Sequence
  Description of Artificial Sequence: Synthetic oligonucleotide
  Sense strand starting at position 3302 of SEQ ID NO: 1245391
ggaggaauuuaauaagcua

SEQ ID NO: 1559093 - RNA, 19 nt, Artificial Sequence
  Description of Artificial Sequence: Synthetic oligonucleotide
  Antisense strand to SEQ ID NO: 1559092
uagcuuauuaaauuccucc

SEQ ID NO: 1559094 - RNA, 19 nt, Artificial Sequence
  Description of Artificial Sequence: Synthetic oligonucleotide
  Sense strand starting at position 3325 of SEQ ID NO: 1245391
cuugacaggcuuuaaacuu

SEQ ID NO: 1559095 - RNA, 19 nt, Artificial Sequence
  Description of Artificial Sequence: Synthetic oligonucleotide
  Antisense strand to SEQ ID NO: 1559094
aaguuuaaagccugucaag

SEQ ID NO: 1559096 - RNA, 19 nt, Artificial Sequence
  Description of Artificial Sequence: Synthetic oligonucleotide
  Sense strand starting at position 3373 of SEQ ID NO: 1245391
gauuuaggcuuccaagaug

SEQ ID NO: 1559097 - RNA, 19 nt, Artificial Sequence
  Description of Artificial Sequence: Synthetic oligonucleotide
  Antisense strand to SEQ ID NO: 1559096
caucuuggaagccuaaauc

SEQ ID NO: 1559098 - RNA, 19 nt, Artificial Sequence
  Description of Artificial Sequence: Synthetic oligonucleotide
  Sense strand starting at position 3534 of SEQ ID NO: 1245391
cuacuacagcuauguagua

SEQ ID NO: 1559099 - RNA, 19 nt, Artificial Sequence
  Description of Artificial Sequence: Synthetic oligonucleotide
  Antisense strand to SEQ ID NO: 1559098
uacuacauagcuguaguag

SEQ ID NO: 1559100 - RNA, 19 nt, Artificial Sequence
  Description of Artificial Sequence: Synthetic oligonucleotide
  Sense strand starting at position 3541 of SEQ ID NO: 1245391
agcuauguaguaggaguau

SEQ ID NO: 1559101 - RNA, 19 nt, Artificial Sequence
  Description of Artificial Sequence: Synthetic oligonucleotide
  Antisense strand to SEQ ID NO: 1559100
auacuccuacuacauagcu

SEQ ID NO: 1559102 - RNA, 19 nt, Artificial Sequence
  Description of Artificial Sequence: Synthetic oligonucleotide
  Sense strand starting at position 3547 of SEQ ID NO: 1245391
guaguaggaguaugcagaa

SEQ ID NO: 1559103 - RNA, 19 nt, Artificial Sequence
  Description of Artificial Sequence: Synthetic oligonucleotide
  Antisense strand to SEQ ID NO: 1559102
uucugcauacuccuacuac

SEQ ID NO: 1559104 - RNA, 19 nt, Artificial Sequence
  Description of Artificial Sequence: Synthetic oligonucleotide
  Sense strand starting at position 3566 of SEQ ID NO: 1245391
agauaagaaucacauugua

SEQ ID NO: 1559105 - RNA, 19 nt, Artificial Sequence
  Description of Artificial Sequence: Synthetic oligonucleotide
  Antisense strand to SEQ ID NO: 1559104
uacaaugugauucuuaucu

SEQ ID NO: 1559106 - RNA, 19 nt, Artificial Sequence
  Description of Artificial Sequence: Synthetic oligonucleotide
  Sense strand starting at position 3644 of SEQ ID NO: 1245391
ucacaaguuuauguccuaa

SEQ ID NO: 1559107 - RNA, 19 nt, Artificial Sequence
  Description of Artificial Sequence: Synthetic oligonucleotide
  Antisense strand to SEQ ID NO: 1559106
uuaggacauaaacuuguga

SEQ ID NO: 1559108 - RNA, 19 nt, Artificial Sequence
  Description of Artificial Sequence: Synthetic oligonucleotide
  Sense strand starting at position 3646 of SEQ ID NO: 1245391
acaaguuuauguccuaaga

SEQ ID NO: 1559109 - RNA, 19 nt, Artificial Sequence
  Description of Artificial Sequence: Synthetic oligonucleotide
  Antisense strand to SEQ ID NO: 1559108
ucuuaggacauaaacuugu

SEQ ID NO: 1559110 - RNA, 19 nt, Artificial Sequence
  Description of Artificial Sequence: Synthetic oligonucleotide
  Sense strand starting at position 3691 of SEQ ID NO: 1245391
ugaacugaagccugaauca

SEQ ID NO: 1559111 - RNA, 19 nt, Artificial Sequence
  Description of Artificial Sequence: Synthetic oligonucleotide
  Antisense strand to SEQ ID NO: 1559110
ugauucaggcuucaguuca

SEQ ID NO: 1559112 - RNA, 19 nt, Artificial Sequence
  Description of Artificial Sequence: Synthetic oligonucleotide
  Sense strand starting at position 3778 of SEQ ID NO: 1245391
agucacucuuucuuguaau

SEQ ID NO: 1559113 - RNA, 19 nt, Artificial Sequence
  Description of Artificial Sequence: Synthetic oligonucleotide
  Antisense strand to SEQ ID NO: 1559112
auuacaagaaagagugacu

SEQ ID NO: 1559114 - RNA, 19 nt, Artificial Sequence
  Description of Artificial Sequence: Synthetic oligonucleotide
  Sense strand starting at position 3792 of SEQ ID NO: 1245391
guaauuugcuaguucuuua

SEQ ID NO: 1559115 - RNA, 19 nt, Artificial Sequence
  Description of Artificial Sequence: Synthetic oligonucleotide
  Antisense strand to SEQ ID NO: 1559114
uaaagaacuagcaaauuac

SEQ ID NO: 1559116 - RNA, 19 nt, Artificial Sequence
  Description of Artificial Sequence: Synthetic oligonucleotide
  Sense strand starting at position 3805 of SEQ ID NO: 1245391
ucuuuacagucuuuagaug

SEQ ID NO: 1559117 - RNA, 19 nt, Artificial Sequence
  Description of Artificial Sequence: Synthetic oligonucleotide
  Antisense strand to SEQ ID NO: 1559116
caucuaaagacuguaaaga

SEQ ID NO: 1559118 - RNA, 19 nt, Artificial Sequence
  Description of Artificial Sequence: Synthetic oligonucleotide
  Sense strand starting at position 3806 of SEQ ID NO: 1245391
cuuuacagucuuuagaugu

SEQ ID NO: 1559119 - RNA, 19 nt, Artificial Sequence
  Description of Artificial Sequence: Synthetic oligonucleotide
  Antisense strand to SEQ ID NO: 1559118
acaucuaaagacuguaaag

SEQ ID NO: 1559120 - RNA, 19 nt, Artificial Sequence
  Description of Artificial Sequence: Synthetic oligonucleotide
  Sense strand starting at position 3819 of SEQ ID NO: 1245391
agauguaauuuacagccaa

SEQ ID NO: 1559121 - RNA, 19 nt, Artificial Sequence
  Description of Artificial Sequence: Synthetic oligonucleotide
  Antisense strand to SEQ ID NO: 1559120
uuggcuguaaauuacaucu

SEQ ID NO: 1559122 - RNA, 19 nt, Artificial Sequence
  Description of Artificial Sequence: Synthetic oligonucleotide
  Sense strand starting at position 3851 of SEQ ID NO: 1245391
ugaggacuuauacgucauu

SEQ ID NO: 1559123 - RNA, 19 nt, Artificial Sequence
  Description of Artificial Sequence: Synthetic oligonucleotide
  Antisense strand to SEQ ID NO: 1559122
aaugacguauaaguccuca

SEQ ID NO: 1559124 - RNA, 19 nt, Artificial Sequence
  Description of Artificial Sequence: Synthetic oligonucleotide
  Sense strand starting at position 3890 of SEQ ID NO: 1245391
ucaacuacccugggaucuu

SEQ ID NO: 1559125 - RNA, 19 nt, Artificial Sequence
  Description of Artificial Sequence: Synthetic oligonucleotide
  Antisense strand to SEQ ID NO: 1559124
aagaucccaggguaguuga

SEQ ID NO: 1559126 - RNA, 19 nt, Artificial Sequence
  Description of Artificial Sequence: Synthetic oligonucleotide
  Sense strand starting at position 3901 of SEQ ID NO: 1245391
gggaucuucuacucauauc

SEQ ID NO: 1559127 - RNA, 19 nt, Artificial Sequence
  Description of Artificial Sequence: Synthetic oligonucleotide
  Antisense strand to SEQ ID NO: 1559126
gauaugaguagaagauccc

SEQ ID NO: 1559128 - RNA, 19 nt, Artificial Sequence
  Description of Artificial Sequence: Synthetic oligonucleotide
  Sense strand starting at position 3942 of SEQ ID NO: 1245391
uaaagcuuagggugaaaua

SEQ ID NO: 1559129 - RNA, 19 nt, Artificial Sequence
  Description of Artificial Sequence: Synthetic oligonucleotide
  Antisense strand to SEQ ID NO: 1559128
uauuucacccuaagcuuua

SEQ ID NO: 1559130 - RNA, 19 nt, Artificial Sequence
  Description of Artificial Sequence: Synthetic oligonucleotide
  Sense strand starting at position 3954 of SEQ ID NO: 1245391
ugaaauacuuaggcaacua

SEQ ID NO: 1559131 - RNA, 19 nt, Artificial Sequence
  Description of Artificial Sequence: Synthetic oligonucleotide
  Antisense strand to SEQ ID NO: 1559130
uaguugccuaaguauuuca

SEQ ID NO: 1559132 - RNA, 19 nt, Artificial Sequence
  Description of Artificial Sequence: Synthetic oligonucleotide
  Sense strand starting at position 157 of SEQ ID NO: 1245392
acuuacgagaaaugugauu

SEQ ID NO: 1559133 - RNA, 19 nt, Artificial Sequence
  Description of Artificial Sequence: Synthetic oligonucleotide
  Antisense strand to SEQ ID NO: 1559132
aaucacauuucucguaagu

SEQ ID NO: 1559134 - RNA, 19 nt, Artificial Sequence
  Description of Artificial Sequence: Synthetic oligonucleotide
  Sense strand starting at position 159 of SEQ ID NO: 1245392
uuacgagaaaugugauuaa

SEQ ID NO: 1559135 - RNA, 19 nt, Artificial Sequence
  Description of Artificial Sequence: Synthetic oligonucleotide
  Antisense strand to SEQ ID NO: 1559134
uuaaucacauuucucguaa

SEQ ID NO: 1559136 - RNA, 19 nt, Artificial Sequence
  Description of Artificial Sequence: Synthetic oligonucleotide
  Sense strand starting at position 162 of SEQ ID NO: 1245392
cgagaaaugugauuaacac

SEQ ID NO: 1559137 - RNA, 19 nt, Artificial Sequence
  Description of Artificial Sequence: Synthetic oligonucleotide
  Antisense strand to SEQ ID NO: 1559136
guguuaaucacauuucucg

SEQ ID NO: 1559138 - RNA, 19 nt, Artificial Sequence
  Description of Artificial Sequence: Synthetic oligonucleotide
  Sense strand starting at position 400 of SEQ ID NO: 1245392
gaagccuucuaguuuaugu

SEQ ID NO: 1559139 - RNA, 19 nt, Artificial Sequence
  Description of Artificial Sequence: Synthetic oligonucleotide
  Antisense strand to SEQ ID NO: 1559138
acauaaacuagaaggcuuc

SEQ ID NO: 1559140 - RNA, 19 nt, Artificial Sequence
  Description of Artificial Sequence: Synthetic oligonucleotide
  Sense strand starting at position 402 of SEQ ID NO: 1245392
agccuucuaguuuauguaa

SEQ ID NO: 1559141 - RNA, 19 nt, Artificial Sequence
  Description of Artificial Sequence: Synthetic oligonucleotide
  Antisense strand to SEQ ID NO: 1559140
uuacauaaacuagaaggcu

SEQ ID NO: 1559142 - RNA, 19 nt, Artificial Sequence
  Description of Artificial Sequence: Synthetic oligonucleotide
  Sense strand starting at position 405 of SEQ ID NO: 1245392
cuucuaguuuauguaaguu

SEQ ID NO: 1559143 - RNA, 19 nt, Artificial Sequence
  Description of Artificial Sequence: Synthetic oligonucleotide
  Antisense strand to SEQ ID NO: 1559142
aacuuacauaaacuagaag

SEQ ID NO: 1559144 - RNA, 19 nt, Artificial Sequence
  Description of Artificial Sequence: Synthetic oligonucleotide
  Sense strand starting at position 427 of SEQ ID NO: 1245392
ucuauugauguuuguccua

SEQ ID NO: 1559145 - RNA, 19 nt, Artificial Sequence
  Description of Artificial Sequence: Synthetic oligonucleotide
  Antisense strand to SEQ ID NO: 1559144
uaggacaaacaucaauaga

SEQ ID NO: 1559146 - RNA, 19 nt, Artificial Sequence
  Description of Artificial Sequence: Synthetic oligonucleotide
  Sense strand starting at position 580 of SEQ ID NO: 1245392
uuguaaugucucgauuaac

SEQ ID NO: 1559147 - RNA, 19 nt, Artificial Sequence
  Description of Artificial Sequence: Synthetic oligonucleotide
  Antisense strand to SEQ ID NO: 1559146
guuaaucgagacauuacaa

SEQ ID NO: 1559148 - RNA, 19 nt, Artificial Sequence
  Description of Artificial Sequence: Synthetic oligonucleotide
  Sense strand starting at position 583 of SEQ ID NO: 1245392
uaaugucucgauuaacaga

SEQ ID NO: 1559149 - RNA, 19 nt, Artificial Sequence
  Description of Artificial Sequence: Synthetic oligonucleotide
  Antisense strand to SEQ ID NO: 1559148
ucuguuaaucgagacauua

SEQ ID NO: 1559150 - RNA, 19 nt, Artificial Sequence
  Description of Artificial Sequence: Synthetic oligonucleotide
  Sense strand starting at position 604 of SEQ ID NO: 1245392
acaguuggauugucauauc

SEQ ID NO: 1559151 - RNA, 19 nt, Artificial Sequence
  Description of Artificial Sequence: Synthetic oligonucleotide
  Antisense strand to SEQ ID NO: 1559150
gauaugacaauccaacugu

SEQ ID NO: 1559152 - RNA, 19 nt, Artificial Sequence
  Description of Artificial Sequence: Synthetic oligonucleotide
  Sense strand starting at position 614 of SEQ ID NO: 1245392
ugucauaucuauucugcau

SEQ ID NO: 1559153 - RNA, 19 nt, Artificial Sequence
  Description of Artificial Sequence: Synthetic oligonucleotide
  Antisense strand to SEQ ID NO: 1559152
augcagaauagauaugaca

SEQ ID NO: 1559154 - RNA, 19 nt, Artificial Sequence
  Description of Artificial Sequence: Synthetic oligonucleotide
  Sense strand starting at position 649 of SEQ ID NO: 1245392
uguucuucuugacugugau

SEQ ID NO: 1559155 - RNA, 19 nt, Artificial Sequence
  Description of Artificial Sequence: Synthetic oligonucleotide
  Antisense strand to SEQ ID NO: 1559154
aucacagucaagaagaaca

SEQ ID NO: 1559156 - RNA, 19 nt, Artificial Sequence
  Description of Artificial Sequence: Synthetic oligonucleotide
  Sense strand starting at position 650 of SEQ ID NO: 1245392
guucuucuugacugugaua

SEQ ID NO: 1559157 - RNA, 19 nt, Artificial Sequence
  Description of Artificial Sequence: Synthetic oligonucleotide
  Antisense strand to SEQ ID NO: 1559156
uaucacagucaagaagaac

SEQ ID NO: 1559158 - RNA, 19 nt, Artificial Sequence
  Description of Artificial Sequence: Synthetic oligonucleotide
  Sense strand starting at position 652 of SEQ ID NO: 1245392
ucuucuugacugugauaca

SEQ ID NO: 1559159 - RNA, 19 nt, Artificial Sequence
  Description of Artificial Sequence: Synthetic oligonucleotide
  Antisense strand to SEQ ID NO: 1559158
uguaucacagucaagaaga

SEQ ID NO: 1559160 - RNA, 19 nt, Artificial Sequence
  Description of Artificial Sequence: Synthetic oligonucleotide
  Sense strand starting at position 663 of SEQ ID NO: 1245392
gugauacaugaagguaaua

SEQ ID NO: 1559161 - RNA, 19 nt, Artificial Sequence
  Description of Artificial Sequence: Synthetic oligonucleotide
  Antisense strand to SEQ ID NO: 1559160
uauuaccuucauguaucac

SEQ ID NO: 1559162 - RNA, 19 nt, Artificial Sequence
  Description of Artificial Sequence: Synthetic oligonucleotide
  Sense strand starting at position 709 of SEQ ID NO: 1245392
ccaccuagauucgugcuaa

SEQ ID NO: 1559163 - RNA, 19 nt, Artificial Sequence
  Description of Artificial Sequence: Synthetic oligonucleotide
  Antisense strand to SEQ ID NO: 1559162
uuagcacgaaucuaggugg

SEQ ID NO: 1559164 - RNA, 19 nt, Artificial Sequence
  Description of Artificial Sequence: Synthetic oligonucleotide
  Sense strand starting at position 724 of SEQ ID NO: 1245392
cuaagaugucagcaguugu

SEQ ID NO: 1559165 - RNA, 19 nt, Artificial Sequence
  Description of Artificial Sequence: Synthetic oligonucleotide
  Antisense strand to SEQ ID NO: 1559164
acaacugcugacaucuuag

SEQ ID NO: 1559166 - RNA, 19 nt, Artificial Sequence
  Description of Artificial Sequence: Synthetic oligonucleotide
  Sense strand starting at position 798 of SEQ ID NO: 1245392
acagucuuagucuaugaua

SEQ ID NO: 1559167 - RNA, 19 nt, Artificial Sequence
  Description of Artificial Sequence: Synthetic oligonucleotide
  Antisense strand to SEQ ID NO: 1559166
uaucauagacuaagacugu

SEQ ID NO: 1559168 - RNA, 19 nt, Artificial Sequence
  Description of Artificial Sequence: Synthetic oligonucleotide
  Sense strand starting at position 800 of SEQ ID NO: 1245392
agucuuagucuaugauauu

SEQ ID NO: 1559169 - RNA, 19 nt, Artificial Sequence
  Description of Artificial Sequence: Synthetic oligonucleotide
  Antisense strand to SEQ ID NO: 1559168
aauaucauagacuaagacu

SEQ ID NO: 1559170 - RNA, 19 nt, Artificial Sequence
  Description of Artificial Sequence: Synthetic oligonucleotide
  Sense strand starting at position 803 of SEQ ID NO: 1245392
cuuagucuaugauauuuac

SEQ ID NO: 1559171 - RNA, 19 nt, Artificial Sequence
  Description of Artificial Sequence: Synthetic oligonucleotide
  Antisense strand to SEQ ID NO: 1559170
guaaauaucauagacuaag

SEQ ID NO: 1559172 - RNA, 19 nt, Artificial Sequence
  Description of Artificial Sequence: Synthetic oligonucleotide
  Sense strand starting at position 898 of SEQ ID NO: 1245392
gaggacugguguucagaag

SEQ ID NO: 1559173 - RNA, 19 nt, Artificial Sequence
  Description of Artificial Sequence: Synthetic oligonucleotide
  Antisense strand to SEQ ID NO: 1559172
cuucugaacaccaguccuc

SEQ ID NO: 1559174 - RNA, 19 nt, Artificial Sequence
  Description of Artificial Sequence: Synthetic oligonucleotide
  Sense strand starting at position 953 of SEQ ID NO: 1245392
cucugaagacgcuaaauca

SEQ ID NO: 1559175 - RNA, 19 nt, Artificial Sequence
  Description of Artificial Sequence: Synthetic oligonucleotide
  Antisense strand to SEQ ID NO: 1559174
ugauuuagcgucuucagag

SEQ ID NO: 1559176 - RNA, 19 nt, Artificial Sequence
  Description of Artificial Sequence: Synthetic oligonucleotide
  Sense strand starting at position 1017 of SEQ ID NO: 1245392
uggcaaaugcccuaagaca

SEQ ID NO: 1559177 - RNA, 19 nt, Artificial Sequence
  Description of Artificial Sequence: Synthetic oligonucleotide
  Antisense strand to SEQ ID NO: 1559176
ugucuuagggcauuugcca

SEQ ID NO: 1559178 - RNA, 19 nt, Artificial Sequence
  Description of Artificial Sequence: Synthetic oligonucleotide
  Sense strand starting at position 1137 of SEQ ID NO: 1245392
guuucuguuaaagggauga

SEQ ID NO: 1559179 - RNA, 19 nt, Artificial Sequence
  Description of Artificial Sequence: Synthetic oligonucleotide
  Antisense strand to SEQ ID NO: 1559178
ucaucccuuuaacagaaac

SEQ ID NO: 1559180 - RNA, 19 nt, Artificial Sequence
  Description of Artificial Sequence: Synthetic oligonucleotide
  Sense strand starting at position 1182 of SEQ ID NO: 1245392
gguguagccaucugauuua

SEQ ID NO: 1559181 - RNA, 19 nt, Artificial Sequence
  Description of Artificial Sequence: Synthetic oligonucleotide
  Antisense strand to SEQ ID NO: 1559180
uaaaucagauggcuacacc

SEQ ID NO: 1559182 - RNA, 19 nt, Artificial Sequence
  Description of Artificial Sequence: Synthetic oligonucleotide
  Sense strand starting at position 1221 of SEQ ID NO: 1245392
gcugacaagugacagauuu

SEQ ID NO: 1559183 - RNA, 19 nt, Artificial Sequence
  Description of Artificial Sequence: Synthetic oligonucleotide
  Antisense strand to SEQ ID NO: 1559182
aaaucugucacuugucagc

SEQ ID NO: 1559184 - RNA, 19 nt, Artificial Sequence
  Description of Artificial Sequence: Synthetic oligonucleotide
  Sense strand starting at position 1321 of SEQ ID NO: 1245392
ggguaucucuggagaugga

SEQ ID NO: 1559185 - RNA, 19 nt, Artificial Sequence
  Description of Artificial Sequence: Synthetic oligonucleotide
  Antisense strand to SEQ ID NO: 1559184
uccaucuccagagauaccc

SEQ ID NO: 1559186 - RNA, 19 nt, Artificial Sequence
  Description of Artificial Sequence: Synthetic oligonucleotide
  Sense strand starting at position 1356 of SEQ ID NO: 1245392
ggaaauacauucccgaggu

SEQ ID NO: 1559187 - RNA, 19 nt, Artificial Sequence
  Description of Artificial Sequence: Synthetic oligonucleotide
  Antisense strand to SEQ ID NO: 1559186
accucgggaauguauuucc

SEQ ID NO: 1559188 - RNA, 19 nt, Artificial Sequence
  Description of Artificial Sequence: Synthetic oligonucleotide
  Sense strand starting at position 1360 of SEQ ID NO: 1245392
auacauucccgagguagaa

SEQ ID NO: 1559189 - RNA, 19 nt, Artificial Sequence
  Description of Artificial Sequence: Synthetic oligonucleotide
  Antisense strand to SEQ ID NO: 1559188
uucuaccucgggaauguau

SEQ ID NO: 1559190 - RNA, 19 nt, Artificial Sequence
  Description of Artificial Sequence: Synthetic oligonucleotide
  Sense strand starting at position 1464 of SEQ ID NO: 1245392
agggauaccaucggugaga

SEQ ID NO: 1559191 - RNA, 19 nt, Artificial Sequence
  Description of Artificial Sequence: Synthetic oligonucleotide
  Antisense strand to SEQ ID NO: 1559190
ucucaccgaugguaucccu

SEQ ID NO: 1559192 - RNA, 19 nt, Artificial Sequence
  Description of Artificial Sequence: Synthetic oligonucleotide
  Sense strand starting at position 1465 of SEQ ID NO: 1245392
gggauaccaucggugagau

SEQ ID NO: 1559193 - RNA, 19 nt, Artificial Sequence
  Description of Artificial Sequence: Synthetic oligonucleotide
  Antisense strand to SEQ ID NO: 1559192
aucucaccgaugguauccc

SEQ ID NO: 1559194 - RNA, 19 nt, Artificial Sequence
  Description of Artificial Sequence: Synthetic oligonucleotide
  Sense strand starting at position 1466 of SEQ ID NO: 1245392
ggauaccaucggugagaug

SEQ ID NO: 1559195 - RNA, 19 nt, Artificial Sequence
  Description of Artificial Sequence: Synthetic oligonucleotide
  Antisense strand to SEQ ID NO: 1559194
caucucaccgaugguaucc

SEQ ID NO: 1559196 - RNA, 19 nt, Artificial Sequence
  Description of Artificial Sequence: Synthetic oligonucleotide
  Sense strand starting at position 2034 of SEQ ID NO: 1245392
gucacaagcucuuuaauga

SEQ ID NO: 1559197 - RNA, 19 nt, Artificial Sequence
  Description of Artificial Sequence: Synthetic oligonucleotide
  Antisense strand to SEQ ID NO: 1559196
ucauuaaagagcuugugac

SEQ ID NO: 1559198 - RNA, 19 nt, Artificial Sequence
  Description of Artificial Sequence: Synthetic oligonucleotide
  Sense strand starting at position 2045 of SEQ ID NO: 1245392
uuuaaugagccucaguuua

SEQ ID NO: 1559199 - RNA, 19 nt, Artificial Sequence
  Description of Artificial Sequence: Synthetic oligonucleotide
  Antisense strand to SEQ ID NO: 1559198
uaaacugaggcucauuaaa

SEQ ID NO: 1559200 - RNA, 19 nt, Artificial Sequence
  Description of Artificial Sequence: Synthetic oligonucleotide
  Sense strand starting at position 2081 of SEQ ID NO: 1245392
gggaacacuugagucacua

SEQ ID NO: 1559201 - RNA, 19 nt, Artificial Sequence
  Description of Artificial Sequence: Synthetic oligonucleotide
  Antisense strand to SEQ ID NO: 1559200
uagugacucaaguguuccc

SEQ ID NO: 1559202 - RNA, 19 nt, Artificial Sequence
  Description of Artificial Sequence: Synthetic oligonucleotide
  Sense strand starting at position 2123 of SEQ ID NO: 1245392
aacggcagucaagguauaa

SEQ ID NO: 1559203 - RNA, 19 nt, Artificial Sequence
  Description of Artificial Sequence: Synthetic oligonucleotide
  Antisense strand to SEQ ID NO: 1559202
uuauaccuugacugccguu

SEQ ID NO: 1559204 - RNA, 19 nt, Artificial Sequence
  Description of Artificial Sequence: Synthetic oligonucleotide
  Sense strand starting at position 2487 of SEQ ID NO: 1245392
gugugucugccugcucuua

SEQ ID NO: 1559205 - RNA, 19 nt, Artificial Sequence
  Description of Artificial Sequence: Synthetic oligonucleotide
  Antisense strand to SEQ ID NO: 1559204
uaagagcaggcagacacac

SEQ ID NO: 1559206 - RNA, 19 nt, Artificial Sequence
  Description of Artificial Sequence: Synthetic oligonucleotide
  Sense strand starting at position 2488 of SEQ ID NO: 1245392
ugugucugccugcucuuaa

SEQ ID NO: 1559207 - RNA, 19 nt, Artificial Sequence
  Description of Artificial Sequence: Synthetic oligonucleotide
  Antisense strand to SEQ ID NO: 1559206
uuaagagcaggcagacaca

SEQ ID NO: 1559208 - RNA, 19 nt, Artificial Sequence
  Description of Artificial Sequence: Synthetic oligonucleotide
  Sense strand starting at position 2562 of SEQ ID NO: 1245392
agcaaaguaccauggagaa

SEQ ID NO: 1559209 - RNA, 19 nt, Artificial Sequence
  Description of Artificial Sequence: Synthetic oligonucleotide
  Antisense strand to SEQ ID NO: 1559208
uucuccaugguacuuugcu

SEQ ID NO: 1559210 - RNA, 19 nt, Artificial Sequence
  Description of Artificial Sequence: Synthetic oligonucleotide
  Sense strand starting at position 3305 of SEQ ID NO: 1245392
ggcgacucgcccguaucau

SEQ ID NO: 1559211 - RNA, 19 nt, Artificial Sequence
  Description of Artificial Sequence: Synthetic oligonucleotide
  Antisense strand to SEQ ID NO: 1559210
augauacgggcgagucgcc

SEQ ID NO: 1559212 - RNA, 19 nt, Artificial Sequence
  Description of Artificial Sequence: Synthetic oligonucleotide
  Sense strand starting at position 260 of SEQ ID NO: 1245393
gccauuuagguuugugcaa

SEQ ID NO: 1559213 - RNA, 19 nt, Artificial Sequence
  Description of Artificial Sequence: Synthetic oligonucleotide
  Antisense strand to SEQ ID NO: 1559212
uugcacaaaccuaaauggc

SEQ ID NO: 1559214 - RNA, 19 nt, Artificial Sequence
  Description of Artificial Sequence: Synthetic oligonucleotide
  Sense strand starting at position 346 of SEQ ID NO: 1245393
uugaguuaugcaugaccuu

SEQ ID NO: 1559215 - RNA, 19 nt, Artificial Sequence
  Description of Artificial Sequence: Synthetic oligonucleotide
  Antisense strand to SEQ ID NO: 1559214
aaggucaugcauaacucaa

SEQ ID NO: 1559216 - RNA, 19 nt, Artificial Sequence
  Description of Artificial Sequence: Synthetic oligonucleotide
  Sense strand starting at position 347 of SEQ ID NO: 1245393
ugaguuaugcaugaccuua

SEQ ID NO: 1559217 - RNA, 19 nt, Artificial Sequence
  Description of Artificial Sequence: Synthetic oligonucleotide
  Antisense strand to SEQ ID NO: 1559216
uaaggucaugcauaacuca

SEQ ID NO: 1559218 - RNA, 19 nt, Artificial Sequence
  Description of Artificial Sequence: Synthetic oligonucleotide
  Sense strand starting at position 349 of SEQ ID NO: 1245393
aguuaugcaugaccuuauu

SEQ ID NO: 1559219 - RNA, 19 nt, Artificial Sequence
  Description of Artificial Sequence: Synthetic oligonucleotide
  Antisense strand to SEQ ID NO: 1559218
aauaaggucaugcauaacu

SEQ ID NO: 1559220 - RNA, 19 nt, Artificial Sequence
  Description of Artificial Sequence: Synthetic oligonucleotide
  Sense strand starting at position 418 of SEQ ID NO: 1245393
cgacaaacccuaugucaau

SEQ ID NO: 1559221 - RNA, 19 nt, Artificial Sequence
  Description of Artificial Sequence: Synthetic oligonucleotide
  Antisense strand to SEQ ID NO: 1559220
auugacauaggguuugucg

SEQ ID NO: 1559222 - RNA, 19 nt, Artificial Sequence
  Description of Artificial Sequence: Synthetic oligonucleotide
  Sense strand starting at position 518 of SEQ ID NO: 1245393
caggauugguguuuccuga

SEQ ID NO: 1559223 - RNA, 19 nt, Artificial Sequence
  Description of Artificial Sequence: Synthetic oligonucleotide
  Antisense strand to SEQ ID NO: 1559222
ucaggaaacaccaauccug

SEQ ID NO: 1559224 - RNA, 19 nt, Artificial Sequence
  Description of Artificial Sequence: Synthetic oligonucleotide
  Sense strand starting at position 555 of SEQ ID NO: 1245393
aaaggaagguucgcuuuau

SEQ ID NO: 1559225 - RNA, 19 nt, Artificial Sequence
  Description of Artificial Sequence: Synthetic oligonucleotide
  Antisense strand to SEQ ID NO: 1559224
auaaagcgaaccuuccuuu

SEQ ID NO: 1559226 - RNA, 19 nt, Artificial Sequence
  Description of Artificial Sequence: Synthetic oligonucleotide
  Sense strand starting at position 556 of SEQ ID NO: 1245393
aaggaagguucgcuuuauu

SEQ ID NO: 1559227 - RNA, 19 nt, Artificial Sequence
  Description of Artificial Sequence: Synthetic oligonucleotide
  Antisense strand to SEQ ID NO: 1559226
aauaaagcgaaccuuccuu

SEQ ID NO: 1559228 - RNA, 19 nt, Artificial Sequence
  Description of Artificial Sequence: Synthetic oligonucleotide
  Sense strand starting at position 559 of SEQ ID NO: 1245393
gaagguucgcuuuauuauu

SEQ ID NO: 1559229 - RNA, 19 nt, Artificial Sequence
  Description of Artificial Sequence: Synthetic oligonucleotide
  Antisense strand to SEQ ID NO: 1559228
aauaauaaagcgaaccuuc

SEQ ID NO: 1559230 - RNA, 19 nt, Artificial Sequence
  Description of Artificial Sequence: Synthetic oligonucleotide
  Sense strand starting at position 628 of SEQ ID NO: 1245393
uuaagaacuccuuggacuu

SEQ ID NO: 1559231 - RNA, 19 nt, Artificial Sequence
  Description of Artificial Sequence: Synthetic oligonucleotide
  Antisense strand to SEQ ID NO: 1559230
aaguccaaggaguucuuaa

SEQ ID NO: 1559232 - RNA, 19 nt, Artificial Sequence
  Description of Artificial Sequence: Synthetic oligonucleotide
  Sense strand starting at position 741 of SEQ ID NO: 1245393
ugcacauaauacguaaaua

SEQ ID NO: 1559233 - RNA, 19 nt, Artificial Sequence
  Description of Artificial Sequence: Synthetic oligonucleotide
  Antisense strand to SEQ ID NO: 1559232
uauuuacguauuaugugca

SEQ ID NO: 1559234 - RNA, 19 nt, Artificial Sequence
  Description of Artificial Sequence: Synthetic oligonucleotide
  Sense strand starting at position 953 of SEQ ID NO: 1245393
ccuuuauuauuugcacgau

SEQ ID NO: 1559235 - RNA, 19 nt, Artificial Sequence
  Description of Artificial Sequence: Synthetic oligonucleotide
  Antisense strand to SEQ ID NO: 1559234
aucgugcaaauaauaaagg

SEQ ID NO: 1559236 - RNA, 19 nt, Artificial Sequence
  Description of Artificial Sequence: Synthetic oligonucleotide
  Sense strand starting at position 983 of SEQ ID NO: 1245393
uguuguuuacgacacauac

SEQ ID NO: 1559237 - RNA, 19 nt, Artificial Sequence
  Description of Artificial Sequence: Synthetic oligonucleotide
  Antisense strand to SEQ ID NO: 1559236
guaugugucguaaacaaca

SEQ ID NO: 1559238 - RNA, 19 nt, Artificial Sequence
  Description of Artificial Sequence: Synthetic oligonucleotide
  Sense strand starting at position 1145 of SEQ ID NO: 1245393
auuaaauacccuggagugu

SEQ ID NO: 1559239 - RNA, 19 nt, Artificial Sequence
  Description of Artificial Sequence: Synthetic oligonucleotide
  Antisense strand to SEQ ID NO: 1559238
acacuccaggguauuuaau

SEQ ID NO: 1559240 - RNA, 19 nt, Artificial Sequence
  Description of Artificial Sequence: Synthetic oligonucleotide
  Sense strand starting at position 1173 of SEQ ID NO: 1245393
auacauaaggucuagccaa

SEQ ID NO: 1559241 - RNA, 19 nt, Artificial Sequence
  Description of Artificial Sequence: Synthetic oligonucleotide
  Antisense strand to SEQ ID NO: 1559240
uuggcuagaccuuauguau

SEQ ID NO: 1559242 - RNA, 19 nt, Artificial Sequence
  Description of Artificial Sequence: Synthetic oligonucleotide
  Sense strand starting at position 1197 of SEQ ID NO: 1245393
auucguuccuauuccaaga

SEQ ID NO: 1559243 - RNA, 19 nt, Artificial Sequence
  Description of Artificial Sequence: Synthetic oligonucleotide
  Antisense strand to SEQ ID NO: 1559242
ucuuggaauaggaacgaau

SEQ ID NO: 1559244 - RNA, 19 nt, Artificial Sequence
  Description of Artificial Sequence: Synthetic oligonucleotide
  Sense strand starting at position 1222 of SEQ ID NO: 1245393
uuaucaacggugcaaguau

SEQ ID NO: 1559245 - RNA, 19 nt, Artificial Sequence
  Description of Artificial Sequence: Synthetic oligonucleotide
  Antisense strand to SEQ ID NO: 1559244
auacuugcaccguugauaa

SEQ ID NO: 1559246 - RNA, 19 nt, Artificial Sequence
  Description of Artificial Sequence: Synthetic oligonucleotide
  Sense strand starting at position 1229 of SEQ ID NO: 1245393
cggugcaaguauuucuaca

SEQ ID NO: 1559247 - RNA, 19 nt, Artificial Sequence
  Description of Artificial Sequence: Synthetic oligonucleotide
  Antisense strand to SEQ ID NO: 1559246
uguagaaauacuugcaccg

SEQ ID NO: 1559248 - RNA, 19 nt, Artificial Sequence
  Description of Artificial Sequence: Synthetic oligonucleotide
  Sense strand starting at position 2271 of SEQ ID NO: 1245393
aaugaaagugaguguuugu

SEQ ID NO: 1559249 - RNA, 19 nt, Artificial Sequence
  Description of Artificial Sequence: Synthetic oligonucleotide
  Antisense strand to SEQ ID NO: 1559248
acaaacacucacuuucauu

SEQ ID NO: 1559250 - RNA, 19 nt, Artificial Sequence
  Description of Artificial Sequence: Synthetic oligonucleotide
  Sense strand starting at position 2274 of SEQ ID NO: 1245393
gaaagugaguguuugugaa

SEQ ID NO: 1559251 - RNA, 19 nt, Artificial Sequence
  Description of Artificial Sequence: Synthetic oligonucleotide
  Antisense strand to SEQ ID NO: 1559250
uucacaaacacucacuuuc

SEQ ID NO: 1559252 - RNA, 19 nt, Artificial Sequence
  Description of Artificial Sequence: Synthetic oligonucleotide
  Sense strand starting at position 2276 of SEQ ID NO: 1245393
aagugaguguuugugaaag

SEQ ID NO: 1559253 - RNA, 19 nt, Artificial Sequence
  Description of Artificial Sequence: Synthetic oligonucleotide
  Antisense strand to SEQ ID NO: 1559252
cuuucacaaacacucacuu

SEQ ID NO: 1559254 - RNA, 19 nt, Artificial Sequence
  Description of Artificial Sequence: Synthetic oligonucleotide
  Sense strand starting at position 2287 of SEQ ID NO: 1245393
ugugaaagcuuacuacauu

SEQ ID NO: 1559255 - RNA, 19 nt, Artificial Sequence
  Description of Artificial Sequence: Synthetic oligonucleotide
  Antisense strand to SEQ ID NO: 1559254
aauguaguaagcuuucaca

SEQ ID NO: 1559256 - RNA, 19 nt, Artificial Sequence
  Description of Artificial Sequence: Synthetic oligonucleotide
  Sense strand starting at position 2455 of SEQ ID NO: 1245393
guagcaagauuugaaacca

SEQ ID NO: 1559257 - RNA, 19 nt, Artificial Sequence
  Description of Artificial Sequence: Synthetic oligonucleotide
  Antisense strand to SEQ ID NO: 1559256
ugguuucaaaucuugcuac

SEQ ID NO: 1559258 - RNA, 19 nt, Artificial Sequence
  Description of Artificial Sequence: Synthetic oligonucleotide
  Sense strand starting at position 2465 of SEQ ID NO: 1245393
uugaaaccaagacgugauu

SEQ ID NO: 1559259 - RNA, 19 nt, Artificial Sequence
  Description of Artificial Sequence: Synthetic oligonucleotide
  Antisense strand to SEQ ID NO: 1559258
aaucacgucuugguuucaa

SEQ ID NO: 1559260 - RNA, 19 nt, Artificial Sequence
  Description of Artificial Sequence: Synthetic oligonucleotide
  Sense strand starting at position 2490 of SEQ ID NO: 1245393
uuuggcucccacuaguuau

SEQ ID NO: 1559261 - RNA, 19 nt, Artificial Sequence
  Description of Artificial Sequence: Synthetic oligonucleotide
  Antisense strand to SEQ ID NO: 1559260
auaacuagugggagccaaa

SEQ ID NO: 1559262 - RNA, 19 nt, Artificial Sequence
  Description of Artificial Sequence: Synthetic oligonucleotide
  Sense strand starting at position 2503 of SEQ ID NO: 1245393
aguuaugucauggagcuuu

SEQ ID NO: 1559263 - RNA, 19 nt, Artificial Sequence
  Description of Artificial Sequence: Synthetic oligonucleotide
  Antisense strand to SEQ ID NO: 1559262
aaagcuccaugacauaacu

SEQ ID NO: 1559264 - RNA, 19 nt, Artificial Sequence
  Description of Artificial Sequence: Synthetic oligonucleotide
  Sense strand starting at position 2530 of SEQ ID NO: 1245393
cuauuuaucugucaggaaa

SEQ ID NO: 1559265 - RNA, 19 nt, Artificial Sequence
  Description of Artificial Sequence: Synthetic oligonucleotide
  Antisense strand to SEQ ID NO: 1559264
uuuccugacagauaaauag

SEQ ID NO: 1559266 - RNA, 19 nt, Artificial Sequence
  Description of Artificial Sequence: Synthetic oligonucleotide
  Sense strand starting at position 2599 of SEQ ID NO: 1245393
uagaaugcauggucaucuu

SEQ ID NO: 1559267 - RNA, 19 nt, Artificial Sequence
  Description of Artificial Sequence: Synthetic oligonucleotide
  Antisense strand to SEQ ID NO: 1559266
aagaugaccaugcauucua

SEQ ID NO: 1559268 - RNA, 19 nt, Artificial Sequence
  Description of Artificial Sequence: Synthetic oligonucleotide
  Sense strand starting at position 2648 of SEQ ID NO: 1245393
ugcugacgcgaucauuuaa

SEQ ID NO: 1559269 - RNA, 19 nt, Artificial Sequence
  Description of Artificial Sequence: Synthetic oligonucleotide
  Antisense strand to SEQ ID NO: 1559268
uuaaaugaucgcgucagca

SEQ ID NO: 1559270 - RNA, 19 nt, Artificial Sequence
  Description of Artificial Sequence: Synthetic oligonucleotide
  Sense strand starting at position 2743 of SEQ ID NO: 1245393
uccuuauaauggccuguaa

SEQ ID NO: 1559271 - RNA, 19 nt, Artificial Sequence
  Description of Artificial Sequence: Synthetic oligonucleotide
  Antisense strand to SEQ ID NO: 1559270
uuacaggccauuauaagga

SEQ ID NO: 1559272 - RNA, 19 nt, Artificial Sequence
  Description of Artificial Sequence: Synthetic oligonucleotide
  Sense strand starting at position 2985 of SEQ ID NO: 1245393
ugucuugcucaccacagua

SEQ ID NO: 1559273 - RNA, 19 nt, Artificial Sequence
  Description of Artificial Sequence: Synthetic oligonucleotide
  Antisense strand to SEQ ID NO: 1559272
uacuguggugagcaagaca

SEQ ID NO: 1559274 - RNA, 19 nt, Artificial Sequence
  Description of Artificial Sequence: Synthetic oligonucleotide
  Sense strand starting at position 3073 of SEQ ID NO: 1245393
aaaugaauugugggauggu

SEQ ID NO: 1559275 - RNA, 19 nt, Artificial Sequence
  Description of Artificial Sequence: Synthetic oligonucleotide
  Antisense strand to SEQ ID NO: 1559274
accaucccacaauucauuu

SEQ ID NO: 1559276 - RNA, 19 nt, Artificial Sequence
  Description of Artificial Sequence: Synthetic oligonucleotide
  Sense strand starting at position 3076 of SEQ ID NO: 1245393
ugaauugugggaugguuac

SEQ ID NO: 1559277 - RNA, 19 nt, Artificial Sequence
  Description of Artificial Sequence: Synthetic oligonucleotide
  Antisense strand to SEQ ID NO: 1559276
guaaccaucccacaauuca

SEQ ID NO: 1559278 - RNA, 19 nt, Artificial Sequence
  Description of Artificial Sequence: Synthetic oligonucleotide
  Sense strand starting at position 3153 of SEQ ID NO: 1245393
uuguuuaaggacuggucaa

SEQ ID NO: 1559279 - RNA, 19 nt, Artificial Sequence
  Description of Artificial Sequence: Synthetic oligonucleotide
  Antisense strand to SEQ ID NO: 1559278
uugaccaguccuuaaacaa

SEQ ID NO: 1559280 - RNA, 19 nt, Artificial Sequence
  Description of Artificial Sequence: Synthetic oligonucleotide
  Sense strand starting at position 3154 of SEQ ID NO: 1245393
uguuuaaggacuggucaaa

SEQ ID NO: 1559281 - RNA, 19 nt, Artificial Sequence
  Description of Artificial Sequence: Synthetic oligonucleotide
  Antisense strand to SEQ ID NO: 1559280
uuugaccaguccuuaaaca

SEQ ID NO: 1559282 - RNA, 19 nt, Artificial Sequence
  Description of Artificial Sequence: Synthetic oligonucleotide
  Sense strand starting at position 3176 of SEQ ID NO: 1245393
guagauccagccuaacaua

SEQ ID NO: 1559283 - RNA, 19 nt, Artificial Sequence
  Description of Artificial Sequence: Synthetic oligonucleotide
  Antisense strand to SEQ ID NO: 1559282
uauguuaggcuggaucuac

SEQ ID NO: 1559284 - RNA, 19 nt, Artificial Sequence
  Description of Artificial Sequence: Synthetic oligonucleotide
  Sense strand starting at position 3271 of SEQ ID NO: 1245393
gcuggauucgugcaugaga

SEQ ID NO: 1559285 - RNA, 19 nt, Artificial Sequence
  Description of Artificial Sequence: Synthetic oligonucleotide
  Antisense strand to SEQ ID NO: 1559284
ucucaugcacgaauccagc

SEQ ID NO: 1559286 - RNA, 19 nt, Artificial Sequence
  Description of Artificial Sequence: Synthetic oligonucleotide
  Sense strand starting at position 3273 of SEQ ID NO: 1245393
uggauucgugcaugagaga

SEQ ID NO: 1559287 - RNA, 19 nt, Artificial Sequence
  Description of Artificial Sequence: Synthetic oligonucleotide
  Antisense strand to SEQ ID NO: 1559286
ucucucaugcacgaaucca

SEQ ID NO: 1559288 - RNA, 19 nt, Artificial Sequence
  Description of Artificial Sequence: Synthetic oligonucleotide
  Sense strand starting at position 3407 of SEQ ID NO: 1245393
ucacucugcuacuuggaua

SEQ ID NO: 1559289 - RNA, 19 nt, Artificial Sequence
  Description of Artificial Sequence: Synthetic oligonucleotide
  Antisense strand to SEQ ID NO: 1559288
uauccaaguagcagaguga

SEQ ID NO: 1559290 - RNA, 19 nt, Artificial Sequence
  Description of Artificial Sequence: Synthetic oligonucleotide
  Sense strand starting at position 3964 of SEQ ID NO: 1245393
agagaugaguucuuccuau

SEQ ID NO: 1559291 - RNA, 19 nt, Artificial Sequence
  Description of Artificial Sequence: Synthetic oligonucleotide
  Antisense strand to SEQ ID NO: 1559290
auaggaagaacucaucucu

SEQ ID NO: 1559292 - RNA, 19 nt, Artificial Sequence
  Description of Artificial Sequence: Synthetic oligonucleotide
  Sense strand starting at position 88 of SEQ ID NO: 1245394
uaauuaaugcugggaggca

SEQ ID NO: 1559293 - RNA, 19 nt, Artificial Sequence
  Description of Artificial Sequence: Synthetic oligonucleotide
  Antisense strand to SEQ ID NO: 1559292
ugccucccagcauuaauua

SEQ ID NO: 1559294 - RNA, 19 nt, Artificial Sequence
  Description of Artificial Sequence: Synthetic oligonucleotide
  Sense strand starting at position 100 of SEQ ID NO: 1245394
ggaggcacaucuuuaugaa

SEQ ID NO: 1559295 - RNA, 19 nt, Artificial Sequence
  Description of Artificial Sequence: Synthetic oligonucleotide
  Antisense strand to SEQ ID NO: 1559294
uucauaaagaugugccucc

SEQ ID NO: 1559296 - RNA, 19 nt, Artificial Sequence
  Description of Artificial Sequence: Synthetic oligonucleotide
  Sense strand starting at position 171 of SEQ ID NO: 1245394
cugcuuguugaggaucaaa

SEQ ID NO: 1559297 - RNA, 19 nt, Artificial Sequence
  Description of Artificial Sequence: Synthetic oligonucleotide
  Antisense strand to SEQ ID NO: 1559296
uuugauccucaacaagcag

SEQ ID NO: 1559298 - RNA, 19 nt, Artificial Sequence
  Description of Artificial Sequence: Synthetic oligonucleotide
  Sense strand starting at position 233 of SEQ ID NO: 1245394
gcacaaagacuguaucaau

SEQ ID NO: 1559299 - RNA, 19 nt, Artificial Sequence
  Description of Artificial Sequence: Synthetic oligonucleotide
  Antisense strand to SEQ ID NO: 1559298
auugauacagucuuugugc

SEQ ID NO: 1559300 - RNA, 19 nt, Artificial Sequence
  Description of Artificial Sequence: Synthetic oligonucleotide
  Sense strand starting at position 266 of SEQ ID NO: 1245394
caaucauagugacuuguga

SEQ ID NO: 1559301 - RNA, 19 nt, Artificial Sequence
  Description of Artificial Sequence: Synthetic oligonucleotide
  Antisense strand to SEQ ID NO: 1559300
ucacaagucacuaugauug

SEQ ID NO: 1559302 - RNA, 19 nt, Artificial Sequence
  Description of Artificial Sequence: Synthetic oligonucleotide
  Sense strand starting at position 366 of SEQ ID NO: 1245394
uguuaaguaucaccaguaa

SEQ ID NO: 1559303 - RNA, 19 nt, Artificial Sequence
  Description of Artificial Sequence: Synthetic oligonucleotide
  Antisense strand to SEQ ID NO: 1559302
uuacuggugauacuuaaca

SEQ ID NO: 1559304 - RNA, 19 nt, Artificial Sequence
  Description of Artificial Sequence: Synthetic oligonucleotide
  Sense strand starting at position 727 of SEQ ID NO: 1245394
gcaggagguauaugauagu

SEQ ID NO: 1559305 - RNA, 19 nt, Artificial Sequence
  Description of Artificial Sequence: Synthetic oligonucleotide
  Antisense strand to SEQ ID NO: 1559304
acuaucauauaccuccugc

SEQ ID NO: 1559306 - RNA, 19 nt, Artificial Sequence
  Description of Artificial Sequence: Synthetic oligonucleotide
  Sense strand starting at position 736 of SEQ ID NO: 1245394
auaugauaguguuuguaca

SEQ ID NO: 1559307 - RNA, 19 nt, Artificial Sequence
  Description of Artificial Sequence: Synthetic oligonucleotide
  Antisense strand to SEQ ID NO: 1559306
uguacaaacacuaucauau

SEQ ID NO: 1559308 - RNA, 19 nt, Artificial Sequence
  Description of Artificial Sequence: Synthetic oligonucleotide
  Sense strand starting at position 738 of SEQ ID NO: 1245394
augauaguguuuguacaac

SEQ ID NO: 1559309 - RNA, 19 nt, Artificial Sequence
  Description of Artificial Sequence: Synthetic oligonucleotide
  Antisense strand to SEQ ID NO: 1559308
guuguacaaacacuaucau

SEQ ID NO: 1559310 - RNA, 19 nt, Artificial Sequence
  Description of Artificial Sequence: Synthetic oligonucleotide
  Sense strand starting at position 760 of SEQ ID NO: 1245394
agcaaaugaugacuacuuu

SEQ ID NO: 1559311 - RNA, 19 nt, Artificial Sequence
  Description of Artificial Sequence: Synthetic oligonucleotide
  Antisense strand to SEQ ID NO: 1559310
aaaguagucaucauuugcu

SEQ ID NO: 1559312 - RNA, 19 nt, Artificial Sequence
  Description of Artificial Sequence: Synthetic oligonucleotide
  Sense strand starting at position 796 of SEQ ID NO: 1245394
cuccgucuuccaucguuau

SEQ ID NO: 1559313 - RNA, 19 nt, Artificial Sequence
  Description of Artificial Sequence: Synthetic oligonucleotide
  Antisense strand to SEQ ID NO: 1559312
auaacgauggaagacggag

SEQ ID NO: 1559314 - RNA, 19 nt, Artificial Sequence
  Description of Artificial Sequence: Synthetic oligonucleotide
  Sense strand starting at position 798 of SEQ ID NO: 1245394
ccgucuuccaucguuaugu

SEQ ID NO: 1559315 - RNA, 19 nt, Artificial Sequence
  Description of Artificial Sequence: Synthetic oligonucleotide
  Antisense strand to SEQ ID NO: 1559314
acauaacgauggaagacgg

SEQ ID NO: 1559316 - RNA, 19 nt, Artificial Sequence
  Description of Artificial Sequence: Synthetic oligonucleotide
  Sense strand starting at position 921 of SEQ ID NO: 1245394
acacaaugaugugcuauga

SEQ ID NO: 1559317 - RNA, 19 nt, Artificial Sequence
  Description of Artificial Sequence: Synthetic oligonucleotide
  Antisense strand to SEQ ID NO: 1559316
ucauagcacaucauugugu

SEQ ID NO: 1559318 - RNA, 19 nt, Artificial Sequence
  Description of Artificial Sequence: Synthetic oligonucleotide
  Sense strand starting at position 925 of SEQ ID NO: 1245394
aaugaugugcuaugaaaca

SEQ ID NO: 1559319 - RNA, 19 nt, Artificial Sequence
  Description of Artificial Sequence: Synthetic oligonucleotide
  Antisense strand to SEQ ID NO: 1559318
uguuucauagcacaucauu

SEQ ID NO: 1559320 - RNA, 19 nt, Artificial Sequence
  Description of Artificial Sequence: Synthetic oligonucleotide
  Sense strand starting at position 2033 of SEQ ID NO: 1245394
ggacguugccauggagaag

SEQ ID NO: 1559321 - RNA, 19 nt, Artificial Sequence
  Description of Artificial Sequence: Synthetic oligonucleotide
  Antisense strand to SEQ ID NO: 1559320
cuucuccauggcaacgucc

SEQ ID NO: 1559322 - RNA, 19 nt, Artificial Sequence
  Description of Artificial Sequence: Synthetic oligonucleotide
  Sense strand starting at position 2034 of SEQ ID NO: 1245394
gacguugccauggagaaga

SEQ ID NO: 1559323 - RNA, 19 nt, Artificial Sequence
  Description of Artificial Sequence: Synthetic oligonucleotide
  Antisense strand to SEQ ID NO: 1559322
ucuucuccauggcaacguc

SEQ ID NO: 1559324 - RNA, 19 nt, Artificial Sequence
  Description of Artificial Sequence: Synthetic oligonucleotide
  Sense strand starting at position 2149 of SEQ ID NO: 1245394
agcauuguugcuucgcaaa

SEQ ID NO: 1559325 - RNA, 19 nt, Artificial Sequence
  Description of Artificial Sequence: Synthetic oligonucleotide
  Antisense strand to SEQ ID NO: 1559324
uuugcgaagcaacaaugcu

SEQ ID NO: 1559326 - RNA, 19 nt, Artificial Sequence
  Description of Artificial Sequence: Synthetic oligonucleotide
  Sense strand starting at position 2196 of SEQ ID NO: 1245394
ccgguaacucaguaagguu

SEQ ID NO: 1559327 - RNA, 19 nt, Artificial Sequence
  Description of Artificial Sequence: Synthetic oligonucleotide
  Antisense strand to SEQ ID NO: 1559326
aaccuuacugaguuaccgg

SEQ ID NO: 1559328 - RNA, 19 nt, Artificial Sequence
  Description of Artificial Sequence: Synthetic oligonucleotide
  Sense strand starting at position 2204 of SEQ ID NO: 1245394
ucaguaagguuauucccau

SEQ ID NO: 1559329 - RNA, 19 nt, Artificial Sequence
  Description of Artificial Sequence: Synthetic oligonucleotide
  Antisense strand to SEQ ID NO: 1559328
augggaauaaccuuacuga

SEQ ID NO: 1559330 - RNA, 19 nt, Artificial Sequence
  Description of Artificial Sequence: Synthetic oligonucleotide
  Sense strand starting at position 2239 of SEQ ID NO: 1245394
ucaaauguccugugacuug

SEQ ID NO: 1559331 - RNA, 19 nt, Artificial Sequence
  Description of Artificial Sequence: Synthetic oligonucleotide
  Antisense strand to SEQ ID NO: 1559330
caagucacaggacauuuga

SEQ ID NO: 1559332 - RNA, 19 nt, Artificial Sequence
  Description of Artificial Sequence: Synthetic oligonucleotide
  Sense strand starting at position 2246 of SEQ ID NO: 1245394
uccugugacuugccaagga

SEQ ID NO: 1559333 - RNA, 19 nt, Artificial Sequence
  Description of Artificial Sequence: Synthetic oligonucleotide
  Antisense strand to SEQ ID NO: 1559332
uccuuggcaagucacagga

SEQ ID NO: 1559334 - RNA, 19 nt, Artificial Sequence
  Description of Artificial Sequence: Synthetic oligonucleotide
  Sense strand starting at position 2250 of SEQ ID NO: 1245394
gugacuugccaaggauuac

SEQ ID NO: 1559335 - RNA, 19 nt, Artificial Sequence
  Description of Artificial Sequence: Synthetic oligonucleotide
  Antisense strand to SEQ ID NO: 1559334
guaauccuuggcaagucac

SEQ ID NO: 1559336 - RNA, 19 nt, Artificial Sequence
  Description of Artificial Sequence: Synthetic oligonucleotide
  Sense strand starting at position 2277 of SEQ ID NO: 1245394
gcgaaugcugugcugucua

SEQ ID NO: 1559337 - RNA, 19 nt, Artificial Sequence
  Description of Artificial Sequence: Synthetic oligonucleotide
  Antisense strand to SEQ ID NO: 1559336
uagacagcacagcauucgc

SEQ ID NO: 1559338 - RNA, 19 nt, Artificial Sequence
  Description of Artificial Sequence: Synthetic oligonucleotide
  Sense strand starting at position 2287 of SEQ ID NO: 1245394
ugcugucuaccgcugagua

SEQ ID NO: 1559339 - RNA, 19 nt, Artificial Sequence
  Description of Artificial Sequence: Synthetic oligonucleotide
  Antisense strand to SEQ ID NO: 1559338
uacucagcgguagacagca

SEQ ID NO: 1559340 - RNA, 19 nt, Artificial Sequence
  Description of Artificial Sequence: Synthetic oligonucleotide
  Sense strand starting at position 2642 of SEQ ID NO: 1245394
cagaaauuagccgagugua

SEQ ID NO: 1559341 - RNA, 19 nt, Artificial Sequence
  Description of Artificial Sequence: Synthetic oligonucleotide
  Antisense strand to SEQ ID NO: 1559340
uacacucggcuaauuucug

SEQ ID NO: 1559342 - RNA, 19 nt, Artificial Sequence
  Description of Artificial Sequence: Synthetic oligonucleotide
  Sense strand starting at position 2701 of SEQ ID NO: 1245394
gggugaggaucaccucaau

SEQ ID NO: 1559343 - RNA, 19 nt, Artificial Sequence
  Description of Artificial Sequence: Synthetic oligonucleotide
  Antisense strand to SEQ ID NO: 1559342
auugaggugauccucaccc

SEQ ID NO: 1559344 - RNA, 19 nt, Artificial Sequence
  Description of Artificial Sequence: Synthetic oligonucleotide
  Sense strand starting at position 2899 of SEQ ID NO: 1245394
uguacucguaacugaggaa

SEQ ID NO: 1559345 - RNA, 19 nt, Artificial Sequence
  Description of Artificial Sequence: Synthetic oligonucleotide
  Antisense strand to SEQ ID NO: 1559344
uuccucaguuacgaguaca

SEQ ID NO: 1559346 - RNA, 19 nt, Artificial Sequence
  Description of Artificial Sequence: Synthetic oligonucleotide
  Sense strand starting at position 2900 of SEQ ID NO: 1245394
guacucguaacugaggaau

SEQ ID NO: 1559347 - RNA, 19 nt, Artificial Sequence
  Description of Artificial Sequence: Synthetic oligonucleotide
  Antisense strand to SEQ ID NO: 1559346
auuccucaguuacgaguac

SEQ ID NO: 1559348 - RNA, 19 nt, Artificial Sequence
  Description of Artificial Sequence: Synthetic oligonucleotide
  Sense strand starting at position 3037 of SEQ ID NO: 1245394
gaaagaagaggcugguuua

SEQ ID NO: 1559349 - RNA, 19 nt, Artificial Sequence
  Description of Artificial Sequence: Synthetic oligonucleotide
  Antisense strand to SEQ ID NO: 1559348
uaaaccagccucuucuuuc

SEQ ID NO: 1559350 - RNA, 19 nt, Artificial Sequence
  Description of Artificial Sequence: Synthetic oligonucleotide
  Sense strand starting at position 3095 of SEQ ID NO: 1245394
ucccaauuagaguacagua

SEQ ID NO: 1559351 - RNA, 19 nt, Artificial Sequence
  Description of Artificial Sequence: Synthetic oligonucleotide
  Antisense strand to SEQ ID NO: 1559350
uacuguacucuaauuggga

SEQ ID NO: 1559352 - RNA, 19 nt, Artificial Sequence
  Description of Artificial Sequence: Synthetic oligonucleotide
  Sense strand starting at position 3244 of SEQ ID NO: 1245394
uggguaggguagguuaaau

SEQ ID NO: 1559353 - RNA, 19 nt, Artificial Sequence
  Description of Artificial Sequence: Synthetic oligonucleotide
  Antisense strand to SEQ ID NO: 1559352
auuuaaccuacccuaccca

SEQ ID NO: 1559354 - RNA, 19 nt, Artificial Sequence
  Description of Artificial Sequence: Synthetic oligonucleotide
  Sense strand starting at position 3255 of SEQ ID NO: 1245394
gguuaaaugacucacguca

SEQ ID NO: 1559355 - RNA, 19 nt, Artificial Sequence
  Description of Artificial Sequence: Synthetic oligonucleotide
  Antisense strand to SEQ ID NO: 1559354
ugacgugagucauuuaacc

SEQ ID NO: 1559356 - RNA, 19 nt, Artificial Sequence
  Description of Artificial Sequence: Synthetic oligonucleotide
  Sense strand starting at position 3311 of SEQ ID NO: 1245394
ugugaagucacaggagaca

SEQ ID NO: 1559357 - RNA, 19 nt, Artificial Sequence
  Description of Artificial Sequence: Synthetic oligonucleotide
  Antisense strand to SEQ ID NO: 1559356
ugucuccugugacuucaca

SEQ ID NO: 1559358 - RNA, 19 nt, Artificial Sequence
  Description of Artificial Sequence: Synthetic oligonucleotide
  Sense strand starting at position 3324 of SEQ ID NO: 1245394
gagacaauuuaaggagaau

SEQ ID NO: 1559359 - RNA, 19 nt, Artificial Sequence
  Description of Artificial Sequence: Synthetic oligonucleotide
  Antisense strand to SEQ ID NO: 1559358
auucuccuuaaauugucuc

SEQ ID NO: 1559360 - RNA, 19 nt, Artificial Sequence
  Description of Artificial Sequence: Synthetic oligonucleotide
  Sense strand starting at position 3392 of SEQ ID NO: 1245394
gcaagaggucagggaugau

SEQ ID NO: 1559361 - RNA, 19 nt, Artificial Sequence
  Description of Artificial Sequence: Synthetic oligonucleotide
  Antisense strand to SEQ ID NO: 1559360
aucaucccugaccucuugc

SEQ ID NO: 1559362 - RNA, 19 nt, Artificial Sequence
  Description of Artificial Sequence: Synthetic oligonucleotide
  Sense strand starting at position 3407 of SEQ ID NO: 1245394
ugaugaauucauggguaug

SEQ ID NO: 1559363 - RNA, 19 nt, Artificial Sequence
  Description of Artificial Sequence: Synthetic oligonucleotide
  Antisense strand to SEQ ID NO: 1559362
cauacccaugaauucauca

SEQ ID NO: 1559364 - RNA, 19 nt, Artificial Sequence
  Description of Artificial Sequence: Synthetic oligonucleotide
  Sense strand starting at position 3650 of SEQ ID NO: 1245394
aucguaaacaccgggaauu

SEQ ID NO: 1559365 - RNA, 19 nt, Artificial Sequence
  Description of Artificial Sequence: Synthetic oligonucleotide
  Antisense strand to SEQ ID NO: 1559364
aauucccgguguuuacgau

SEQ ID NO: 1559366 - RNA, 19 nt, Artificial Sequence
  Description of Artificial Sequence: Synthetic oligonucleotide
  Sense strand starting at position 3807 of SEQ ID NO: 1245394
gggagguccuggguagaga

SEQ ID NO: 1559367 - RNA, 19 nt, Artificial Sequence
  Description of Artificial Sequence: Synthetic oligonucleotide
  Antisense strand to SEQ ID NO: 1559366
ucucuacccaggaccuccc

SEQ ID NO: 1559368 - RNA, 19 nt, Artificial Sequence
  Description of Artificial Sequence: Synthetic oligonucleotide
  Sense strand starting at position 3840 of SEQ ID NO: 1245394
gauggagaaagcugguguu

SEQ ID NO: 1559369 - RNA, 19 nt, Artificial Sequence
  Description of Artificial Sequence: Synthetic oligonucleotide
  Antisense strand to SEQ ID NO: 1559368
aacaccagcuuucuccauc

SEQ ID NO: 1559370 - RNA, 19 nt, Artificial Sequence
  Description of Artificial Sequence: Synthetic oligonucleotide
  Sense strand starting at position 3892 of SEQ ID NO: 1245394
guuguuuagauuugcugga

SEQ ID NO: 1559371 - RNA, 19 nt, Artificial Sequence
  Description of Artificial Sequence: Synthetic oligonucleotide
  Antisense strand to SEQ ID NO: 1559370
uccagcaaaucuaaacaac

SEQ ID NO: 1559372 - RNA, 19 nt, Artificial Sequence
  Description of Artificial Sequence: Synthetic oligonucleotide
  Sense strand starting at position 11 of SEQ ID NO: 1245395
agacaaguauggcucuauu

SEQ ID NO: 1559373 - RNA, 19 nt, Artificial Sequence
  Description of Artificial Sequence: Synthetic oligonucleotide
  Antisense strand to SEQ ID NO: 1559372
aauagagccauacuugucu

SEQ ID NO: 1559374 - RNA, 19 nt, Artificial Sequence
  Description of Artificial Sequence: Synthetic oligonucleotide
  Sense strand starting at position 14 of SEQ ID NO: 1245395
caaguauggcucuauuagu

SEQ ID NO: 1559375 - RNA, 19 nt, Artificial Sequence
  Description of Artificial Sequence: Synthetic oligonucleotide
  Antisense strand to SEQ ID NO: 1559374
acuaauagagccauacuug

SEQ ID NO: 1559376 - RNA, 19 nt, Artificial Sequence
  Description of Artificial Sequence: Synthetic oligonucleotide
  Sense strand starting at position 38 of SEQ ID NO: 1245395
cagguuaggguucaguaga

SEQ ID NO: 1559377 - RNA, 19 nt, Artificial Sequence
  Description of Artificial Sequence: Synthetic oligonucleotide
  Antisense strand to SEQ ID NO: 1559376
ucuacugaacccuaaccug

SEQ ID NO: 1559378 - RNA, 19 nt, Artificial Sequence
  Description of Artificial Sequence: Synthetic oligonucleotide
  Sense strand starting at position 631 of SEQ ID NO: 1245395
cucuucuuuccugaaggau

SEQ ID NO: 1559379 - RNA, 19 nt, Artificial Sequence
  Description of Artificial Sequence: Synthetic oligonucleotide
  Antisense strand to SEQ ID NO: 1559378
auccuucaggaaagaagag

SEQ ID NO: 1559380 - RNA, 19 nt, Artificial Sequence
  Description of Artificial Sequence: Synthetic oligonucleotide
  Sense strand starting at position 634 of SEQ ID NO: 1245395
uucuuuccugaaggauaua

SEQ ID NO: 1559381 - RNA, 19 nt, Artificial Sequence
  Description of Artificial Sequence: Synthetic oligonucleotide
  Antisense strand to SEQ ID NO: 1559380
uauauccuucaggaaagaa

SEQ ID NO: 1559382 - RNA, 19 nt, Artificial Sequence
  Description of Artificial Sequence: Synthetic oligonucleotide
  Sense strand starting at position 704 of SEQ ID NO: 1245395
aaagaugaguaacuuuagu

SEQ ID NO: 1559383 - RNA, 19 nt, Artificial Sequence
  Description of Artificial Sequence: Synthetic oligonucleotide
  Antisense strand to SEQ ID NO: 1559382
acuaaaguuacucaucuuu

SEQ ID NO: 1559384 - RNA, 19 nt, Artificial Sequence
  Description of Artificial Sequence: Synthetic oligonucleotide
  Sense strand starting at position 861 of SEQ ID NO: 1245395
gaagccuaagaaugugaau

SEQ ID NO: 1559385 - RNA, 19 nt, Artificial Sequence
  Description of Artificial Sequence: Synthetic oligonucleotide
  Antisense strand to SEQ ID NO: 1559384
auucacauucuuaggcuuc

SEQ ID NO: 1559386 - RNA, 19 nt, Artificial Sequence
  Description of Artificial Sequence: Synthetic oligonucleotide
  Sense strand starting at position 872 of SEQ ID NO: 1245395
augugaaugcaacauuaac

SEQ ID NO: 1559387 - RNA, 19 nt, Artificial Sequence
  Description of Artificial Sequence: Synthetic oligonucleotide
  Antisense strand to SEQ ID NO: 1559386
guuaauguugcauucacau

SEQ ID NO: 1559388 - RNA, 19 nt, Artificial Sequence
  Description of Artificial Sequence: Synthetic oligonucleotide
  Sense strand starting at position 1165 of SEQ ID NO: 1245395
cauuaaacaugaguugaug

SEQ ID NO: 1559389 - RNA, 19 nt, Artificial Sequence
  Description of Artificial Sequence: Synthetic oligonucleotide
  Antisense strand to SEQ ID NO: 1559388
caucaacucauguuuaaug

SEQ ID NO: 1559390 - RNA, 19 nt, Artificial Sequence
  Description of Artificial Sequence: Synthetic oligonucleotide
  Sense strand starting at position 1197 of SEQ ID NO: 1245395
uuugucauuugaucgcauu

SEQ ID NO: 1559391 - RNA, 19 nt, Artificial Sequence
  Description of Artificial Sequence: Synthetic oligonucleotide
  Antisense strand to SEQ ID NO: 1559390
aaugcgaucaaaugacaaa

SEQ ID NO: 1559392 - RNA, 19 nt, Artificial Sequence
  Description of Artificial Sequence: Synthetic oligonucleotide
  Sense strand starting at position 1211 of SEQ ID NO: 1245395
gcauuugguguuuaccgaa

SEQ ID NO: 1559393 - RNA, 19 nt, Artificial Sequence
  Description of Artificial Sequence: Synthetic oligonucleotide
  Antisense strand to SEQ ID NO: 1559392
uucgguaaacaccaaaugc

SEQ ID NO: 1559394 - RNA, 19 nt, Artificial Sequence
  Description of Artificial Sequence: Synthetic oligonucleotide
  Sense strand starting at position 1250 of SEQ ID NO: 1245395
gcacuuacugagcauuaag

SEQ ID NO: 1559395 - RNA, 19 nt, Artificial Sequence
  Description of Artificial Sequence: Synthetic oligonucleotide
  Antisense strand to SEQ ID NO: 1559394
cuuaaugcucaguaagugc

SEQ ID NO: 1559396 - RNA, 19 nt, Artificial Sequence
  Description of Artificial Sequence: Synthetic oligonucleotide
  Sense strand starting at position 1253 of SEQ ID NO: 1245395
cuuacugagcauuaagauu

SEQ ID NO: 1559397 - RNA, 19 nt, Artificial Sequence
  Description of Artificial Sequence: Synthetic oligonucleotide
  Antisense strand to SEQ ID NO: 1559396
aaucuuaaugcucaguaag

SEQ ID NO: 1559398 - RNA, 19 nt, Artificial Sequence
  Description of Artificial Sequence: Synthetic oligonucleotide
  Sense strand starting at position 1272 of SEQ ID NO: 1245395
uuugcuuaugaauaaacga

SEQ ID NO: 1559399 - RNA, 19 nt, Artificial Sequence
  Description of Artificial Sequence: Synthetic oligonucleotide
  Antisense strand to SEQ ID NO: 1559398
ucguuuauucauaagcaaa

SEQ ID NO: 1559400 - RNA, 19 nt, Artificial Sequence
  Description of Artificial Sequence: Synthetic oligonucleotide
  Sense strand starting at position 1382 of SEQ ID NO: 1245395
agcaaagagauccguauca

SEQ ID NO: 1559401 - RNA, 19 nt, Artificial Sequence
  Description of Artificial Sequence: Synthetic oligonucleotide
  Antisense strand to SEQ ID NO: 1559400
ugauacggaucucuuugcu

SEQ ID NO: 1559402 - RNA, 19 nt, Artificial Sequence
  Description of Artificial Sequence: Synthetic oligonucleotide
  Sense strand starting at position 1384 of SEQ ID NO: 1245395
caaagagauccguaucagu

SEQ ID NO: 1559403 - RNA, 19 nt, Artificial Sequence
  Description of Artificial Sequence: Synthetic oligonucleotide
  Antisense strand to SEQ ID NO: 1559402
acugauacggaucucuuug

SEQ ID NO: 1559404 - RNA, 19 nt, Artificial Sequence
  Description of Artificial Sequence: Synthetic oligonucleotide
  Sense strand starting at position 1512 of SEQ ID NO: 1245395
uggcgagauaucgauagga

SEQ ID NO: 1559405 - RNA, 19 nt, Artificial Sequence
  Description of Artificial Sequence: Synthetic oligonucleotide
  Antisense strand to SEQ ID NO: 1559404
uccuaucgauaucucgcca

SEQ ID NO: 1559406 - RNA, 19 nt, Artificial Sequence
  Description of Artificial Sequence: Synthetic oligonucleotide
  Sense strand starting at position 1514 of SEQ ID NO: 1245395
gcgagauaucgauaggaau

SEQ ID NO: 1559407 - RNA, 19 nt, Artificial Sequence
  Description of Artificial Sequence: Synthetic oligonucleotide
  Antisense strand to SEQ ID NO: 1559406
auuccuaucgauaucucgc

SEQ ID NO: 1559408 - RNA, 19 nt, Artificial Sequence
  Description of Artificial Sequence: Synthetic oligonucleotide
  Sense strand starting at position 1516 of SEQ ID NO: 1245395
gagauaucgauaggaaugu

SEQ ID NO: 1559409 - RNA, 19 nt, Artificial Sequence
  Description of Artificial Sequence: Synthetic oligonucleotide
  Antisense strand to SEQ ID NO: 1559408
acauuccuaucgauaucuc

SEQ ID NO: 1559410 - RNA, 19 nt, Artificial Sequence
  Description of Artificial Sequence: Synthetic oligonucleotide
  Sense strand starting at position 1525 of SEQ ID NO: 1245395
auaggaauguaugcccuua

SEQ ID NO: 1559411 - RNA, 19 nt, Artificial Sequence
  Description of Artificial Sequence: Synthetic oligonucleotide
  Antisense strand to SEQ ID NO: 1559410
uaagggcauacauuccuau

SEQ ID NO: 1559412 - RNA, 19 nt, Artificial Sequence
  Description of Artificial Sequence: Synthetic oligonucleotide
  Sense strand starting at position 1541 of SEQ ID NO: 1245395
uuaguuugucaggacagau

SEQ ID NO: 1559413 - RNA, 19 nt, Artificial Sequence
  Description of Artificial Sequence: Synthetic oligonucleotide
  Antisense strand to SEQ ID NO: 1559412
aucuguccugacaaacuaa

SEQ ID NO: 1559414 - RNA, 19 nt, Artificial Sequence
  Description of Artificial Sequence: Synthetic oligonucleotide
  Sense strand starting at position 1582 of SEQ ID NO: 1245395
uacgguuaacguuaagaga

SEQ ID NO: 1559415 - RNA, 19 nt, Artificial Sequence
  Description of Artificial Sequence: Synthetic oligonucleotide
  Antisense strand to SEQ ID NO: 1559414
ucucuuaacguuaaccgua

SEQ ID NO: 1559416 - RNA, 19 nt, Artificial Sequence
  Description of Artificial Sequence: Synthetic oligonucleotide
  Sense strand starting at position 2677 of SEQ ID NO: 1245395
ugaguaucacuggagccuu

SEQ ID NO: 1559417 - RNA, 19 nt, Artificial Sequence
  Description of Artificial Sequence: Synthetic oligonucleotide
  Antisense strand to SEQ ID NO: 1559416
aaggcuccagugauacuca

SEQ ID NO: 1559418 - RNA, 19 nt, Artificial Sequence
  Description of Artificial Sequence: Synthetic oligonucleotide
  Sense strand starting at position 2712 of SEQ ID NO: 1245395
guggcuauauaaucccaaa

SEQ ID NO: 1559419 - RNA, 19 nt, Artificial Sequence
  Description of Artificial Sequence: Synthetic oligonucleotide
  Antisense strand to SEQ ID NO: 1559418
uuugggauuauauagccac

SEQ ID NO: 1559420 - RNA, 19 nt, Artificial Sequence
  Description of Artificial Sequence: Synthetic oligonucleotide
  Sense strand starting at position 2896 of SEQ ID NO: 1245395
uuggcuauuuagucgguga

SEQ ID NO: 1559421 - RNA, 19 nt, Artificial Sequence
  Description of Artificial Sequence: Synthetic oligonucleotide
  Antisense strand to SEQ ID NO: 1559420
ucaccgacuaaauagccaa

SEQ ID NO: 1559422 - RNA, 19 nt, Artificial Sequence
  Description of Artificial Sequence: Synthetic oligonucleotide
  Sense strand starting at position 2897 of SEQ ID NO: 1245395
uggcuauuuagucggugaa

SEQ ID NO: 1559423 - RNA, 19 nt, Artificial Sequence
  Description of Artificial Sequence: Synthetic oligonucleotide
  Antisense strand to SEQ ID NO: 1559422
uucaccgacuaaauagcca

SEQ ID NO: 1559424 - RNA, 19 nt, Artificial Sequence
  Description of Artificial Sequence: Synthetic oligonucleotide
  Sense strand starting at position 2898 of SEQ ID NO: 1245395
ggcuauuuagucggugaaa

SEQ ID NO: 1559425 - RNA, 19 nt, Artificial Sequence
  Description of Artificial Sequence: Synthetic oligonucleotide
  Antisense strand to SEQ ID NO: 1559424
uuucaccgacuaaauagcc

SEQ ID NO: 1559426 - RNA, 19 nt, Artificial Sequence
  Description of Artificial Sequence: Synthetic oligonucleotide
  Sense strand starting at position 3061 of SEQ ID NO: 1245395
gcuuauuaaggauagcaac

SEQ ID NO: 1559427 - RNA, 19 nt, Artificial Sequence
  Description of Artificial Sequence: Synthetic oligonucleotide
  Antisense strand to SEQ ID NO: 1559426
guugcuauccuuaauaagc

SEQ ID NO: 1559428 - RNA, 19 nt, Artificial Sequence
  Description of Artificial Sequence: Synthetic oligonucleotide
  Sense strand starting at position 3088 of SEQ ID NO: 1245395
ugcaaaucguuucccauuu

SEQ ID NO: 1559429 - RNA, 19 nt, Artificial Sequence
  Description of Artificial Sequence: Synthetic oligonucleotide
  Antisense strand to SEQ ID NO: 1559428
aaaugggaaacgauuugca

SEQ ID NO: 1559430 - RNA, 19 nt, Artificial Sequence
  Description of Artificial Sequence: Synthetic oligonucleotide
  Sense strand starting at position 3089 of SEQ ID NO: 1245395
gcaaaucguuucccauuua

SEQ ID NO: 1559431 - RNA, 19 nt, Artificial Sequence
  Description of Artificial Sequence: Synthetic oligonucleotide
  Antisense strand to SEQ ID NO: 1559430
uaaaugggaaacgauuugc

SEQ ID NO: 1559432 - RNA, 19 nt, Artificial Sequence
  Description of Artificial Sequence: Synthetic oligonucleotide
  Sense strand starting at position 3321 of SEQ ID NO: 1245395
uugugaaaugacuacagca

SEQ ID NO: 1559433 - RNA, 19 nt, Artificial Sequence
  Description of Artificial Sequence: Synthetic oligonucleotide
  Antisense strand to SEQ ID NO: 1559432
ugcuguagucauuucacaa

SEQ ID NO: 1559434 - RNA, 19 nt, Artificial Sequence
  Description of Artificial Sequence: Synthetic oligonucleotide
  Sense strand starting at position 3561 of SEQ ID NO: 1245395
acucaaauugcugaagucu

SEQ ID NO: 1559435 - RNA, 19 nt, Artificial Sequence
  Description of Artificial Sequence: Synthetic oligonucleotide
  Antisense strand to SEQ ID NO: 1559434
agacuucagcaauuugagu

SEQ ID NO: 1559436 - RNA, 19 nt, Artificial Sequence
  Description of Artificial Sequence: Synthetic oligonucleotide
  Sense strand starting at position 3594 of SEQ ID NO: 1245395
gguugaaguuacuugauuc

SEQ ID NO: 1559437 - RNA, 19 nt, Artificial Sequence
  Description of Artificial Sequence: Synthetic oligonucleotide
  Antisense strand to SEQ ID NO: 1559436
gaaucaaguaacuucaacc

SEQ ID NO: 1559438 - RNA, 19 nt, Artificial Sequence
  Description of Artificial Sequence: Synthetic oligonucleotide
  Sense strand starting at position 3669 of SEQ ID NO: 1245395
acuggcuuccaagagaguu

SEQ ID NO: 1559439 - RNA, 19 nt, Artificial Sequence
  Description of Artificial Sequence: Synthetic oligonucleotide
  Antisense strand to SEQ ID NO: 1559438
aacucucuuggaagccagu

SEQ ID NO: 1559440 - RNA, 19 nt, Artificial Sequence
  Description of Artificial Sequence: Synthetic oligonucleotide
  Sense strand starting at position 3671 of SEQ ID NO: 1245395
uggcuuccaagagaguuaa

SEQ ID NO: 1559441 - RNA, 19 nt, Artificial Sequence
  Description of Artificial Sequence: Synthetic oligonucleotide
  Antisense strand to SEQ ID NO: 1559440
uuaacucucuuggaagcca

SEQ ID NO: 1559442 - RNA, 19 nt, Artificial Sequence
  Description of Artificial Sequence: Synthetic oligonucleotide
  Sense strand starting at position 3750 of SEQ ID NO: 1245395
ugcaguauuccaugacaga

SEQ ID NO: 1559443 - RNA, 19 nt, Artificial Sequence
  Description of Artificial Sequence: Synthetic oligonucleotide
  Antisense strand to SEQ ID NO: 1559442
ucugucauggaauacugca

SEQ ID NO: 1559444 - RNA, 19 nt, Artificial Sequence
  Description of Artificial Sequence: Synthetic oligonucleotide
  Sense strand starting at position 3751 of SEQ ID NO: 1245395
gcaguauuccaugacagaa

SEQ ID NO: 1559445 - RNA, 19 nt, Artificial Sequence
  Description of Artificial Sequence: Synthetic oligonucleotide
  Antisense strand to SEQ ID NO: 1559444
uucugucauggaauacugc

SEQ ID NO: 1559446 - RNA, 19 nt, Artificial Sequence
  Description of Artificial Sequence: Synthetic oligonucleotide
  Sense strand starting at position 3912 of SEQ ID NO: 1245395
gaaggcauaucaguugaaa

SEQ ID NO: 1559447 - RNA, 19 nt, Artificial Sequence
  Description of Artificial Sequence: Synthetic oligonucleotide
  Antisense strand to SEQ ID NO: 1559446
uuucaacugauaugccuuc

SEQ ID NO: 1559448 - RNA, 19 nt, Artificial Sequence
  Description of Artificial Sequence: Synthetic oligonucleotide
  Sense strand starting at position 3914 of SEQ ID NO: 1245395
aggcauaucaguugaaaug

SEQ ID NO: 1559449 - RNA, 19 nt, Artificial Sequence
  Description of Artificial Sequence: Synthetic oligonucleotide
  Antisense strand to SEQ ID NO: 1559448
cauuucaacugauaugccu

SEQ ID NO: 1559450 - RNA, 19 nt, Artificial Sequence
  Description of Artificial Sequence: Synthetic oligonucleotide
  Sense strand starting at position 3959 of SEQ ID NO: 1245395
acuaaauguccuuauuguu

SEQ ID NO: 1559451 - RNA, 19 nt, Artificial Sequence
  Description of Artificial Sequence: Synthetic oligonucleotide
  Antisense strand to SEQ ID NO: 1559450
aacaauaaggacauuuagu

SEQ ID NO: 1559452 - RNA, 19 nt, Artificial Sequence
  Description of Artificial Sequence: Synthetic oligonucleotide
  Sense strand starting at position 1990 of SEQ ID NO: 1245396
cucauaaccugugaaguaa

SEQ ID NO: 1559453 - RNA, 19 nt, Artificial Sequence
  Description of Artificial Sequence: Synthetic oligonucleotide
  Antisense strand to SEQ ID NO: 1559452
uuacuucacagguuaugag

SEQ ID NO: 1559454 - RNA, 19 nt, Artificial Sequence
  Description of Artificial Sequence: Synthetic oligonucleotide
  Sense strand starting at position 2005 of SEQ ID NO: 1245396
guaaacaaacaugguauua

SEQ ID NO: 1559455 - RNA, 19 nt, Artificial Sequence
  Description of Artificial Sequence: Synthetic oligonucleotide
  Antisense strand to SEQ ID NO: 1559454
uaauaccauguuuguuuac

SEQ ID NO: 1559456 - RNA, 19 nt, Artificial Sequence
  Description of Artificial Sequence: Synthetic oligonucleotide
  Sense strand starting at position 2040 of SEQ ID NO: 1245396
acacacguauuagucuaaa

SEQ ID NO: 1559457 - RNA, 19 nt, Artificial Sequence
  Description of Artificial Sequence: Synthetic oligonucleotide
  Antisense strand to SEQ ID NO: 1559456
uuuagacuaauacgugugu

SEQ ID NO: 1559458 - RNA, 19 nt, Artificial Sequence
  Description of Artificial Sequence: Synthetic oligonucleotide
  Sense strand starting at position 2101 of SEQ ID NO: 1245396
ccuuuauacugagaugaau

SEQ ID NO: 1559459 - RNA, 19 nt, Artificial Sequence
  Description of Artificial Sequence: Synthetic oligonucleotide
  Antisense strand to SEQ ID NO: 1559458
auucaucucaguauaaagg

SEQ ID NO: 1559460 - RNA, 19 nt, Artificial Sequence
  Description of Artificial Sequence: Synthetic oligonucleotide
  Sense strand starting at position 2110 of SEQ ID NO: 1245396
ugagaugaauuugauuaca

SEQ ID NO: 1559461 - RNA, 19 nt, Artificial Sequence
  Description of Artificial Sequence: Synthetic oligonucleotide
  Antisense strand to SEQ ID NO: 1559460
uguaaucaaauucaucuca

SEQ ID NO: 1559462 - RNA, 19 nt, Artificial Sequence
  Description of Artificial Sequence: Synthetic oligonucleotide
  Sense strand starting at position 2120 of SEQ ID NO: 1245396
uugauuacaugucuaaagu

SEQ ID NO: 1559463 - RNA, 19 nt, Artificial Sequence
  Description of Artificial Sequence: Synthetic oligonucleotide
  Antisense strand to SEQ ID NO: 1559462
acuuuagacauguaaucaa

SEQ ID NO: 1559464 - RNA, 19 nt, Artificial Sequence
  Description of Artificial Sequence: Synthetic oligonucleotide
  Sense strand starting at position 2121 of SEQ ID NO: 1245396
ugauuacaugucuaaaguc

SEQ ID NO: 1559465 - RNA, 19 nt, Artificial Sequence
  Description of Artificial Sequence: Synthetic oligonucleotide
  Antisense strand to SEQ ID NO: 1559464
gacuuuagacauguaauca

SEQ ID NO: 1559466 - RNA, 19 nt, Artificial Sequence
  Description of Artificial Sequence: Synthetic oligonucleotide
  Sense strand starting at position 2184 of SEQ ID NO: 1245396
cccuauuguugacuccaga

SEQ ID NO: 1559467 - RNA, 19 nt, Artificial Sequence
  Description of Artificial Sequence: Synthetic oligonucleotide
  Antisense strand to SEQ ID NO: 1559466
ucuggagucaacaauaggg

SEQ ID NO: 1559468 - RNA, 19 nt, Artificial Sequence
  Description of Artificial Sequence: Synthetic oligonucleotide
  Sense strand starting at position 2211 of SEQ ID NO: 1245396
uaugguaucuuugguagaa

SEQ ID NO: 1559469 - RNA, 19 nt, Artificial Sequence
  Description of Artificial Sequence: Synthetic oligonucleotide
  Antisense strand to SEQ ID NO: 1559468
uucuaccaaagauaccaua

SEQ ID NO: 1559470 - RNA, 19 nt, Artificial Sequence
  Description of Artificial Sequence: Synthetic oligonucleotide
  Sense strand starting at position 2212 of SEQ ID NO: 1245396
augguaucuuugguagaaa

SEQ ID NO: 1559471 - RNA, 19 nt, Artificial Sequence
  Description of Artificial Sequence: Synthetic oligonucleotide
  Antisense strand to SEQ ID NO: 1559470
uuucuaccaaagauaccau

SEQ ID NO: 1559472 - RNA, 19 nt, Artificial Sequence
  Description of Artificial Sequence: Synthetic oligonucleotide
  Sense strand starting at position 2357 of SEQ ID NO: 1245396
augagcuccuacucuguaa

SEQ ID NO: 1559473 - RNA, 19 nt, Artificial Sequence
  Description of Artificial Sequence: Synthetic oligonucleotide
  Antisense strand to SEQ ID NO: 1559472
uuacagaguaggagcucau

SEQ ID NO: 1559474 - RNA, 19 nt, Artificial Sequence
  Description of Artificial Sequence: Synthetic oligonucleotide
  Sense strand starting at position 2400 of SEQ ID NO: 1245396
gaugcaagucuagaaguga

SEQ ID NO: 1559475 - RNA, 19 nt, Artificial Sequence
  Description of Artificial Sequence: Synthetic oligonucleotide
  Antisense strand to SEQ ID NO: 1559474
ucacuucuagacuugcauc

SEQ ID NO: 1559476 - RNA, 19 nt, Artificial Sequence
  Description of Artificial Sequence: Synthetic oligonucleotide
  Sense strand starting at position 2826 of SEQ ID NO: 1245396
agcaaagagcuuuaccaug

SEQ ID NO: 1559477 - RNA, 19 nt, Artificial Sequence
  Description of Artificial Sequence: Synthetic oligonucleotide
  Antisense strand to SEQ ID NO: 1559476
caugguaaagcucuuugcu

SEQ ID NO: 1559478 - RNA, 19 nt, Artificial Sequence
  Description of Artificial Sequence: Synthetic oligonucleotide
  Sense strand starting at position 2980 of SEQ ID NO: 1245396
uuuauauugucugaagguu

SEQ ID NO: 1559479 - RNA, 19 nt, Artificial Sequence
  Description of Artificial Sequence: Synthetic oligonucleotide
  Antisense strand to SEQ ID NO: 1559478
aaccuucagacaauauaaa

SEQ ID NO: 1559480 - RNA, 19 nt, Artificial Sequence
  Description of Artificial Sequence: Synthetic oligonucleotide
  Sense strand starting at position 2989 of SEQ ID NO: 1245396
ucugaagguuaauggcaaa

SEQ ID NO: 1559481 - RNA, 19 nt, Artificial Sequence
  Description of Artificial Sequence: Synthetic oligonucleotide
  Antisense strand to SEQ ID NO: 1559480
uuugccauuaaccuucaga

SEQ ID NO: 1559482 - RNA, 19 nt, Artificial Sequence
  Description of Artificial Sequence: Synthetic oligonucleotide
  Sense strand starting at position 3002 of SEQ ID NO: 1245396
ggcaaagggaaaugucagu

SEQ ID NO: 1559483 - RNA, 19 nt, Artificial Sequence
  Description of Artificial Sequence: Synthetic oligonucleotide
  Antisense strand to SEQ ID NO: 1559482
acugacauuucccuuugcc

SEQ ID NO: 1559484 - RNA, 19 nt, Artificial Sequence
  Description of Artificial Sequence: Synthetic oligonucleotide
  Sense strand starting at position 3007 of SEQ ID NO: 1245396
agggaaaugucagugguag

SEQ ID NO: 1559485 - RNA, 19 nt, Artificial Sequence
  Description of Artificial Sequence: Synthetic oligonucleotide
  Antisense strand to SEQ ID NO: 1559484
cuaccacugacauuucccu

SEQ ID NO: 1559486 - RNA, 19 nt, Artificial Sequence
  Description of Artificial Sequence: Synthetic oligonucleotide
  Sense strand starting at position 3008 of SEQ ID NO: 1245396
gggaaaugucagugguaga

SEQ ID NO: 1559487 - RNA, 19 nt, Artificial Sequence
  Description of Artificial Sequence: Synthetic oligonucleotide
  Antisense strand to SEQ ID NO: 1559486
ucuaccacugacauuuccc

SEQ ID NO: 1559488 - RNA, 19 nt, Artificial Sequence
  Description of Artificial Sequence: Synthetic oligonucleotide
  Sense strand starting at position 3009 of SEQ ID NO: 1245396
ggaaaugucagugguagag

SEQ ID NO: 1559489 - RNA, 19 nt, Artificial Sequence
  Description of Artificial Sequence: Synthetic oligonucleotide
  Antisense strand to SEQ ID NO: 1559488
cucuaccacugacauuucc

SEQ ID NO: 1559490 - RNA, 19 nt, Artificial Sequence
  Description of Artificial Sequence: Synthetic oligonucleotide
  Sense strand starting at position 3011 of SEQ ID NO: 1245396
aaaugucagugguagagua

SEQ ID NO: 1559491 - RNA, 19 nt, Artificial Sequence
  Description of Artificial Sequence: Synthetic oligonucleotide
  Antisense strand to SEQ ID NO: 1559490
uacucuaccacugacauuu

SEQ ID NO: 1559492 - RNA, 19 nt, Artificial Sequence
  Description of Artificial Sequence: Synthetic oligonucleotide
  Sense strand starting at position 3013 of SEQ ID NO: 1245396
augucagugguagaguaga

SEQ ID NO: 1559493 - RNA, 19 nt, Artificial Sequence
  Description of Artificial Sequence: Synthetic oligonucleotide
  Antisense strand to SEQ ID NO: 1559492
ucuacucuaccacugacau

SEQ ID NO: 1559494 - RNA, 19 nt, Artificial Sequence
  Description of Artificial Sequence: Synthetic oligonucleotide
  Sense strand starting at position 3193 of SEQ ID NO: 1245396
uugauuccacguuaauaaa

SEQ ID NO: 1559495 - RNA, 19 nt, Artificial Sequence
  Description of Artificial Sequence: Synthetic oligonucleotide
  Antisense strand to SEQ ID NO: 1559494
uuuauuaacguggaaucaa

SEQ ID NO: 1559496 - RNA, 19 nt, Artificial Sequence
  Description of Artificial Sequence: Synthetic oligonucleotide
  Sense strand starting at position 3220 of SEQ ID NO: 1245396
aacguauuauagucucaag

SEQ ID NO: 1559497 - RNA, 19 nt, Artificial Sequence
  Description of Artificial Sequence: Synthetic oligonucleotide
  Antisense strand to SEQ ID NO: 1559496
cuugagacuauaauacguu

SEQ ID NO: 1559498 - RNA, 19 nt, Artificial Sequence
  Description of Artificial Sequence: Synthetic oligonucleotide
  Sense strand starting at position 3223 of SEQ ID NO: 1245396
guauuauagucucaaggcu

SEQ ID NO: 1559499 - RNA, 19 nt, Artificial Sequence
  Description of Artificial Sequence: Synthetic oligonucleotide
  Antisense strand to SEQ ID NO: 1559498
agccuugagacuauaauac

SEQ ID NO: 1559500 - RNA, 19 nt, Artificial Sequence
  Description of Artificial Sequence: Synthetic oligonucleotide
  Sense strand starting at position 3275 of SEQ ID NO: 1245396
uuuccauaacguugacaaa

SEQ ID NO: 1559501 - RNA, 19 nt, Artificial Sequence
  Description of Artificial Sequence: Synthetic oligonucleotide
  Antisense strand to SEQ ID NO: 1559500
uuugucaacguuauggaaa

SEQ ID NO: 1559502 - RNA, 19 nt, Artificial Sequence
  Description of Artificial Sequence: Synthetic oligonucleotide
  Sense strand starting at position 3276 of SEQ ID NO: 1245396
uuccauaacguugacaaau

SEQ ID NO: 1559503 - RNA, 19 nt, Artificial Sequence
  Description of Artificial Sequence: Synthetic oligonucleotide
  Antisense strand to SEQ ID NO: 1559502
auuugucaacguuauggaa

SEQ ID NO: 1559504 - RNA, 19 nt, Artificial Sequence
  Description of Artificial Sequence: Synthetic oligonucleotide
  Sense strand starting at position 3278 of SEQ ID NO: 1245396
ccauaacguugacaaauca

SEQ ID NO: 1559505 - RNA, 19 nt, Artificial Sequence
  Description of Artificial Sequence: Synthetic oligonucleotide
  Antisense strand to SEQ ID NO: 1559504
ugauuugucaacguuaugg

SEQ ID NO: 1559506 - RNA, 19 nt, Artificial Sequence
  Description of Artificial Sequence: Synthetic oligonucleotide
  Sense strand starting at position 3300 of SEQ ID NO: 1245396
ggagccuauugcuuugacu

SEQ ID NO: 1559507 - RNA, 19 nt, Artificial Sequence
  Description of Artificial Sequence: Synthetic oligonucleotide
  Antisense strand to SEQ ID NO: 1559506
agucaaagcaauaggcucc

SEQ ID NO: 1559508 - RNA, 19 nt, Artificial Sequence
  Description of Artificial Sequence: Synthetic oligonucleotide
  Sense strand starting at position 3302 of SEQ ID NO: 1245396
agccuauugcuuugacuca

SEQ ID NO: 1559509 - RNA, 19 nt, Artificial Sequence
  Description of Artificial Sequence: Synthetic oligonucleotide
  Antisense strand to SEQ ID NO: 1559508
ugagucaaagcaauaggcu

SEQ ID NO: 1559510 - RNA, 19 nt, Artificial Sequence
  Description of Artificial Sequence: Synthetic oligonucleotide
  Sense strand starting at position 3345 of SEQ ID NO: 1245396
gcuuauaaugcaggacacu

SEQ ID NO: 1559511 - RNA, 19 nt, Artificial Sequence
  Description of Artificial Sequence: Synthetic oligonucleotide
  Antisense strand to SEQ ID NO: 1559510
aguguccugcauuauaagc

SEQ ID NO: 1559512 - RNA, 19 nt, Artificial Sequence
  Description of Artificial Sequence: Synthetic oligonucleotide
  Sense strand starting at position 3368 of SEQ ID NO: 1245396
gcgcgaacaauacgagaaa

SEQ ID NO: 1559513 - RNA, 19 nt, Artificial Sequence
  Description of Artificial Sequence: Synthetic oligonucleotide
  Antisense strand to SEQ ID NO: 1559512
uuucucguauuguucgcgc

SEQ ID NO: 1559514 - RNA, 19 nt, Artificial Sequence
  Description of Artificial Sequence: Synthetic oligonucleotide
  Sense strand starting at position 3650 of SEQ ID NO: 1245396
cuacaucaguagucacuaa

SEQ ID NO: 1559515 - RNA, 19 nt, Artificial Sequence
  Description of Artificial Sequence: Synthetic oligonucleotide
  Antisense strand to SEQ ID NO: 1559514
uuagugacuacugauguag

SEQ ID NO: 1559516 - RNA, 19 nt, Artificial Sequence
  Description of Artificial Sequence: Synthetic oligonucleotide
  Sense strand starting at position 3830 of SEQ ID NO: 1245396
gucuaccaguucuuuaaac

SEQ ID NO: 1559517 - RNA, 19 nt, Artificial Sequence
  Description of Artificial Sequence: Synthetic oligonucleotide
  Antisense strand to SEQ ID NO: 1559516
guuuaaagaacugguagac

SEQ ID NO: 1559518 - RNA, 19 nt, Artificial Sequence
  Description of Artificial Sequence: Synthetic oligonucleotide
  Sense strand starting at position 3847 of SEQ ID NO: 1245396
acaauuaaacauggugcua

SEQ ID NO: 1559519 - RNA, 19 nt, Artificial Sequence
  Description of Artificial Sequence: Synthetic oligonucleotide
  Antisense strand to SEQ ID NO: 1559518
uagcaccauguuuaauugu

SEQ ID NO: 1559520 - RNA, 19 nt, Artificial Sequence
  Description of Artificial Sequence: Synthetic oligonucleotide
  Sense strand starting at position 3852 of SEQ ID NO: 1245396
uaaacauggugcuagcaua

SEQ ID NO: 1559521 - RNA, 19 nt, Artificial Sequence
  Description of Artificial Sequence: Synthetic oligonucleotide
  Antisense strand to SEQ ID NO: 1559520
uaugcuagcaccauguuua

SEQ ID NO: 1559522 - RNA, 19 nt, Artificial Sequence
  Description of Artificial Sequence: Synthetic oligonucleotide
  Sense strand starting at position 3877 of SEQ ID NO: 1245396
aguaauucuacuuggaggu

SEQ ID NO: 1559523 - RNA, 19 nt, Artificial Sequence
  Description of Artificial Sequence: Synthetic oligonucleotide
  Antisense strand to SEQ ID NO: 1559522
accuccaaguagaauuacu

SEQ ID NO: 1559524 - RNA, 19 nt, Artificial Sequence
  Description of Artificial Sequence: Synthetic oligonucleotide
  Sense strand starting at position 3878 of SEQ ID NO: 1245396
guaauucuacuuggaggua

SEQ ID NO: 1559525 - RNA, 19 nt, Artificial Sequence
  Description of Artificial Sequence: Synthetic oligonucleotide
  Antisense strand to SEQ ID NO: 1559524
uaccuccaaguagaauuac

SEQ ID NO: 1559526 - RNA, 19 nt, Artificial Sequence
  Description of Artificial Sequence: Synthetic oligonucleotide
  Sense strand starting at position 3879 of SEQ ID NO: 1245396
uaauucuacuuggagguau

SEQ ID NO: 1559527 - RNA, 19 nt, Artificial Sequence
  Description of Artificial Sequence: Synthetic oligonucleotide
  Antisense strand to SEQ ID NO: 1559526
auaccuccaaguagaauua

SEQ ID NO: 1559528 - RNA, 19 nt, Artificial Sequence
  Description of Artificial Sequence: Synthetic oligonucleotide
  Sense strand starting at position 3945 of SEQ ID NO: 1245396
gcaaaugcugacugcagua

SEQ ID NO: 1559529 - RNA, 19 nt, Artificial Sequence
  Description of Artificial Sequence: Synthetic oligonucleotide
  Antisense strand to SEQ ID NO: 1559528
uacugcagucagcauuugc

SEQ ID NO: 1559530 - RNA, 19 nt, Artificial Sequence
  Description of Artificial Sequence: Synthetic oligonucleotide
  Sense strand starting at position 3950 of SEQ ID NO: 1245396
ugcugacugcaguacuuau

SEQ ID NO: 1559531 - RNA, 19 nt, Artificial Sequence
  Description of Artificial Sequence: Synthetic oligonucleotide
  Antisense strand to SEQ ID NO: 1559530
auaaguacugcagucagca

SEQ ID NO: 1559532 - RNA, 19 nt, Artificial Sequence
  Description of Artificial Sequence: Synthetic oligonucleotide
  Sense strand starting at position 15 of SEQ ID NO: 1245397
ggcgucagacgauauccau

SEQ ID NO: 1559533 - RNA, 19 nt, Artificial Sequence
  Description of Artificial Sequence: Synthetic oligonucleotide
  Antisense strand to SEQ ID NO: 1559532
auggauaucgucugacgcc

SEQ ID NO: 1559534 - RNA, 19 nt, Artificial Sequence
  Description of Artificial Sequence: Synthetic oligonucleotide
  Sense strand starting at position 167 of SEQ ID NO: 1245397
gggaaagaguugcucucua

SEQ ID NO: 1559535 - RNA, 19 nt, Artificial Sequence
  Description of Artificial Sequence: Synthetic oligonucleotide
  Antisense strand to SEQ ID NO: 1559534
uagagagcaacucuuuccc

SEQ ID NO: 1559536 - RNA, 19 nt, Artificial Sequence
  Description of Artificial Sequence: Synthetic oligonucleotide
  Sense strand starting at position 208 of SEQ ID NO: 1245397
uccauugaucucgaaauuc

SEQ ID NO: 1559537 - RNA, 19 nt, Artificial Sequence
  Description of Artificial Sequence: Synthetic oligonucleotide
  Antisense strand to SEQ ID NO: 1559536
gaauuucgagaucaaugga

SEQ ID NO: 1559538 - RNA, 19 nt, Artificial Sequence
  Description of Artificial Sequence: Synthetic oligonucleotide
  Sense strand starting at position 242 of SEQ ID NO: 1245397
caggucagauuguaacaaa

SEQ ID NO: 1559539 - RNA, 19 nt, Artificial Sequence
  Description of Artificial Sequence: Synthetic oligonucleotide
  Antisense strand to SEQ ID NO: 1559538
uuuguuacaaucugaccug

SEQ ID NO: 1559540 - RNA, 19 nt, Artificial Sequence
  Description of Artificial Sequence: Synthetic oligonucleotide
  Sense strand starting at position 245 of SEQ ID NO: 1245397
gucagauuguaacaaacac

SEQ ID NO: 1559541 - RNA, 19 nt, Artificial Sequence
  Description of Artificial Sequence: Synthetic oligonucleotide
  Antisense strand to SEQ ID NO: 1559540
guguuuguuacaaucugac

SEQ ID NO: 1559542 - RNA, 19 nt, Artificial Sequence
  Description of Artificial Sequence: Synthetic oligonucleotide
  Sense strand starting at position 316 of SEQ ID NO: 1245397
cagcaaucguguuuccuua

SEQ ID NO: 1559543 - RNA, 19 nt, Artificial Sequence
  Description of Artificial Sequence: Synthetic oligonucleotide
  Antisense strand to SEQ ID NO: 1559542
uaaggaaacacgauugcug

SEQ ID NO: 1559544 - RNA, 19 nt, Artificial Sequence
  Description of Artificial Sequence: Synthetic oligonucleotide
  Sense strand starting at position 318 of SEQ ID NO: 1245397
gcaaucguguuuccuuaag

SEQ ID NO: 1559545 - RNA, 19 nt, Artificial Sequence
  Description of Artificial Sequence: Synthetic oligonucleotide
  Antisense strand to SEQ ID NO: 1559544
cuuaaggaaacacgauugc

SEQ ID NO: 1559546 - RNA, 19 nt, Artificial Sequence
  Description of Artificial Sequence: Synthetic oligonucleotide
  Sense strand starting at position 320 of SEQ ID NO: 1245397
aaucguguuuccuuaagaa

SEQ ID NO: 1559547 - RNA, 19 nt, Artificial Sequence
  Description of Artificial Sequence: Synthetic oligonucleotide
  Antisense strand to SEQ ID NO: 1559546
uucuuaaggaaacacgauu

SEQ ID NO: 1559548 - RNA, 19 nt, Artificial Sequence
  Description of Artificial Sequence: Synthetic oligonucleotide
  Sense strand starting at position 324 of SEQ ID NO: 1245397
guguuuccuuaagaaagaa

SEQ ID NO: 1559549 - RNA, 19 nt, Artificial Sequence
  Description of Artificial Sequence: Synthetic oligonucleotide
  Antisense strand to SEQ ID NO: 1559548
uucuuucuuaaggaaacac

SEQ ID NO: 1559550 - RNA, 19 nt, Artificial Sequence
  Description of Artificial Sequence: Synthetic oligonucleotide
  Sense strand starting at position 357 of SEQ ID NO: 1245397
gcuggagauaaacgaucau

SEQ ID NO: 1559551 - RNA, 19 nt, Artificial Sequence
  Description of Artificial Sequence: Synthetic oligonucleotide
  Antisense strand to SEQ ID NO: 1559550
augaucguuuaucuccagc

SEQ ID NO: 1559552 - RNA, 19 nt, Artificial Sequence
  Description of Artificial Sequence: Synthetic oligonucleotide
  Sense strand starting at position 366 of SEQ ID NO: 1245397
aaacgaucauguuaacaga

SEQ ID NO: 1559553 - RNA, 19 nt, Artificial Sequence
  Description of Artificial Sequence: Synthetic oligonucleotide
  Antisense strand to SEQ ID NO: 1559552
ucuguuaacaugaucguuu

SEQ ID NO: 1559554 - RNA, 19 nt, Artificial Sequence
  Description of Artificial Sequence: Synthetic oligonucleotide
  Sense strand starting at position 465 of SEQ ID NO: 1245397
aagaccugacgucacaauu

SEQ ID NO: 1559555 - RNA, 19 nt, Artificial Sequence
  Description of Artificial Sequence: Synthetic oligonucleotide
  Antisense strand to SEQ ID NO: 1559554
aauugugacgucaggucuu

SEQ ID NO: 1559556 - RNA, 19 nt, Artificial Sequence
  Description of Artificial Sequence: Synthetic oligonucleotide
  Sense strand starting at position 685 of SEQ ID NO: 1245397
gugcaucuggauuaaauaa

SEQ ID NO: 1559557 - RNA, 19 nt, Artificial Sequence
  Description of Artificial Sequence: Synthetic oligonucleotide
  Antisense strand to SEQ ID NO: 1559556
uuauuuaauccagaugcac

SEQ ID NO: 1559558 - RNA, 19 nt, Artificial Sequence
  Description of Artificial Sequence: Synthetic oligonucleotide
  Sense strand starting at position 738 of SEQ ID NO: 1245397
gcaaguugaucuuugcaca

SEQ ID NO: 1559559 - RNA, 19 nt, Artificial Sequence
  Description of Artificial Sequence: Synthetic oligonucleotide
  Antisense strand to SEQ ID NO: 1559558
ugugcaaagaucaacuugc

SEQ ID NO: 1559560 - RNA, 19 nt, Artificial Sequence
  Description of Artificial Sequence: Synthetic oligonucleotide
  Sense strand starting at position 771 of SEQ ID NO: 1245397
gacucuuuaucagcggaau

SEQ ID NO: 1559561 - RNA, 19 nt, Artificial Sequence
  Description of Artificial Sequence: Synthetic oligonucleotide
  Antisense strand to SEQ ID NO: 1559560
auuccgcugauaaagaguc

SEQ ID NO: 1559562 - RNA, 19 nt, Artificial Sequence
  Description of Artificial Sequence: Synthetic oligonucleotide
  Sense strand starting at position 772 of SEQ ID NO: 1245397
acucuuuaucagcggaaug

SEQ ID NO: 1559563 - RNA, 19 nt, Artificial Sequence
  Description of Artificial Sequence: Synthetic oligonucleotide
  Antisense strand to SEQ ID NO: 1559562
cauuccgcugauaaagagu

SEQ ID NO: 1559564 - RNA, 19 nt, Artificial Sequence
  Description of Artificial Sequence: Synthetic oligonucleotide
  Sense strand starting at position 773 of SEQ ID NO: 1245397
cucuuuaucagcggaauga

SEQ ID NO: 1559565 - RNA, 19 nt, Artificial Sequence
  Description of Artificial Sequence: Synthetic oligonucleotide
  Antisense strand to SEQ ID NO: 1559564
ucauuccgcugauaaagag

SEQ ID NO: 1559566 - RNA, 19 nt, Artificial Sequence
  Description of Artificial Sequence: Synthetic oligonucleotide
  Sense strand starting at position 774 of SEQ ID NO: 1245397
ucuuuaucagcggaaugag

SEQ ID NO: 1559567 - RNA, 19 nt, Artificial Sequence
  Description of Artificial Sequence: Synthetic oligonucleotide
  Antisense strand to SEQ ID NO: 1559566
cucauuccgcugauaaaga

SEQ ID NO: 1559568 - RNA, 19 nt, Artificial Sequence
  Description of Artificial Sequence: Synthetic oligonucleotide
  Sense strand starting at position 777 of SEQ ID NO: 1245397
uuaucagcggaaugaguaa

SEQ ID NO: 1559569 - RNA, 19 nt, Artificial Sequence
  Description of Artificial Sequence: Synthetic oligonucleotide
  Antisense strand to SEQ ID NO: 1559568
uuacucauuccgcugauaa

SEQ ID NO: 1559570 - RNA, 19 nt, Artificial Sequence
  Description of Artificial Sequence: Synthetic oligonucleotide
  Sense strand starting at position 838 of SEQ ID NO: 1245397
gcuuauuaacgcugauaau

SEQ ID NO: 1559571 - RNA, 19 nt, Artificial Sequence
  Description of Artificial Sequence: Synthetic oligonucleotide
  Antisense strand to SEQ ID NO: 1559570
auuaucagcguuaauaagc

SEQ ID NO: 1559572 - RNA, 19 nt, Artificial Sequence
  Description of Artificial Sequence: Synthetic oligonucleotide
  Sense strand starting at position 839 of SEQ ID NO: 1245397
cuuauuaacgcugauaaua

SEQ ID NO: 1559573 - RNA, 19 nt, Artificial Sequence
  Description of Artificial Sequence: Synthetic oligonucleotide
  Antisense strand to SEQ ID NO: 1559572
uauuaucagcguuaauaag

SEQ ID NO: 1559574 - RNA, 19 nt, Artificial Sequence
  Description of Artificial Sequence: Synthetic oligonucleotide
  Sense strand starting at position 854 of SEQ ID NO: 1245397
aauagaugaggcugacuua

SEQ ID NO: 1559575 - RNA, 19 nt, Artificial Sequence
  Description of Artificial Sequence: Synthetic oligonucleotide
  Antisense strand to SEQ ID NO: 1559574
uaagucagccucaucuauu

SEQ ID NO: 1559576 - RNA, 19 nt, Artificial Sequence
  Description of Artificial Sequence: Synthetic oligonucleotide
  Sense strand starting at position 1031 of SEQ ID NO: 1245397
ggcgguuuaaucuaaauac

SEQ ID NO: 1559577 - RNA, 19 nt, Artificial Sequence
  Description of Artificial Sequence: Synthetic oligonucleotide
  Antisense strand to SEQ ID NO: 1559576
guauuuagauuaaaccgcc

SEQ ID NO: 1559578 - RNA, 19 nt, Artificial Sequence
  Description of Artificial Sequence: Synthetic oligonucleotide
  Sense strand starting at position 1041 of SEQ ID NO: 1245397
ucuaaauacugaucguaac

SEQ ID NO: 1559579 - RNA, 19 nt, Artificial Sequence
  Description of Artificial Sequence: Synthetic oligonucleotide
  Antisense strand to SEQ ID NO: 1559578
guuacgaucaguauuuaga

SEQ ID NO: 1559580 - RNA, 19 nt, Artificial Sequence
  Description of Artificial Sequence: Synthetic oligonucleotide
  Sense strand starting at position 1042 of SEQ ID NO: 1245397
cuaaauacugaucguaacu

SEQ ID NO: 1559581 - RNA, 19 nt, Artificial Sequence
  Description of Artificial Sequence: Synthetic oligonucleotide
  Antisense strand to SEQ ID NO: 1559580
aguuacgaucaguauuuag

SEQ ID NO: 1559582 - RNA, 19 nt, Artificial Sequence
  Description of Artificial Sequence: Synthetic oligonucleotide
  Sense strand starting at position 1067 of SEQ ID NO: 1245397
ucuguuaguucucccugga

SEQ ID NO: 1559583 - RNA, 19 nt, Artificial Sequence
  Description of Artificial Sequence: Synthetic oligonucleotide
  Antisense strand to SEQ ID NO: 1559582
uccagggagaacuaacaga

SEQ ID NO: 1559584 - RNA, 19 nt, Artificial Sequence
  Description of Artificial Sequence: Synthetic oligonucleotide
  Sense strand starting at position 1070 of SEQ ID NO: 1245397
guuaguucucccuggaaau

SEQ ID NO: 1559585 - RNA, 19 nt, Artificial Sequence
  Description of Artificial Sequence: Synthetic oligonucleotide
  Antisense strand to SEQ ID NO: 1559584
auuuccagggagaacuaac

SEQ ID NO: 1559586 - RNA, 19 nt, Artificial Sequence
  Description of Artificial Sequence: Synthetic oligonucleotide
  Sense strand starting at position 1071 of SEQ ID NO: 1245397
uuaguucucccuggaaaug

SEQ ID NO: 1559587 - RNA, 19 nt, Artificial Sequence
  Description of Artificial Sequence: Synthetic oligonucleotide
  Antisense strand to SEQ ID NO: 1559586
cauuuccagggagaacuaa

SEQ ID NO: 1559588 - RNA, 19 nt, Artificial Sequence
  Description of Artificial Sequence: Synthetic oligonucleotide
  Sense strand starting at position 1314 of SEQ ID NO: 1245397
acguuagggucacuuagaa

SEQ ID NO: 1559589 - RNA, 19 nt, Artificial Sequence
  Description of Artificial Sequence: Synthetic oligonucleotide
  Antisense strand to SEQ ID NO: 1559588
uucuaagugacccuaacgu

SEQ ID NO: 1559590 - RNA, 19 nt, Artificial Sequence
  Description of Artificial Sequence: Synthetic oligonucleotide
  Sense strand starting at position 1508 of SEQ ID NO: 1245397
cuucauuagccggagcguu

SEQ ID NO: 1559591 - RNA, 19 nt, Artificial Sequence
  Description of Artificial Sequence: Synthetic oligonucleotide
  Antisense strand to SEQ ID NO: 1559590
aacgcuccggcuaaugaag

SEQ ID NO: 1559592 - RNA, 19 nt, Artificial Sequence
  Description of Artificial Sequence: Synthetic oligonucleotide
  Sense strand starting at position 2271 of SEQ ID NO: 1245397
aauggucugcccuguagga

SEQ ID NO: 1559593 - RNA, 19 nt, Artificial Sequence
  Description of Artificial Sequence: Synthetic oligonucleotide
  Antisense strand to SEQ ID NO: 1559592
uccuacagggcagaccauu

SEQ ID NO: 1559594 - RNA, 19 nt, Artificial Sequence
  Description of Artificial Sequence: Synthetic oligonucleotide
  Sense strand starting at position 2273 of SEQ ID NO: 1245397
uggucugcccuguaggaaa

SEQ ID NO: 1559595 - RNA, 19 nt, Artificial Sequence
  Description of Artificial Sequence: Synthetic oligonucleotide
  Antisense strand to SEQ ID NO: 1559594
uuuccuacagggcagacca

SEQ ID NO: 1559596 - RNA, 19 nt, Artificial Sequence
  Description of Artificial Sequence: Synthetic oligonucleotide
  Sense strand starting at position 2308 of SEQ ID NO: 1245397
gucucaucagcacaaaguu

SEQ ID NO: 1559597 - RNA, 19 nt, Artificial Sequence
  Description of Artificial Sequence: Synthetic oligonucleotide
  Antisense strand to SEQ ID NO: 1559596
aacuuugugcugaugagac

SEQ ID NO: 1559598 - RNA, 19 nt, Artificial Sequence
  Description of Artificial Sequence: Synthetic oligonucleotide
  Sense strand starting at position 2781 of SEQ ID NO: 1245397
accgguagccucgaaaguu

SEQ ID NO: 1559599 - RNA, 19 nt, Artificial Sequence
  Description of Artificial Sequence: Synthetic oligonucleotide
  Antisense strand to SEQ ID NO: 1559598
aacuuucgaggcuaccggu

SEQ ID NO: 1559600 - RNA, 19 nt, Artificial Sequence
  Description of Artificial Sequence: Synthetic oligonucleotide
  Sense strand starting at position 2855 of SEQ ID NO: 1245397
cgagcaguaguuaguugua

SEQ ID NO: 1559601 - RNA, 19 nt, Artificial Sequence
  Description of Artificial Sequence: Synthetic oligonucleotide
  Antisense strand to SEQ ID NO: 1559600
uacaacuaacuacugcucg

SEQ ID NO: 1559602 - RNA, 19 nt, Artificial Sequence
  Description of Artificial Sequence: Synthetic oligonucleotide
  Sense strand starting at position 2857 of SEQ ID NO: 1245397
agcaguaguuaguuguaau

SEQ ID NO: 1559603 - RNA, 19 nt, Artificial Sequence
  Description of Artificial Sequence: Synthetic oligonucleotide
  Antisense strand to SEQ ID NO: 1559602
auuacaacuaacuacugcu

SEQ ID NO: 1559604 - RNA, 19 nt, Artificial Sequence
  Description of Artificial Sequence: Synthetic oligonucleotide
  Sense strand starting at position 2858 of SEQ ID NO: 1245397
gcaguaguuaguuguaaua

SEQ ID NO: 1559605 - RNA, 19 nt, Artificial Sequence
  Description of Artificial Sequence: Synthetic oligonucleotide
  Antisense strand to SEQ ID NO: 1559604
uauuacaacuaacuacugc

SEQ ID NO: 1559606 - RNA, 19 nt, Artificial Sequence
  Description of Artificial Sequence: Synthetic oligonucleotide
  Sense strand starting at position 2868 of SEQ ID NO: 1245397
guuguaauaaguugagucu

SEQ ID NO: 1559607 - RNA, 19 nt, Artificial Sequence
  Description of Artificial Sequence: Synthetic oligonucleotide
  Antisense strand to SEQ ID NO: 1559606
agacucaacuuauuacaac

SEQ ID NO: 1559608 - RNA, 19 nt, Artificial Sequence
  Description of Artificial Sequence: Synthetic oligonucleotide
  Sense strand starting at position 2874 of SEQ ID NO: 1245397
auaaguugagucugggacu

SEQ ID NO: 1559609 - RNA, 19 nt, Artificial Sequence
  Description of Artificial Sequence: Synthetic oligonucleotide
  Antisense strand to SEQ ID NO: 1559608
agucccagacucaacuuau

SEQ ID NO: 1559610 - RNA, 19 nt, Artificial Sequence
  Description of Artificial Sequence: Synthetic oligonucleotide
  Sense strand starting at position 2877 of SEQ ID NO: 1245397
aguugagucugggacuaga

SEQ ID NO: 1559611 - RNA, 19 nt, Artificial Sequence
  Description of Artificial Sequence: Synthetic oligonucleotide
  Antisense strand to SEQ ID NO: 1559610
ucuagucccagacucaacu

SEQ ID NO: 1559612 - RNA, 19 nt, Artificial Sequence
  Description of Artificial Sequence: Synthetic oligonucleotide
  Sense strand starting at position 73 of SEQ ID NO: 1245398
accuuaucccuugggacuu

SEQ ID NO: 1559613 - RNA, 19 nt, Artificial Sequence
  Description of Artificial Sequence: Synthetic oligonucleotide
  Antisense strand to SEQ ID NO: 1559612
aagucccaagggauaaggu

SEQ ID NO: 1559614 - RNA, 19 nt, Artificial Sequence
  Description of Artificial Sequence: Synthetic oligonucleotide
  Sense strand starting at position 301 of SEQ ID NO: 1245398
gcaucugauuggcugacaa

SEQ ID NO: 1559615 - RNA, 19 nt, Artificial Sequence
  Description of Artificial Sequence: Synthetic oligonucleotide
  Antisense strand to SEQ ID NO: 1559614
uugucagccaaucagaugc

SEQ ID NO: 1559616 - RNA, 19 nt, Artificial Sequence
  Description of Artificial Sequence: Synthetic oligonucleotide
  Sense strand starting at position 323 of SEQ ID NO: 1245398
auguguuuccauggaauga

SEQ ID NO: 1559617 - RNA, 19 nt, Artificial Sequence
  Description of Artificial Sequence: Synthetic oligonucleotide
  Antisense strand to SEQ ID NO: 1559616
ucauuccauggaaacacau

SEQ ID NO: 1559618 - RNA, 19 nt, Artificial Sequence
  Description of Artificial Sequence: Synthetic oligonucleotide
  Sense strand starting at position 324 of SEQ ID NO: 1245398
uguguuuccauggaaugaa

SEQ ID NO: 1559619 - RNA, 19 nt, Artificial Sequence
  Description of Artificial Sequence: Synthetic oligonucleotide
  Antisense strand to SEQ ID NO: 1559618
uucauuccauggaaacaca

SEQ ID NO: 1559620 - RNA, 19 nt, Artificial Sequence
  Description of Artificial Sequence: Synthetic oligonucleotide
  Sense strand starting at position 406 of SEQ ID NO: 1245398
aaggguaagccuggauauu

SEQ ID NO: 1559621 - RNA, 19 nt, Artificial Sequence
  Description of Artificial Sequence: Synthetic oligonucleotide
  Antisense strand to SEQ ID NO: 1559620
aauauccaggcuuacccuu

SEQ ID NO: 1559622 - RNA, 19 nt, Artificial Sequence
  Description of Artificial Sequence: Synthetic oligonucleotide
  Sense strand starting at position 482 of SEQ ID NO: 1245398
guguguccucuggaagauu

SEQ ID NO: 1559623 - RNA, 19 nt, Artificial Sequence
  Description of Artificial Sequence: Synthetic oligonucleotide
  Antisense strand to SEQ ID NO: 1559622
aaucuuccagaggacacac

SEQ ID NO: 1559624 - RNA, 19 nt, Artificial Sequence
  Description of Artificial Sequence: Synthetic oligonucleotide
  Sense strand starting at position 558 of SEQ ID NO: 1245398
gggccaucucaagacaguu

SEQ ID NO: 1559625 - RNA, 19 nt, Artificial Sequence
  Description of Artificial Sequence: Synthetic oligonucleotide
  Antisense strand to SEQ ID NO: 1559624
aacugucuugagauggccc

SEQ ID NO: 1559626 - RNA, 19 nt, Artificial Sequence
  Description of Artificial Sequence: Synthetic oligonucleotide
  Sense strand starting at position 601 of SEQ ID NO: 1245398
cccgaauguggcuaaggaa

SEQ ID NO: 1559627 - RNA, 19 nt, Artificial Sequence
  Description of Artificial Sequence: Synthetic oligonucleotide
  Antisense strand to SEQ ID NO: 1559626
uuccuuagccacauucggg

SEQ ID NO: 1559628 - RNA, 19 nt, Artificial Sequence
  Description of Artificial Sequence: Synthetic oligonucleotide
  Sense strand starting at position 628 of SEQ ID NO: 1245398
ccauaaaguuucccaacga

SEQ ID NO: 1559629 - RNA, 19 nt, Artificial Sequence
  Description of Artificial Sequence: Synthetic oligonucleotide
  Antisense strand to SEQ ID NO: 1559628
ucguugggaaacuuuaugg

SEQ ID NO: 1559630 - RNA, 19 nt, Artificial Sequence
  Description of Artificial Sequence: Synthetic oligonucleotide
  Sense strand starting at position 767 of SEQ ID NO: 1245398
gugaaauauuuguaaguag

SEQ ID NO: 1559631 - RNA, 19 nt, Artificial Sequence
  Description of Artificial Sequence: Synthetic oligonucleotide
  Antisense strand to SEQ ID NO: 1559630
cuacuuacaaauauuucac

SEQ ID NO: 1559632 - RNA, 19 nt, Artificial Sequence
  Description of Artificial Sequence: Synthetic oligonucleotide
  Sense strand starting at position 850 of SEQ ID NO: 1245398
uucugaaaugugcaauaaa

SEQ ID NO: 1559633 - RNA, 19 nt, Artificial Sequence
  Description of Artificial Sequence: Synthetic oligonucleotide
  Antisense strand to SEQ ID NO: 1559632
uuuauugcacauuucagaa

SEQ ID NO: 1559634 - RNA, 19 nt, Artificial Sequence
  Description of Artificial Sequence: Synthetic oligonucleotide
  Sense strand starting at position 978 of SEQ ID NO: 1245398
cagaguaguggaugugaga

SEQ ID NO: 1559635 - RNA, 19 nt, Artificial Sequence
  Description of Artificial Sequence: Synthetic oligonucleotide
  Antisense strand to SEQ ID NO: 1559634
ucucacauccacuacucug

SEQ ID NO: 1559636 - RNA, 19 nt, Artificial Sequence
  Description of Artificial Sequence: Synthetic oligonucleotide
  Sense strand starting at position 1036 of SEQ ID NO: 1245398
agugucuuugauuaaaguu

SEQ ID NO: 1559637 - RNA, 19 nt, Artificial Sequence
  Description of Artificial Sequence: Synthetic oligonucleotide
  Antisense strand to SEQ ID NO: 1559636
aacuuuaaucaaagacacu

SEQ ID NO: 1559638 - RNA, 19 nt, Artificial Sequence
  Description of Artificial Sequence: Synthetic oligonucleotide
  Sense strand starting at position 1068 of SEQ ID NO: 1245398
agcagucauuuagacugaa

SEQ ID NO: 1559639 - RNA, 19 nt, Artificial Sequence
  Description of Artificial Sequence: Synthetic oligonucleotide
  Antisense strand to SEQ ID NO: 1559638
uucagucuaaaugacugcu

SEQ ID NO: 1559640 - RNA, 19 nt, Artificial Sequence
  Description of Artificial Sequence: Synthetic oligonucleotide
  Sense strand starting at position 1098 of SEQ ID NO: 1245398
ggucuaggccucuauguaa

SEQ ID NO: 1559641 - RNA, 19 nt, Artificial Sequence
  Description of Artificial Sequence: Synthetic oligonucleotide
  Antisense strand to SEQ ID NO: 1559640
uuacauagaggccuagacc

SEQ ID NO: 1559642 - RNA, 19 nt, Artificial Sequence
  Description of Artificial Sequence: Synthetic oligonucleotide
  Sense strand starting at position 1148 of SEQ ID NO: 1245398
cuaaguuacuaccuuagga

SEQ ID NO: 1559643 - RNA, 19 nt, Artificial Sequence
  Description of Artificial Sequence: Synthetic oligonucleotide
  Antisense strand to SEQ ID NO: 1559642
uccuaagguaguaacuuag

SEQ ID NO: 1559644 - RNA, 19 nt, Artificial Sequence
  Description of Artificial Sequence: Synthetic oligonucleotide
  Sense strand starting at position 1402 of SEQ ID NO: 1245398
auauaagcugucuauguuu

SEQ ID NO: 1559645 - RNA, 19 nt, Artificial Sequence
  Description of Artificial Sequence: Synthetic oligonucleotide
  Antisense strand to SEQ ID NO: 1559644
aaacauagacagcuuauau

SEQ ID NO: 1559646 - RNA, 19 nt, Artificial Sequence
  Description of Artificial Sequence: Synthetic oligonucleotide
  Sense strand starting at position 1807 of SEQ ID NO: 1245398
ccuggagucuuagcuauaa

SEQ ID NO: 1559647 - RNA, 19 nt, Artificial Sequence
  Description of Artificial Sequence: Synthetic oligonucleotide
  Antisense strand to SEQ ID NO: 1559646
uuauagcuaagacuccagg

SEQ ID NO: 1559648 - RNA, 19 nt, Artificial Sequence
  Description of Artificial Sequence: Synthetic oligonucleotide
  Sense strand starting at position 1866 of SEQ ID NO: 1245398
ggcagaaucaccgaagucu

SEQ ID NO: 1559649 - RNA, 19 nt, Artificial Sequence
  Description of Artificial Sequence: Synthetic oligonucleotide
  Antisense strand to SEQ ID NO: 1559648
agacuucggugauucugcc

SEQ ID NO: 1559650 - RNA, 19 nt, Artificial Sequence
  Description of Artificial Sequence: Synthetic oligonucleotide
  Sense strand starting at position 1877 of SEQ ID NO: 1245398
cgaagucucccggagcaga

SEQ ID NO: 1559651 - RNA, 19 nt, Artificial Sequence
  Description of Artificial Sequence: Synthetic oligonucleotide
  Antisense strand to SEQ ID NO: 1559650
ucugcuccgggagacuucg

SEQ ID NO: 1559652 - RNA, 19 nt, Artificial Sequence
  Description of Artificial Sequence: Synthetic oligonucleotide
  Sense strand starting at position 2199 of SEQ ID NO: 1245398
gguguauaacguuaugaag

SEQ ID NO: 1559653 - RNA, 19 nt, Artificial Sequence
  Description of Artificial Sequence: Synthetic oligonucleotide
  Antisense strand to SEQ ID NO: 1559652
cuucauaacguuauacacc

SEQ ID NO: 1559654 - RNA, 19 nt, Artificial Sequence
  Description of Artificial Sequence: Synthetic oligonucleotide
  Sense strand starting at position 2318 of SEQ ID NO: 1245398
cggucuuuggagugggaca

SEQ ID NO: 1559655 - RNA, 19 nt, Artificial Sequence
  Description of Artificial Sequence: Synthetic oligonucleotide
  Antisense strand to SEQ ID NO: 1559654
ugucccacuccaaagaccg

SEQ ID NO: 1559656 - RNA, 19 nt, Artificial Sequence
  Description of Artificial Sequence: Synthetic oligonucleotide
  Sense strand starting at position 2731 of SEQ ID NO: 1245398
gugaaauuguuuguaauac

SEQ ID NO: 1559657 - RNA, 19 nt, Artificial Sequence
  Description of Artificial Sequence: Synthetic oligonucleotide
  Antisense strand to SEQ ID NO: 1559656
guauuacaaacaauuucac

SEQ ID NO: 1559658 - RNA, 19 nt, Artificial Sequence
  Description of Artificial Sequence: Synthetic oligonucleotide
  Sense strand starting at position 2784 of SEQ ID NO: 1245398
auguguggucaacaaauaa

SEQ ID NO: 1559659 - RNA, 19 nt, Artificial Sequence
  Description of Artificial Sequence: Synthetic oligonucleotide
  Antisense strand to SEQ ID NO: 1559658
uuauuuguugaccacacau

SEQ ID NO: 1559660 - RNA, 19 nt, Artificial Sequence
  Description of Artificial Sequence: Synthetic oligonucleotide
  Sense strand starting at position 2829 of SEQ ID NO: 1245398
uuaaacucgcuguguauuu

SEQ ID NO: 1559661 - RNA, 19 nt, Artificial Sequence
  Description of Artificial Sequence: Synthetic oligonucleotide
  Antisense strand to SEQ ID NO: 1559660
aaauacacagcgaguuuaa

SEQ ID NO: 1559662 - RNA, 19 nt, Artificial Sequence
  Description of Artificial Sequence: Synthetic oligonucleotide
  Sense strand starting at position 2940 of SEQ ID NO: 1245398
uuuguauuucuaggcuauu

SEQ ID NO: 1559663 - RNA, 19 nt, Artificial Sequence
  Description of Artificial Sequence: Synthetic oligonucleotide
  Antisense strand to SEQ ID NO: 1559662
aauagccuagaaauacaaa

SEQ ID NO: 1559664 - RNA, 19 nt, Artificial Sequence
  Description of Artificial Sequence: Synthetic oligonucleotide
  Sense strand starting at position 3012 of SEQ ID NO: 1245398
uuugaaggcaagugacaua

SEQ ID NO: 1559665 - RNA, 19 nt, Artificial Sequence
  Description of Artificial Sequence: Synthetic oligonucleotide
  Antisense strand to SEQ ID NO: 1559664
uaugucacuugccuucaaa

SEQ ID NO: 1559666 - RNA, 19 nt, Artificial Sequence
  Description of Artificial Sequence: Synthetic oligonucleotide
  Sense strand starting at position 3058 of SEQ ID NO: 1245398
gcugcaauuuagccaauca

SEQ ID NO: 1559667 - RNA, 19 nt, Artificial Sequence
  Description of Artificial Sequence: Synthetic oligonucleotide
  Antisense strand to SEQ ID NO: 1559666
ugauuggcuaaauugcagc

SEQ ID NO: 1559668 - RNA, 19 nt, Artificial Sequence
  Description of Artificial Sequence: Synthetic oligonucleotide
  Sense strand starting at position 3066 of SEQ ID NO: 1245398
uuagccaaucagcagaaua

SEQ ID NO: 1559669 - RNA, 19 nt, Artificial Sequence
  Description of Artificial Sequence: Synthetic oligonucleotide
  Antisense strand to SEQ ID NO: 1559668
uauucugcugauuggcuaa

SEQ ID NO: 1559670 - RNA, 19 nt, Artificial Sequence
  Description of Artificial Sequence: Synthetic oligonucleotide
  Sense strand starting at position 3076 of SEQ ID NO: 1245398
agcagaauaugcuuugaag

SEQ ID NO: 1559671 - RNA, 19 nt, Artificial Sequence
  Description of Artificial Sequence: Synthetic oligonucleotide
  Antisense strand to SEQ ID NO: 1559670
cuucaaagcauauucugcu

SEQ ID NO: 1559672 - RNA, 19 nt, Artificial Sequence
  Description of Artificial Sequence: Synthetic oligonucleotide
  Sense strand starting at position 3082 of SEQ ID NO: 1245398
auaugcuuugaaggguaaa

SEQ ID NO: 1559673 - RNA, 19 nt, Artificial Sequence
  Description of Artificial Sequence: Synthetic oligonucleotide
  Antisense strand to SEQ ID NO: 1559672
uuuacccuucaaagcauau

SEQ ID NO: 1559674 - RNA, 19 nt, Artificial Sequence
  Description of Artificial Sequence: Synthetic oligonucleotide
  Sense strand starting at position 3235 of SEQ ID NO: 1245398
cuuguagaggaguguuuaa

SEQ ID NO: 1559675 - RNA, 19 nt, Artificial Sequence
  Description of Artificial Sequence: Synthetic oligonucleotide
  Antisense strand to SEQ ID NO: 1559674
uuaaacacuccucuacaag

SEQ ID NO: 1559676 - RNA, 19 nt, Artificial Sequence
  Description of Artificial Sequence: Synthetic oligonucleotide
  Sense strand starting at position 3299 of SEQ ID NO: 1245398
gagugagaccuaggcaaca

SEQ ID NO: 1559677 - RNA, 19 nt, Artificial Sequence
  Description of Artificial Sequence: Synthetic oligonucleotide
  Antisense strand to SEQ ID NO: 1559676
uguugccuaggucucacuc

SEQ ID NO: 1559678 - RNA, 19 nt, Artificial Sequence
  Description of Artificial Sequence: Synthetic oligonucleotide
  Sense strand starting at position 3328 of SEQ ID NO: 1245398
aagcucucgggugauuaua

SEQ ID NO: 1559679 - RNA, 19 nt, Artificial Sequence
  Description of Artificial Sequence: Synthetic oligonucleotide
  Antisense strand to SEQ ID NO: 1559678
uauaaucacccgagagcuu

SEQ ID NO: 1559680 - RNA, 19 nt, Artificial Sequence
  Description of Artificial Sequence: Synthetic oligonucleotide
  Sense strand starting at position 3392 of SEQ ID NO: 1245398
uggagagccaguugaaauu

SEQ ID NO: 1559681 - RNA, 19 nt, Artificial Sequence
  Description of Artificial Sequence: Synthetic oligonucleotide
  Antisense strand to SEQ ID NO: 1559680
aauuucaacuggcucucca

SEQ ID NO: 1559682 - RNA, 19 nt, Artificial Sequence
  Description of Artificial Sequence: Synthetic oligonucleotide
  Sense strand starting at position 3449 of SEQ ID NO: 1245398
gcggccuuucagucuugau

SEQ ID NO: 1559683 - RNA, 19 nt, Artificial Sequence
  Description of Artificial Sequence: Synthetic oligonucleotide
  Antisense strand to SEQ ID NO: 1559682
aucaagacugaaaggccgc

SEQ ID NO: 1559684 - RNA, 19 nt, Artificial Sequence
  Description of Artificial Sequence: Synthetic oligonucleotide
  Sense strand starting at position 3478 of SEQ ID NO: 1245398
cuauccuuugcagaacuga

SEQ ID NO: 1559685 - RNA, 19 nt, Artificial Sequence
  Description of Artificial Sequence: Synthetic oligonucleotide
  Antisense strand to SEQ ID NO: 1559684
ucaguucugcaaaggauag

SEQ ID NO: 1559686 - RNA, 19 nt, Artificial Sequence
  Description of Artificial Sequence: Synthetic oligonucleotide
  Sense strand starting at position 3593 of SEQ ID NO: 1245398
gaguacuaucguggaggaa

SEQ ID NO: 1559687 - RNA, 19 nt, Artificial Sequence
  Description of Artificial Sequence: Synthetic oligonucleotide
  Antisense strand to SEQ ID NO: 1559686
uuccuccacgauaguacuc

SEQ ID NO: 1559688 - RNA, 19 nt, Artificial Sequence
  Description of Artificial Sequence: Synthetic oligonucleotide
  Sense strand starting at position 3594 of SEQ ID NO: 1245398
aguacuaucguggaggaag

SEQ ID NO: 1559689 - RNA, 19 nt, Artificial Sequence
  Description of Artificial Sequence: Synthetic oligonucleotide
  Antisense strand to SEQ ID NO: 1559688
cuuccuccacgauaguacu

SEQ ID NO: 1559690 - RNA, 19 nt, Artificial Sequence
  Description of Artificial Sequence: Synthetic oligonucleotide
  Sense strand starting at position 3745 of SEQ ID NO: 1245398
ucucaugaugucugacacu

SEQ ID NO: 1559691 - RNA, 19 nt, Artificial Sequence
  Description of Artificial Sequence: Synthetic oligonucleotide
  Antisense strand to SEQ ID NO: 1559690
agugucagacaucaugaga

SEQ ID NO: 1559692 - RNA, 19 nt, Artificial Sequence
  Description of Artificial Sequence: Synthetic oligonucleotide
  Sense strand starting at position 264 of SEQ ID NO: 1245399
gcauauuuauucuuugcga

SEQ ID NO: 1559693 - RNA, 19 nt, Artificial Sequence
  Description of Artificial Sequence: Synthetic oligonucleotide
  Antisense strand to SEQ ID NO: 1559692
ucgcaaagaauaaauaugc

SEQ ID NO: 1559694 - RNA, 19 nt, Artificial Sequence
  Description of Artificial Sequence: Synthetic oligonucleotide
  Sense strand starting at position 319 of SEQ ID NO: 1245399
guagaucucagacgggaua

SEQ ID NO: 1559695 - RNA, 19 nt, Artificial Sequence
  Description of Artificial Sequence: Synthetic oligonucleotide
  Antisense strand to SEQ ID NO: 1559694
uaucccgucugagaucuac

SEQ ID NO: 1559696 - RNA, 19 nt, Artificial Sequence
  Description of Artificial Sequence: Synthetic oligonucleotide
  Sense strand starting at position 320 of SEQ ID NO: 1245399
uagaucucagacgggauau

SEQ ID NO: 1559697 - RNA, 19 nt, Artificial Sequence
  Description of Artificial Sequence: Synthetic oligonucleotide
  Antisense strand to SEQ ID NO: 1559696
auaucccgucugagaucua

SEQ ID NO: 1559698 - RNA, 19 nt, Artificial Sequence
  Description of Artificial Sequence: Synthetic oligonucleotide
  Sense strand starting at position 321 of SEQ ID NO: 1245399
agaucucagacgggauauu

SEQ ID NO: 1559699 - RNA, 19 nt, Artificial Sequence
  Description of Artificial Sequence: Synthetic oligonucleotide
  Antisense strand to SEQ ID NO: 1559698
aauaucccgucugagaucu

SEQ ID NO: 1559700 - RNA, 19 nt, Artificial Sequence
  Description of Artificial Sequence: Synthetic oligonucleotide
  Sense strand starting at position 347 of SEQ ID NO: 1245399
ccucccucuccggauaauu

SEQ ID NO: 1559701 - RNA, 19 nt, Artificial Sequence
  Description of Artificial Sequence: Synthetic oligonucleotide
  Antisense strand to SEQ ID NO: 1559700
aauuauccggagagggagg

SEQ ID NO: 1559702 - RNA, 19 nt, Artificial Sequence
  Description of Artificial Sequence: Synthetic oligonucleotide
  Sense strand starting at position 356 of SEQ ID NO: 1245399
ccggauaauuucguuucuu

SEQ ID NO: 1559703 - RNA, 19 nt, Artificial Sequence
  Description of Artificial Sequence: Synthetic oligonucleotide
  Antisense strand to SEQ ID NO: 1559702
aagaaacgaaauuauccgg

SEQ ID NO: 1559704 - RNA, 19 nt, Artificial Sequence
  Description of Artificial Sequence: Synthetic oligonucleotide
  Sense strand starting at position 357 of SEQ ID NO: 1245399
cggauaauuucguuucuuu

SEQ ID NO: 1559705 - RNA, 19 nt, Artificial Sequence
  Description of Artificial Sequence: Synthetic oligonucleotide
  Antisense strand to SEQ ID NO: 1559704
aaagaaacgaaauuauccg

SEQ ID NO: 1559706 - RNA, 19 nt, Artificial Sequence
  Description of Artificial Sequence: Synthetic oligonucleotide
  Sense strand starting at position 648 of SEQ ID NO: 1245399
ccuccuuaccuuugaggga

SEQ ID NO: 1559707 - RNA, 19 nt, Artificial Sequence
  Description of Artificial Sequence: Synthetic oligonucleotide
  Antisense strand to SEQ ID NO: 1559706
ucccucaaagguaaggagg

SEQ ID NO: 1559708 - RNA, 19 nt, Artificial Sequence
  Description of Artificial Sequence: Synthetic oligonucleotide
  Sense strand starting at position 1782 of SEQ ID NO: 1245399
uccgguaguccacauaaua

SEQ ID NO: 1559709 - RNA, 19 nt, Artificial Sequence
  Description of Artificial Sequence: Synthetic oligonucleotide
  Antisense strand to SEQ ID NO: 1559708
uauuauguggacuaccgga

SEQ ID NO: 1559710 - RNA, 19 nt, Artificial Sequence
  Description of Artificial Sequence: Synthetic oligonucleotide
  Sense strand starting at position 1878 of SEQ ID NO: 1245399
guacguaaucacugaggaa

SEQ ID NO: 1559711 - RNA, 19 nt, Artificial Sequence
  Description of Artificial Sequence: Synthetic oligonucleotide
  Antisense strand to SEQ ID NO: 1559710
uuccucagugauuacguac

SEQ ID NO: 1559712 - RNA, 19 nt, Artificial Sequence
  Description of Artificial Sequence: Synthetic oligonucleotide
  Sense strand starting at position 2501 of SEQ ID NO: 1245399
agucucucuuacuuggaau

SEQ ID NO: 1559713 - RNA, 19 nt, Artificial Sequence
  Description of Artificial Sequence: Synthetic oligonucleotide
  Antisense strand to SEQ ID NO: 1559712
auuccaaguaagagagacu

SEQ ID NO: 1559714 - RNA, 19 nt, Artificial Sequence
  Description of Artificial Sequence: Synthetic oligonucleotide
  Sense strand starting at position 2566 of SEQ ID NO: 1245399
agagaaagucauugaugcu

SEQ ID NO: 1559715 - RNA, 19 nt, Artificial Sequence
  Description of Artificial Sequence: Synthetic oligonucleotide
  Antisense strand to SEQ ID NO: 1559714
agcaucaaugacuuucucu

SEQ ID NO: 1559716 - RNA, 19 nt, Artificial Sequence
  Description of Artificial Sequence: Synthetic oligonucleotide
  Sense strand starting at position 2573 of SEQ ID NO: 1245399
gucauugaugcugacgaau

SEQ ID NO: 1559717 - RNA, 19 nt, Artificial Sequence
  Description of Artificial Sequence: Synthetic oligonucleotide
  Antisense strand to SEQ ID NO: 1559716
auucgucagcaucaaugac

SEQ ID NO: 1559718 - RNA, 19 nt, Artificial Sequence
  Description of Artificial Sequence: Synthetic oligonucleotide
  Sense strand starting at position 2649 of SEQ ID NO: 1245399
ugacauagaucuuugucca

SEQ ID NO: 1559719 - RNA, 19 nt, Artificial Sequence
  Description of Artificial Sequence: Synthetic oligonucleotide
  Antisense strand to SEQ ID NO: 1559718
uggacaaagaucuauguca

SEQ ID NO: 1559720 - RNA, 19 nt, Artificial Sequence
  Description of Artificial Sequence: Synthetic oligonucleotide
  Sense strand starting at position 2650 of SEQ ID NO: 1245399
gacauagaucuuuguccag

SEQ ID NO: 1559721 - RNA, 19 nt, Artificial Sequence
  Description of Artificial Sequence: Synthetic oligonucleotide
  Antisense strand to SEQ ID NO: 1559720
cuggacaaagaucuauguc

SEQ ID NO: 1559722 - RNA, 19 nt, Artificial Sequence
  Description of Artificial Sequence: Synthetic oligonucleotide
  Sense strand starting at position 2653 of SEQ ID NO: 1245399
auagaucuuuguccagaaa

SEQ ID NO: 1559723 - RNA, 19 nt, Artificial Sequence
  Description of Artificial Sequence: Synthetic oligonucleotide
  Antisense strand to SEQ ID NO: 1559722
uuucuggacaaagaucuau

SEQ ID NO: 1559724 - RNA, 19 nt, Artificial Sequence
  Description of Artificial Sequence: Synthetic oligonucleotide
  Sense strand starting at position 2693 of SEQ ID NO: 1245399
uucuuuaagcaagagguaa

SEQ ID NO: 1559725 - RNA, 19 nt, Artificial Sequence
  Description of Artificial Sequence: Synthetic oligonucleotide
  Antisense strand to SEQ ID NO: 1559724
uuaccucuugcuuaaagaa

SEQ ID NO: 1559726 - RNA, 19 nt, Artificial Sequence
  Description of Artificial Sequence: Synthetic oligonucleotide
  Sense strand starting at position 2722 of SEQ ID NO: 1245399
acuuaagaauauguguaca

SEQ ID NO: 1559727 - RNA, 19 nt, Artificial Sequence
  Description of Artificial Sequence: Synthetic oligonucleotide
  Antisense strand to SEQ ID NO: 1559726
uguacacauauucuuaagu

SEQ ID NO: 1559728 - RNA, 19 nt, Artificial Sequence
  Description of Artificial Sequence: Synthetic oligonucleotide
  Sense strand starting at position 2724 of SEQ ID NO: 1245399
uuaagaauauguguacaag

SEQ ID NO: 1559729 - RNA, 19 nt, Artificial Sequence
  Description of Artificial Sequence: Synthetic oligonucleotide
  Antisense strand to SEQ ID NO: 1559728
cuuguacacauauucuuaa

SEQ ID NO: 1559730 - RNA, 19 nt, Artificial Sequence
  Description of Artificial Sequence: Synthetic oligonucleotide
  Sense strand starting at position 2761 of SEQ ID NO: 1245399
aauugaaaugucugcaggu

SEQ ID NO: 1559731 - RNA, 19 nt, Artificial Sequence
  Description of Artificial Sequence: Synthetic oligonucleotide
  Antisense strand to SEQ ID NO: 1559730
accugcagacauuucaauu

SEQ ID NO: 1559732 - RNA, 19 nt, Artificial Sequence
  Description of Artificial Sequence: Synthetic oligonucleotide
  Sense strand starting at position 2913 of SEQ ID NO: 1245399
uguuguugcuauuuauuga

SEQ ID NO: 1559733 - RNA, 19 nt, Artificial Sequence
  Description of Artificial Sequence: Synthetic oligonucleotide
  Antisense strand to SEQ ID NO: 1559732
ucaauaaauagcaacaaca

SEQ ID NO: 1559734 - RNA, 19 nt, Artificial Sequence
  Description of Artificial Sequence: Synthetic oligonucleotide
  Sense strand starting at position 2949 of SEQ ID NO: 1245399
guuauaaaugccugagagg

SEQ ID NO: 1559735 - RNA, 19 nt, Artificial Sequence
  Description of Artificial Sequence: Synthetic oligonucleotide
  Antisense strand to SEQ ID NO: 1559734
ccucucaggcauuuauaac

SEQ ID NO: 1559736 - RNA, 19 nt, Artificial Sequence
  Description of Artificial Sequence: Synthetic oligonucleotide
  Sense strand starting at position 2989 of SEQ ID NO: 1245399
ucacaagucuugguggaaa

SEQ ID NO: 1559737 - RNA, 19 nt, Artificial Sequence
  Description of Artificial Sequence: Synthetic oligonucleotide
  Antisense strand to SEQ ID NO: 1559736
uuuccaccaagacuuguga

SEQ ID NO: 1559738 - RNA, 19 nt, Artificial Sequence
  Description of Artificial Sequence: Synthetic oligonucleotide
  Sense strand starting at position 2991 of SEQ ID NO: 1245399
acaagucuugguggaaauu

SEQ ID NO: 1559739 - RNA, 19 nt, Artificial Sequence
  Description of Artificial Sequence: Synthetic oligonucleotide
  Antisense strand to SEQ ID NO: 1559738
aauuuccaccaagacuugu

SEQ ID NO: 1559740 - RNA, 19 nt, Artificial Sequence
  Description of Artificial Sequence: Synthetic oligonucleotide
  Sense strand starting at position 3017 of SEQ ID NO: 1245399
ucagaauacgguuaauuac

SEQ ID NO: 1559741 - RNA, 19 nt, Artificial Sequence
  Description of Artificial Sequence: Synthetic oligonucleotide
  Antisense strand to SEQ ID NO: 1559740
guaauuaaccguauucuga

SEQ ID NO: 1559742 - RNA, 19 nt, Artificial Sequence
  Description of Artificial Sequence: Synthetic oligonucleotide
  Sense strand starting at position 3020 of SEQ ID NO: 1245399
gaauacgguuaauuacaca

SEQ ID NO: 1559743 - RNA, 19 nt, Artificial Sequence
  Description of Artificial Sequence: Synthetic oligonucleotide
  Antisense strand to SEQ ID NO: 1559742
uguguaauuaaccguauuc

SEQ ID NO: 1559744 - RNA, 19 nt, Artificial Sequence
  Description of Artificial Sequence: Synthetic oligonucleotide
  Sense strand starting at position 3111 of SEQ ID NO: 1245399
agguacagcuaucuauuaa

SEQ ID NO: 1559745 - RNA, 19 nt, Artificial Sequence
  Description of Artificial Sequence: Synthetic oligonucleotide
  Antisense strand to SEQ ID NO: 1559744
uuaauagauagcuguaccu

SEQ ID NO: 1559746 - RNA, 19 nt, Artificial Sequence
  Description of Artificial Sequence: Synthetic oligonucleotide
  Sense strand starting at position 3296 of SEQ ID NO: 1245399
ugaaaucauaguuguaguc

SEQ ID NO: 1559747 - RNA, 19 nt, Artificial Sequence
  Description of Artificial Sequence: Synthetic oligonucleotide
  Antisense strand to SEQ ID NO: 1559746
gacuacaacuaugauuuca

SEQ ID NO: 1559748 - RNA, 19 nt, Artificial Sequence
  Description of Artificial Sequence: Synthetic oligonucleotide
  Sense strand starting at position 3321 of SEQ ID NO: 1245399
aacuuugcaugacugugaa

SEQ ID NO: 1559749 - RNA, 19 nt, Artificial Sequence
  Description of Artificial Sequence: Synthetic oligonucleotide
  Antisense strand to SEQ ID NO: 1559748
uucacagucaugcaaaguu

SEQ ID NO: 1559750 - RNA, 19 nt, Artificial Sequence
  Description of Artificial Sequence: Synthetic oligonucleotide
  Sense strand starting at position 3324 of SEQ ID NO: 1245399
uuugcaugacugugaaaua

SEQ ID NO: 1559751 - RNA, 19 nt, Artificial Sequence
  Description of Artificial Sequence: Synthetic oligonucleotide
  Antisense strand to SEQ ID NO: 1559750
uauuucacagucaugcaaa

SEQ ID NO: 1559752 - RNA, 19 nt, Artificial Sequence
  Description of Artificial Sequence: Synthetic oligonucleotide
  Sense strand starting at position 3359 of SEQ ID NO: 1245399
agaaucuguguugguacau

SEQ ID NO: 1559753 - RNA, 19 nt, Artificial Sequence
  Description of Artificial Sequence: Synthetic oligonucleotide
  Antisense strand to SEQ ID NO: 1559752
auguaccaacacagauucu

SEQ ID NO: 1559754 - RNA, 19 nt, Artificial Sequence
  Description of Artificial Sequence: Synthetic oligonucleotide
  Sense strand starting at position 3446 of SEQ ID NO: 1245399
auguguaaacaccaaguuu

SEQ ID NO: 1559755 - RNA, 19 nt, Artificial Sequence
  Description of Artificial Sequence: Synthetic oligonucleotide
  Antisense strand to SEQ ID NO: 1559754
aaacuugguguuuacacau

SEQ ID NO: 1559756 - RNA, 19 nt, Artificial Sequence
  Description of Artificial Sequence: Synthetic oligonucleotide
  Sense strand starting at position 3479 of SEQ ID NO: 1245399
uuucgugugguagccauau

SEQ ID NO: 1559757 - RNA, 19 nt, Artificial Sequence
  Description of Artificial Sequence: Synthetic oligonucleotide
  Antisense strand to SEQ ID NO: 1559756
auauggcuaccacacgaaa

SEQ ID NO: 1559758 - RNA, 19 nt, Artificial Sequence
  Description of Artificial Sequence: Synthetic oligonucleotide
  Sense strand starting at position 3491 of SEQ ID NO: 1245399
gccauaugugugcagaaua

SEQ ID NO: 1559759 - RNA, 19 nt, Artificial Sequence
  Description of Artificial Sequence: Synthetic oligonucleotide
  Antisense strand to SEQ ID NO: 1559758
uauucugcacacauauggc

SEQ ID NO: 1559760 - RNA, 19 nt, Artificial Sequence
  Description of Artificial Sequence: Synthetic oligonucleotide
  Sense strand starting at position 3621 of SEQ ID NO: 1245399
cgcguacccuaauuuguua

SEQ ID NO: 1559761 - RNA, 19 nt, Artificial Sequence
  Description of Artificial Sequence: Synthetic oligonucleotide
  Antisense strand to SEQ ID NO: 1559760
uaacaaauuaggguacgcg

SEQ ID NO: 1559762 - RNA, 19 nt, Artificial Sequence
  Description of Artificial Sequence: Synthetic oligonucleotide
  Sense strand starting at position 3728 of SEQ ID NO: 1245399
guuaguauuucuguugccu

SEQ ID NO: 1559763 - RNA, 19 nt, Artificial Sequence
  Description of Artificial Sequence: Synthetic oligonucleotide
  Antisense strand to SEQ ID NO: 1559762
aggcaacagaaauacuaac

SEQ ID NO: 1559764 - RNA, 19 nt, Artificial Sequence
  Description of Artificial Sequence: Synthetic oligonucleotide
  Sense strand starting at position 3740 of SEQ ID NO: 1245399
guugccuuccucuauuaag

SEQ ID NO: 1559765 - RNA, 19 nt, Artificial Sequence
  Description of Artificial Sequence: Synthetic oligonucleotide
  Antisense strand to SEQ ID NO: 1559764
cuuaauagaggaaggcaac

SEQ ID NO: 1559766 - RNA, 19 nt, Artificial Sequence
  Description of Artificial Sequence: Synthetic oligonucleotide
  Sense strand starting at position 3795 of SEQ ID NO: 1245399
ggcucaagagccugauauu

SEQ ID NO: 1559767 - RNA, 19 nt, Artificial Sequence
  Description of Artificial Sequence: Synthetic oligonucleotide
  Antisense strand to SEQ ID NO: 1559766
aauaucaggcucuugagcc

SEQ ID NO: 1559768 - RNA, 19 nt, Artificial Sequence
  Description of Artificial Sequence: Synthetic oligonucleotide
  Sense strand starting at position 3821 of SEQ ID NO: 1245399
gggauaguacugcauagca

SEQ ID NO: 1559769 - RNA, 19 nt, Artificial Sequence
  Description of Artificial Sequence: Synthetic oligonucleotide
  Antisense strand to SEQ ID NO: 1559768
ugcuaugcaguacuauccc

SEQ ID NO: 1559770 - RNA, 19 nt, Artificial Sequence
  Description of Artificial Sequence: Synthetic oligonucleotide
  Sense strand starting at position 3823 of SEQ ID NO: 1245399
gauaguacugcauagcauu

SEQ ID NO: 1559771 - RNA, 19 nt, Artificial Sequence
  Description of Artificial Sequence: Synthetic oligonucleotide
  Antisense strand to SEQ ID NO: 1559770
aaugcuaugcaguacuauc

SEQ ID NO: 1559772 - RNA, 19 nt, Artificial Sequence
  Description of Artificial Sequence: Synthetic oligonucleotide
  Sense strand starting at position 174 of SEQ ID NO: 1245400
agcacacagccuuggaaau

SEQ ID NO: 1559773 - RNA, 19 nt, Artificial Sequence
  Description of Artificial Sequence: Synthetic oligonucleotide
  Antisense strand to SEQ ID NO: 1559772
auuuccaaggcugugugcu

SEQ ID NO: 1559774 - RNA, 19 nt, Artificial Sequence
  Description of Artificial Sequence: Synthetic oligonucleotide
  Sense strand starting at position 1984 of SEQ ID NO: 1245400
gccagauugaaacauggca

SEQ ID NO: 1559775 - RNA, 19 nt, Artificial Sequence
  Description of Artificial Sequence: Synthetic oligonucleotide
  Antisense strand to SEQ ID NO: 1559774
ugccauguuucaaucuggc

SEQ ID NO: 1559776 - RNA, 19 nt, Artificial Sequence
  Description of Artificial Sequence: Synthetic oligonucleotide
  Sense strand starting at position 2061 of SEQ ID NO: 1245400
agauguaauagcuaggucu

SEQ ID NO: 1559777 - RNA, 19 nt, Artificial Sequence
  Description of Artificial Sequence: Synthetic oligonucleotide
  Antisense strand to SEQ ID NO: 1559776
agaccuagcuauuacaucu

SEQ ID NO: 1559778 - RNA, 19 nt, Artificial Sequence
  Description of Artificial Sequence: Synthetic oligonucleotide
  Sense strand starting at position 2068 of SEQ ID NO: 1245400
auagcuaggucuuuaaauu

SEQ ID NO: 1559779 - RNA, 19 nt, Artificial Sequence
  Description of Artificial Sequence: Synthetic oligonucleotide
  Antisense strand to SEQ ID NO: 1559778
aauuuaaagaccuagcuau

SEQ ID NO: 1559780 - RNA, 19 nt, Artificial Sequence
  Description of Artificial Sequence: Synthetic oligonucleotide
  Sense strand starting at position 2094 of SEQ ID NO: 1245400
ggagaugguguacaaaugu

SEQ ID NO: 1559781 - RNA, 19 nt, Artificial Sequence
  Description of Artificial Sequence: Synthetic oligonucleotide
  Antisense strand to SEQ ID NO: 1559780
acauuuguacaccaucucc

SEQ ID NO: 1559782 - RNA, 19 nt, Artificial Sequence
  Description of Artificial Sequence: Synthetic oligonucleotide
  Sense strand starting at position 2189 of SEQ ID NO: 1245400
aggucacgaagguguauaa

SEQ ID NO: 1559783 - RNA, 19 nt, Artificial Sequence
  Description of Artificial Sequence: Synthetic oligonucleotide
  Antisense strand to SEQ ID NO: 1559782
uuauacaccuucgugaccu

SEQ ID NO: 1559784 - RNA, 19 nt, Artificial Sequence
  Description of Artificial Sequence: Synthetic oligonucleotide
  Sense strand starting at position 2232 of SEQ ID NO: 1245400
acgauagauuuccauucca

SEQ ID NO: 1559785 - RNA, 19 nt, Artificial Sequence
  Description of Artificial Sequence: Synthetic oligonucleotide
  Antisense strand to SEQ ID NO: 1559784
uggaauggaaaucuaucgu

SEQ ID NO: 1559786 - RNA, 19 nt, Artificial Sequence
  Description of Artificial Sequence: Synthetic oligonucleotide
  Sense strand starting at position 2276 of SEQ ID NO: 1245400
ccguguccucguuccuuua

SEQ ID NO: 1559787 - RNA, 19 nt, Artificial Sequence
  Description of Artificial Sequence: Synthetic oligonucleotide
  Antisense strand to SEQ ID NO: 1559786
uaaaggaacgaggacacgg

SEQ ID NO: 1559788 - RNA, 19 nt, Artificial Sequence
  Description of Artificial Sequence: Synthetic oligonucleotide
  Sense strand starting at position 2303 of SEQ ID NO: 1245400
agacgugcacuccauugaa

SEQ ID NO: 1559789 - RNA, 19 nt, Artificial Sequence
  Description of Artificial Sequence: Synthetic oligonucleotide
  Antisense strand to SEQ ID NO: 1559788
uucaauggagugcacgucu

SEQ ID NO: 1559790 - RNA, 19 nt, Artificial Sequence
  Description of Artificial Sequence: Synthetic oligonucleotide
  Sense strand starting at position 2307 of SEQ ID NO: 1245400
gugcacuccauugaaaggu

SEQ ID NO: 1559791 - RNA, 19 nt, Artificial Sequence
  Description of Artificial Sequence: Synthetic oligonucleotide
  Antisense strand to SEQ ID NO: 1559790
accuuucaauggagugcac

SEQ ID NO: 1559792 - RNA, 19 nt, Artificial Sequence
  Description of Artificial Sequence: Synthetic oligonucleotide
  Sense strand starting at position 2362 of SEQ ID NO: 1245400
uugugcugacacuggaaau

SEQ ID NO: 1559793 - RNA, 19 nt, Artificial Sequence
  Description of Artificial Sequence: Synthetic oligonucleotide
  Antisense strand to SEQ ID NO: 1559792
auuuccagugucagcacaa

SEQ ID NO: 1559794 - RNA, 19 nt, Artificial Sequence
  Description of Artificial Sequence: Synthetic oligonucleotide
  Sense strand starting at position 2363 of SEQ ID NO: 1245400
ugugcugacacuggaaaua

SEQ ID NO: 1559795 - RNA, 19 nt, Artificial Sequence
  Description of Artificial Sequence: Synthetic oligonucleotide
  Antisense strand to SEQ ID NO: 1559794
uauuuccagugucagcaca

SEQ ID NO: 1559796 - RNA, 19 nt, Artificial Sequence
  Description of Artificial Sequence: Synthetic oligonucleotide
  Sense strand starting at position 2481 of SEQ ID NO: 1245400
agcagugaugaccaagcau

SEQ ID NO: 1559797 - RNA, 19 nt, Artificial Sequence
  Description of Artificial Sequence: Synthetic oligonucleotide
  Antisense strand to SEQ ID NO: 1559796
augcuuggucaucacugcu

SEQ ID NO: 1559798 - RNA, 19 nt, Artificial Sequence
  Description of Artificial Sequence: Synthetic oligonucleotide
  Sense strand starting at position 2536 of SEQ ID NO: 1245400
ugguuaguauuugcaaacu

SEQ ID NO: 1559799 - RNA, 19 nt, Artificial Sequence
  Description of Artificial Sequence: Synthetic oligonucleotide
  Antisense strand to SEQ ID NO: 1559798
aguuugcaaauacuaacca

SEQ ID NO: 1559800 - RNA, 19 nt, Artificial Sequence
  Description of Artificial Sequence: Synthetic oligonucleotide
  Sense strand starting at position 2600 of SEQ ID NO: 1245400
guuaacuuccauugaggaa

SEQ ID NO: 1559801 - RNA, 19 nt, Artificial Sequence
  Description of Artificial Sequence: Synthetic oligonucleotide
  Antisense strand to SEQ ID NO: 1559800
uuccucaauggaaguuaac

SEQ ID NO: 1559802 - RNA, 19 nt, Artificial Sequence
  Description of Artificial Sequence: Synthetic oligonucleotide
  Sense strand starting at position 2635 of SEQ ID NO: 1245400
augggagcacuguaugaug

SEQ ID NO: 1559803 - RNA, 19 nt, Artificial Sequence
  Description of Artificial Sequence: Synthetic oligonucleotide
  Antisense strand to SEQ ID NO: 1559802
caucauacagugcucccau

SEQ ID NO: 1559804 - RNA, 19 nt, Artificial Sequence
  Description of Artificial Sequence: Synthetic oligonucleotide
  Sense strand starting at position 2637 of SEQ ID NO: 1245400
gggagcacuguaugaugua

SEQ ID NO: 1559805 - RNA, 19 nt, Artificial Sequence
  Description of Artificial Sequence: Synthetic oligonucleotide
  Antisense strand to SEQ ID NO: 1559804
uacaucauacagugcuccc

SEQ ID NO: 1559806 - RNA, 19 nt, Artificial Sequence
  Description of Artificial Sequence: Synthetic oligonucleotide
  Sense strand starting at position 2690 of SEQ ID NO: 1245400
ucauguaaaugacccgaau

SEQ ID NO: 1559807 - RNA, 19 nt, Artificial Sequence
  Description of Artificial Sequence: Synthetic oligonucleotide
  Antisense strand to SEQ ID NO: 1559806
auucgggucauuuacauga

SEQ ID NO: 1559808 - RNA, 19 nt, Artificial Sequence
  Description of Artificial Sequence: Synthetic oligonucleotide
  Sense strand starting at position 2693 of SEQ ID NO: 1245400
uguaaaugacccgaauuau

SEQ ID NO: 1559809 - RNA, 19 nt, Artificial Sequence
  Description of Artificial Sequence: Synthetic oligonucleotide
  Antisense strand to SEQ ID NO: 1559808
auaauucgggucauuuaca

SEQ ID NO: 1559810 - RNA, 19 nt, Artificial Sequence
  Description of Artificial Sequence: Synthetic oligonucleotide
  Sense strand starting at position 2703 of SEQ ID NO: 1245400
ccgaauuauugucucacag

SEQ ID NO: 1559811 - RNA, 19 nt, Artificial Sequence
  Description of Artificial Sequence: Synthetic oligonucleotide
  Antisense strand to SEQ ID NO: 1559810
cugugagacaauaauucgg

SEQ ID NO: 1559812 - RNA, 19 nt, Artificial Sequence
  Description of Artificial Sequence: Synthetic oligonucleotide
  Sense strand starting at position 2725 of SEQ ID NO: 1245400
aguuguuggucuuuaauuu

SEQ ID NO: 1559813 - RNA, 19 nt, Artificial Sequence
  Description of Artificial Sequence: Synthetic oligonucleotide
  Antisense strand to SEQ ID NO: 1559812
aaauuaaagaccaacaacu

SEQ ID NO: 1559814 - RNA, 19 nt, Artificial Sequence
  Description of Artificial Sequence: Synthetic oligonucleotide
  Sense strand starting at position 2747 of SEQ ID NO: 1245400
acagcaaauuguuuggaau

SEQ ID NO: 1559815 - RNA, 19 nt, Artificial Sequence
  Description of Artificial Sequence: Synthetic oligonucleotide
  Antisense strand to SEQ ID NO: 1559814
auuccaaacaauuugcugu

SEQ ID NO: 1559816 - RNA, 19 nt, Artificial Sequence
  Description of Artificial Sequence: Synthetic oligonucleotide
  Sense strand starting at position 2748 of SEQ ID NO: 1245400
cagcaaauuguuuggaauu

SEQ ID NO: 1559817 - RNA, 19 nt, Artificial Sequence
  Description of Artificial Sequence: Synthetic oligonucleotide
  Antisense strand to SEQ ID NO: 1559816
aauuccaaacaauuugcug

SEQ ID NO: 1559818 - RNA, 19 nt, Artificial Sequence
  Description of Artificial Sequence: Synthetic oligonucleotide
  Sense strand starting at position 2813 of SEQ ID NO: 1245400
agaccuauguaaucugcaa

SEQ ID NO: 1559819 - RNA, 19 nt, Artificial Sequence
  Description of Artificial Sequence: Synthetic oligonucleotide
  Antisense strand to SEQ ID NO: 1559818
uugcagauuacauaggucu

SEQ ID NO: 1559820 - RNA, 19 nt, Artificial Sequence
  Description of Artificial Sequence: Synthetic oligonucleotide
  Sense strand starting at position 2850 of SEQ ID NO: 1245400
ucgcauuuaucagcauuac

SEQ ID NO: 1559821 - RNA, 19 nt, Artificial Sequence
  Description of Artificial Sequence: Synthetic oligonucleotide
  Antisense strand to SEQ ID NO: 1559820
guaaugcugauaaaugcga

SEQ ID NO: 1559822 - RNA, 19 nt, Artificial Sequence
  Description of Artificial Sequence: Synthetic oligonucleotide
  Sense strand starting at position 3032 of SEQ ID NO: 1245400
ugcauugaagaguacacua

SEQ ID NO: 1559823 - RNA, 19 nt, Artificial Sequence
  Description of Artificial Sequence: Synthetic oligonucleotide
  Antisense strand to SEQ ID NO: 1559822
uaguguacucuucaaugca

SEQ ID NO: 1559824 - RNA, 19 nt, Artificial Sequence
  Description of Artificial Sequence: Synthetic oligonucleotide
  Sense strand starting at position 3146 of SEQ ID NO: 1245400
uugggaucuuuguuuacuu

SEQ ID NO: 1559825 - RNA, 19 nt, Artificial Sequence
  Description of Artificial Sequence: Synthetic oligonucleotide
  Antisense strand to SEQ ID NO: 1559824
aaguaaacaaagaucccaa

SEQ ID NO: 1559826 - RNA, 19 nt, Artificial Sequence
  Description of Artificial Sequence: Synthetic oligonucleotide
  Sense strand starting at position 3147 of SEQ ID NO: 1245400
ugggaucuuuguuuacuua

SEQ ID NO: 1559827 - RNA, 19 nt, Artificial Sequence
  Description of Artificial Sequence: Synthetic oligonucleotide
  Antisense strand to SEQ ID NO: 1559826
uaaguaaacaaagauccca

SEQ ID NO: 1559828 - RNA, 19 nt, Artificial Sequence
  Description of Artificial Sequence: Synthetic oligonucleotide
  Sense strand starting at position 3151 of SEQ ID NO: 1245400
aucuuuguuuacuuagaag

SEQ ID NO: 1559829 - RNA, 19 nt, Artificial Sequence
  Description of Artificial Sequence: Synthetic oligonucleotide
  Antisense strand to SEQ ID NO: 1559828
cuucuaaguaaacaaagau

SEQ ID NO: 1559830 - RNA, 19 nt, Artificial Sequence
  Description of Artificial Sequence: Synthetic oligonucleotide
  Sense strand starting at position 3226 of SEQ ID NO: 1245400
gcacuugaaugguuacaag

SEQ ID NO: 1559831 - RNA, 19 nt, Artificial Sequence
  Description of Artificial Sequence: Synthetic oligonucleotide
  Antisense strand to SEQ ID NO: 1559830
cuuguaaccauucaagugc

SEQ ID NO: 1559832 - RNA, 19 nt, Artificial Sequence
  Description of Artificial Sequence: Synthetic oligonucleotide
  Sense strand starting at position 3236 of SEQ ID NO: 1245400
gguuacaagaguuguacua

SEQ ID NO: 1559833 - RNA, 19 nt, Artificial Sequence
  Description of Artificial Sequence: Synthetic oligonucleotide
  Antisense strand to SEQ ID NO: 1559832
uaguacaacucuuguaacc

SEQ ID NO: 1559834 - RNA, 19 nt, Artificial Sequence
  Description of Artificial Sequence: Synthetic oligonucleotide
  Sense strand starting at position 3266 of SEQ ID NO: 1245400
gucugaaaugcuuaucaua

SEQ ID NO: 1559835 - RNA, 19 nt, Artificial Sequence
  Description of Artificial Sequence: Synthetic oligonucleotide
  Antisense strand to SEQ ID NO: 1559834
uaugauaagcauuucagac

SEQ ID NO: 1559836 - RNA, 19 nt, Artificial Sequence
  Description of Artificial Sequence: Synthetic oligonucleotide
  Sense strand starting at position 3548 of SEQ ID NO: 1245400
cagguagaccaguaguuaa

SEQ ID NO: 1559837 - RNA, 19 nt, Artificial Sequence
  Description of Artificial Sequence: Synthetic oligonucleotide
  Antisense strand to SEQ ID NO: 1559836
uuaacuacuggucuaccug

SEQ ID NO: 1559838 - RNA, 19 nt, Artificial Sequence
  Description of Artificial Sequence: Synthetic oligonucleotide
  Sense strand starting at position 3628 of SEQ ID NO: 1245400
gcauuuauucuggguuguu

SEQ ID NO: 1559839 - RNA, 19 nt, Artificial Sequence
  Description of Artificial Sequence: Synthetic oligonucleotide
  Antisense strand to SEQ ID NO: 1559838
aacaacccagaauaaaugc

SEQ ID NO: 1559840 - RNA, 19 nt, Artificial Sequence
  Description of Artificial Sequence: Synthetic oligonucleotide
  Sense strand starting at position 3629 of SEQ ID NO: 1245400
cauuuauucuggguuguuu

SEQ ID NO: 1559841 - RNA, 19 nt, Artificial Sequence
  Description of Artificial Sequence: Synthetic oligonucleotide
  Antisense strand to SEQ ID NO: 1559840
aaacaacccagaauaaaug

SEQ ID NO: 1559842 - RNA, 19 nt, Artificial Sequence
  Description of Artificial Sequence: Synthetic oligonucleotide
  Sense strand starting at position 3740 of SEQ ID NO: 1245400
cucugcuuugagcaacaau

SEQ ID NO: 1559843 - RNA, 19 nt, Artificial Sequence
  Description of Artificial Sequence: Synthetic oligonucleotide
  Antisense strand to SEQ ID NO: 1559842
auuguugcucaaagcagag

SEQ ID NO: 1559844 - RNA, 19 nt, Artificial Sequence
  Description of Artificial Sequence: Synthetic oligonucleotide
  Sense strand starting at position 3743 of SEQ ID NO: 1245400
ugcuuugagcaacaauaga

SEQ ID NO: 1559845 - RNA, 19 nt, Artificial Sequence
  Description of Artificial Sequence: Synthetic oligonucleotide
  Antisense strand to SEQ ID NO: 1559844
ucuauuguugcucaaagca

SEQ ID NO: 1559846 - RNA, 19 nt, Artificial Sequence
  Description of Artificial Sequence: Synthetic oligonucleotide
  Sense strand starting at position 3766 of SEQ ID NO: 1245400
gucacucgacugcaagaau

SEQ ID NO: 1559847 - RNA, 19 nt, Artificial Sequence
  Description of Artificial Sequence: Synthetic oligonucleotide
  Antisense strand to SEQ ID NO: 1559846
auucuugcagucgagugac

SEQ ID NO: 1559848 - RNA, 19 nt, Artificial Sequence
  Description of Artificial Sequence: Synthetic oligonucleotide
  Sense strand starting at position 3803 of SEQ ID NO: 1245400
gagugcagucgauaaggaa

SEQ ID NO: 1559849 - RNA, 19 nt, Artificial Sequence
  Description of Artificial Sequence: Synthetic oligonucleotide
  Antisense strand to SEQ ID NO: 1559848
uuccuuaucgacugcacuc

SEQ ID NO: 1559850 - RNA, 19 nt, Artificial Sequence
  Description of Artificial Sequence: Synthetic oligonucleotide
  Sense strand starting at position 3939 of SEQ ID NO: 1245400
cuccaaucaguguauugca

SEQ ID NO: 1559851 - RNA, 19 nt, Artificial Sequence
  Description of Artificial Sequence: Synthetic oligonucleotide
  Antisense strand to SEQ ID NO: 1559850
ugcaauacacugauuggag

SEQ ID NO: 1559852 - RNA, 19 nt, Artificial Sequence
  Description of Artificial Sequence: Synthetic oligonucleotide
  Sense strand starting at position 42 of SEQ ID NO: 1245401
uauuauuagucaguaugga

SEQ ID NO: 1559853 - RNA, 19 nt, Artificial Sequence
  Description of Artificial Sequence: Synthetic oligonucleotide
  Antisense strand to SEQ ID NO: 1559852
uccauacugacuaauaaua

SEQ ID NO: 1559854 - RNA, 19 nt, Artificial Sequence
  Description of Artificial Sequence: Synthetic oligonucleotide
  Sense strand starting at position 201 of SEQ ID NO: 1245401
guacaucuaccaugagaga

SEQ ID NO: 1559855 - RNA, 19 nt, Artificial Sequence
  Description of Artificial Sequence: Synthetic oligonucleotide
  Antisense strand to SEQ ID NO: 1559854
ucucucaugguagauguac

SEQ ID NO: 1559856 - RNA, 19 nt, Artificial Sequence
  Description of Artificial Sequence: Synthetic oligonucleotide
  Sense strand starting at position 244 of SEQ ID NO: 1245401
uaaagacguguguacauga

SEQ ID NO: 1559857 - RNA, 19 nt, Artificial Sequence
  Description of Artificial Sequence: Synthetic oligonucleotide
  Antisense strand to SEQ ID NO: 1559856
ucauguacacacgucuuua

SEQ ID NO: 1559858 - RNA, 19 nt, Artificial Sequence
  Description of Artificial Sequence: Synthetic oligonucleotide
  Sense strand starting at position 310 of SEQ ID NO: 1245401
ugcccaugaacuggugauu

SEQ ID NO: 1559859 - RNA, 19 nt, Artificial Sequence
  Description of Artificial Sequence: Synthetic oligonucleotide
  Antisense strand to SEQ ID NO: 1559858
aaucaccaguucaugggca

SEQ ID NO: 1559860 - RNA, 19 nt, Artificial Sequence
  Description of Artificial Sequence: Synthetic oligonucleotide
  Sense strand starting at position 455 of SEQ ID NO: 1245401
caaggacauucuguaugau

SEQ ID NO: 1559861 - RNA, 19 nt, Artificial Sequence
  Description of Artificial Sequence: Synthetic oligonucleotide
  Antisense strand to SEQ ID NO: 1559860
aucauacagaauguccuug

SEQ ID NO: 1559862 - RNA, 19 nt, Artificial Sequence
  Description of Artificial Sequence: Synthetic oligonucleotide
  Sense strand starting at position 607 of SEQ ID NO: 1245401
uuugauugcagugauaguu

SEQ ID NO: 1559863 - RNA, 19 nt, Artificial Sequence
  Description of Artificial Sequence: Synthetic oligonucleotide
  Antisense strand to SEQ ID NO: 1559862
aacuaucacugcaaucaaa

SEQ ID NO: 1559864 - RNA, 19 nt, Artificial Sequence
  Description of Artificial Sequence: Synthetic oligonucleotide
  Sense strand starting at position 1103 of SEQ ID NO: 1245401
uccucuuacgguuauauua

SEQ ID NO: 1559865 - RNA, 19 nt, Artificial Sequence
  Description of Artificial Sequence: Synthetic oligonucleotide
  Antisense strand to SEQ ID NO: 1559864
uaauauaaccguaagagga

SEQ ID NO: 1559866 - RNA, 19 nt, Artificial Sequence
  Description of Artificial Sequence: Synthetic oligonucleotide
  Sense strand starting at position 1116 of SEQ ID NO: 1245401
auauuaagggcuuagucau

SEQ ID NO: 1559867 - RNA, 19 nt, Artificial Sequence
  Description of Artificial Sequence: Synthetic oligonucleotide
  Antisense strand to SEQ ID NO: 1559866
augacuaagcccuuaauau

SEQ ID NO: 1559868 - RNA, 19 nt, Artificial Sequence
  Description of Artificial Sequence: Synthetic oligonucleotide
  Sense strand starting at position 1395 of SEQ ID NO: 1245401
ucacccugaucagugagaa

SEQ ID NO: 1559869 - RNA, 19 nt, Artificial Sequence
  Description of Artificial Sequence: Synthetic oligonucleotide
  Antisense strand to SEQ ID NO: 1559868
uucucacugaucaggguga

SEQ ID NO: 1559870 - RNA, 19 nt, Artificial Sequence
  Description of Artificial Sequence: Synthetic oligonucleotide
  Sense strand starting at position 1396 of SEQ ID NO: 1245401
cacccugaucagugagaau

SEQ ID NO: 1559871 - RNA, 19 nt, Artificial Sequence
  Description of Artificial Sequence: Synthetic oligonucleotide
  Antisense strand to SEQ ID NO: 1559870
auucucacugaucagggug

SEQ ID NO: 1559872 - RNA, 19 nt, Artificial Sequence
  Description of Artificial Sequence: Synthetic oligonucleotide
  Sense strand starting at position 1446 of SEQ ID NO: 1245401
guacccuuucuagauugca

SEQ ID NO: 1559873 - RNA, 19 nt, Artificial Sequence
  Description of Artificial Sequence: Synthetic oligonucleotide
  Antisense strand to SEQ ID NO: 1559872
ugcaaucuagaaaggguac

SEQ ID NO: 1559874 - RNA, 19 nt, Artificial Sequence
  Description of Artificial Sequence: Synthetic oligonucleotide
  Sense strand starting at position 1517 of SEQ ID NO: 1245401
cacuuauuucuugggcagu

SEQ ID NO: 1559875 - RNA, 19 nt, Artificial Sequence
  Description of Artificial Sequence: Synthetic oligonucleotide
  Antisense strand to SEQ ID NO: 1559874
acugcccaagaaauaagug

SEQ ID NO: 1559876 - RNA, 19 nt, Artificial Sequence
  Description of Artificial Sequence: Synthetic oligonucleotide
  Sense strand starting at position 1726 of SEQ ID NO: 1245401
ggaagaaaguuagaauuaa

SEQ ID NO: 1559877 - RNA, 19 nt, Artificial Sequence
  Description of Artificial Sequence: Synthetic oligonucleotide
  Antisense strand to SEQ ID NO: 1559876
uuaauucuaacuuucuucc

SEQ ID NO: 1559878 - RNA, 19 nt, Artificial Sequence
  Description of Artificial Sequence: Synthetic oligonucleotide
  Sense strand starting at position 1752 of SEQ ID NO: 1245401
cuacgaaucagauaagcga

SEQ ID NO: 1559879 - RNA, 19 nt, Artificial Sequence
  Description of Artificial Sequence: Synthetic oligonucleotide
  Antisense strand to SEQ ID NO: 1559878
ucgcuuaucugauucguag

SEQ ID NO: 1559880 - RNA, 19 nt, Artificial Sequence
  Description of Artificial Sequence: Synthetic oligonucleotide
  Sense strand starting at position 1809 of SEQ ID NO: 1245401
uaagaacuuguauguagua

SEQ ID NO: 1559881 - RNA, 19 nt, Artificial Sequence
  Description of Artificial Sequence: Synthetic oligonucleotide
  Antisense strand to SEQ ID NO: 1559880
uacuacauacaaguucuua

SEQ ID NO: 1559882 - RNA, 19 nt, Artificial Sequence
  Description of Artificial Sequence: Synthetic oligonucleotide
  Sense strand starting at position 1810 of SEQ ID NO: 1245401
aagaacuuguauguaguaa

SEQ ID NO: 1559883 - RNA, 19 nt, Artificial Sequence
  Description of Artificial Sequence: Synthetic oligonucleotide
  Antisense strand to SEQ ID NO: 1559882
uuacuacauacaaguucuu

SEQ ID NO: 1559884 - RNA, 19 nt, Artificial Sequence
  Description of Artificial Sequence: Synthetic oligonucleotide
  Sense strand starting at position 1846 of SEQ ID NO: 1245401
cagagagcuuucccgaaag

SEQ ID NO: 1559885 - RNA, 19 nt, Artificial Sequence
  Description of Artificial Sequence: Synthetic oligonucleotide
  Antisense strand to SEQ ID NO: 1559884
cuuucgggaaagcucucug

SEQ ID NO: 1559886 - RNA, 19 nt, Artificial Sequence
  Description of Artificial Sequence: Synthetic oligonucleotide
  Sense strand starting at position 1848 of SEQ ID NO: 1245401
gagagcuuucccgaaagau

SEQ ID NO: 1559887 - RNA, 19 nt, Artificial Sequence
  Description of Artificial Sequence: Synthetic oligonucleotide
  Antisense strand to SEQ ID NO: 1559886
aucuuucgggaaagcucuc

SEQ ID NO: 1559888 - RNA, 19 nt, Artificial Sequence
  Description of Artificial Sequence: Synthetic oligonucleotide
  Sense strand starting at position 2154 of SEQ ID NO: 1245401
ugaugucggcucgcggaua

SEQ ID NO: 1559889 - RNA, 19 nt, Artificial Sequence
  Description of Artificial Sequence: Synthetic oligonucleotide
  Antisense strand to SEQ ID NO: 1559888
uauccgcgagccgacauca

SEQ ID NO: 1559890 - RNA, 19 nt, Artificial Sequence
  Description of Artificial Sequence: Synthetic oligonucleotide
  Sense strand starting at position 2165 of SEQ ID NO: 1245401
cgcggauagcagaggaguu

SEQ ID NO: 1559891 - RNA, 19 nt, Artificial Sequence
  Description of Artificial Sequence: Synthetic oligonucleotide
  Antisense strand to SEQ ID NO: 1559890
aacuccucugcuauccgcg

SEQ ID NO: 1559892 - RNA, 19 nt, Artificial Sequence
  Description of Artificial Sequence: Synthetic oligonucleotide
  Sense strand starting at position 2175 of SEQ ID NO: 1245401
agaggaguuccgggugauc

SEQ ID NO: 1559893 - RNA, 19 nt, Artificial Sequence
  Description of Artificial Sequence: Synthetic oligonucleotide
  Antisense strand to SEQ ID NO: 1559892
gaucacccggaacuccucu

SEQ ID NO: 1559894 - RNA, 19 nt, Artificial Sequence
  Description of Artificial Sequence: Synthetic oligonucleotide
  Sense strand starting at position 2187 of SEQ ID NO: 1245401
ggugaucuugccuaacgag

SEQ ID NO: 1559895 - RNA, 19 nt, Artificial Sequence
  Description of Artificial Sequence: Synthetic oligonucleotide
  Antisense strand to SEQ ID NO: 1559894
cucguuaggcaagaucacc

SEQ ID NO: 1559896 - RNA, 19 nt, Artificial Sequence
  Description of Artificial Sequence: Synthetic oligonucleotide
  Sense strand starting at position 2223 of SEQ ID NO: 1245401
uuucucgaguccuuggaga

SEQ ID NO: 1559897 - RNA, 19 nt, Artificial Sequence
  Description of Artificial Sequence: Synthetic oligonucleotide
  Antisense strand to SEQ ID NO: 1559896
ucuccaaggacucgagaaa

SEQ ID NO: 1559898 - RNA, 19 nt, Artificial Sequence
  Description of Artificial Sequence: Synthetic oligonucleotide
  Sense strand starting at position 2228 of SEQ ID NO: 1245401
cgaguccuuggagagugaa

SEQ ID NO: 1559899 - RNA, 19 nt, Artificial Sequence
  Description of Artificial Sequence: Synthetic oligonucleotide
  Antisense strand to SEQ ID NO: 1559898
uucacucuccaaggacucg

SEQ ID NO: 1559900 - RNA, 19 nt, Artificial Sequence
  Description of Artificial Sequence: Synthetic oligonucleotide
  Sense strand starting at position 2271 of SEQ ID NO: 1245401
cggagagacgauugguuca

SEQ ID NO: 1559901 - RNA, 19 nt, Artificial Sequence
  Description of Artificial Sequence: Synthetic oligonucleotide
  Antisense strand to SEQ ID NO: 1559900
ugaaccaaucgucucuccg

SEQ ID NO: 1559902 - RNA, 19 nt, Artificial Sequence
  Description of Artificial Sequence: Synthetic oligonucleotide
  Sense strand starting at position 2293 of SEQ ID NO: 1245401
ccuaguguucgguuuguuc

SEQ ID NO: 1559903 - RNA, 19 nt, Artificial Sequence
  Description of Artificial Sequence: Synthetic oligonucleotide
  Antisense strand to SEQ ID NO: 1559902
gaacaaaccgaacacuagg

SEQ ID NO: 1559904 - RNA, 19 nt, Artificial Sequence
  Description of Artificial Sequence: Synthetic oligonucleotide
  Sense strand starting at position 2518 of SEQ ID NO: 1245401
aguguuaaccacuagaauu

SEQ ID NO: 1559905 - RNA, 19 nt, Artificial Sequence
  Description of Artificial Sequence: Synthetic oligonucleotide
  Antisense strand to SEQ ID NO: 1559904
aauucuagugguuaacacu

SEQ ID NO: 1559906 - RNA, 19 nt, Artificial Sequence
  Description of Artificial Sequence: Synthetic oligonucleotide
  Sense strand starting at position 2556 of SEQ ID NO: 1245401
cugcguuaucuuuccaguu

SEQ ID NO: 1559907 - RNA, 19 nt, Artificial Sequence
  Description of Artificial Sequence: Synthetic oligonucleotide
  Antisense strand to SEQ ID NO: 1559906
aacuggaaagauaacgcag

SEQ ID NO: 1559908 - RNA, 19 nt, Artificial Sequence
  Description of Artificial Sequence: Synthetic oligonucleotide
  Sense strand starting at position 2609 of SEQ ID NO: 1245401
guuugaacaucucuagacu

SEQ ID NO: 1559909 - RNA, 19 nt, Artificial Sequence
  Description of Artificial Sequence: Synthetic oligonucleotide
  Antisense strand to SEQ ID NO: 1559908
agucuagagauguucaaac

SEQ ID NO: 1559910 - RNA, 19 nt, Artificial Sequence
  Description of Artificial Sequence: Synthetic oligonucleotide
  Sense strand starting at position 2987 of SEQ ID NO: 1245401
ggugagaggcaggguauua

SEQ ID NO: 1559911 - RNA, 19 nt, Artificial Sequence
  Description of Artificial Sequence: Synthetic oligonucleotide
  Antisense strand to SEQ ID NO: 1559910
uaauacccugccucucacc

SEQ ID NO: 1559912 - RNA, 19 nt, Artificial Sequence
  Description of Artificial Sequence: Synthetic oligonucleotide
  Sense strand starting at position 2997 of SEQ ID NO: 1245401
aggguauuauaucuuucuu

SEQ ID NO: 1559913 - RNA, 19 nt, Artificial Sequence
  Description of Artificial Sequence: Synthetic oligonucleotide
  Antisense strand to SEQ ID NO: 1559912
aagaaagauauaauacccu

SEQ ID NO: 1559914 - RNA, 19 nt, Artificial Sequence
  Description of Artificial Sequence: Synthetic oligonucleotide
  Sense strand starting at position 2999 of SEQ ID NO: 1245401
gguauuauaucuuucuuag

SEQ ID NO: 1559915 - RNA, 19 nt, Artificial Sequence
  Description of Artificial Sequence: Synthetic oligonucleotide
  Antisense strand to SEQ ID NO: 1559914
cuaagaaagauauaauacc

SEQ ID NO: 1559916 - RNA, 19 nt, Artificial Sequence
  Description of Artificial Sequence: Synthetic oligonucleotide
  Sense strand starting at position 3100 of SEQ ID NO: 1245401
guauuaccucuuuagugua

SEQ ID NO: 1559917 - RNA, 19 nt, Artificial Sequence
  Description of Artificial Sequence: Synthetic oligonucleotide
  Antisense strand to SEQ ID NO: 1559916
uacacuaaagagguaauac

SEQ ID NO: 1559918 - RNA, 19 nt, Artificial Sequence
  Description of Artificial Sequence: Synthetic oligonucleotide
  Sense strand starting at position 3218 of SEQ ID NO: 1245401
guauaaugaccucauugcu

SEQ ID NO: 1559919 - RNA, 19 nt, Artificial Sequence
  Description of Artificial Sequence: Synthetic oligonucleotide
  Antisense strand to SEQ ID NO: 1559918
agcaaugaggucauuauac

SEQ ID NO: 1559920 - RNA, 19 nt, Artificial Sequence
  Description of Artificial Sequence: Synthetic oligonucleotide
  Sense strand starting at position 3342 of SEQ ID NO: 1245401
uccaguaaguuacucauau

SEQ ID NO: 1559921 - RNA, 19 nt, Artificial Sequence
  Description of Artificial Sequence: Synthetic oligonucleotide
  Antisense strand to SEQ ID NO: 1559920
auaugaguaacuuacugga

SEQ ID NO: 1559922 - RNA, 19 nt, Artificial Sequence
  Description of Artificial Sequence: Synthetic oligonucleotide
  Sense strand starting at position 3343 of SEQ ID NO: 1245401
ccaguaaguuacucauaua

SEQ ID NO: 1559923 - RNA, 19 nt, Artificial Sequence
  Description of Artificial Sequence: Synthetic oligonucleotide
  Antisense strand to SEQ ID NO: 1559922
uauaugaguaacuuacugg

SEQ ID NO: 1559924 - RNA, 19 nt, Artificial Sequence
  Description of Artificial Sequence: Synthetic oligonucleotide
  Sense strand starting at position 3432 of SEQ ID NO: 1245401
aucuauguauuacuccaga

SEQ ID NO: 1559925 - RNA, 19 nt, Artificial Sequence
  Description of Artificial Sequence: Synthetic oligonucleotide
  Antisense strand to SEQ ID NO: 1559924
ucuggaguaauacauagau

SEQ ID NO: 1559926 - RNA, 19 nt, Artificial Sequence
  Description of Artificial Sequence: Synthetic oligonucleotide
  Sense strand starting at position 3806 of SEQ ID NO: 1245401
guuaaugucucauugauga

SEQ ID NO: 1559927 - RNA, 19 nt, Artificial Sequence
  Description of Artificial Sequence: Synthetic oligonucleotide
  Antisense strand to SEQ ID NO: 1559926
ucaucaaugagacauuaac

SEQ ID NO: 1559928 - RNA, 19 nt, Artificial Sequence
  Description of Artificial Sequence: Synthetic oligonucleotide
  Sense strand starting at position 3811 of SEQ ID NO: 1245401
ugucucauugaugaaagca

SEQ ID NO: 1559929 - RNA, 19 nt, Artificial Sequence
  Description of Artificial Sequence: Synthetic oligonucleotide
  Antisense strand to SEQ ID NO: 1559928
ugcuuucaucaaugagaca

SEQ ID NO: 1559930 - RNA, 19 nt, Artificial Sequence
  Description of Artificial Sequence: Synthetic oligonucleotide
  Sense strand starting at position 3843 of SEQ ID NO: 1245401
guucuaaagucauuauaga

SEQ ID NO: 1559931 - RNA, 19 nt, Artificial Sequence
  Description of Artificial Sequence: Synthetic oligonucleotide
  Antisense strand to SEQ ID NO: 1559930
ucuauaaugacuuuagaac

SEQ ID NO: 1559932 - DNA, 4001 bp, Homo sapiens
gttcaggtgaaagaagatgcgatctgggctggtgctgctcctgggtaccagcagctctttctccccgcgccgtagctggaagtccactccactcaggggagccacgcaggtgagggtcaccttgttgccagggtgcaggacctgggaggactctccatggtgcatcagcacaggcggtggtggtgcagctgcaatgcaggcagcattactaggctgccccatccctggagctgccctctgcccagtccccagacctctgccctccgggtggcaatcccaggaacacccttccattcttttttttttttttttttgaaacggagtttcgctcttgttgcccaggctggagtgcagtggcgccactcagctcactgcaagctctgcctcccaggttcaagggattctcctgcctcagcctcctgagtagctggtactacaggcacctgccaccacacctggctaatttttgtatttttagtagagacggggtttcgtcatgttgggtagactggtctcgatctcttgacctcatgatccgctggcctcagcctcccaaagtgctgggattataggcgtgagccaccgcacccggcctcacccttccattctttgggcatcctctgcccaaactcctttgcaaccatcagacccaggcaaccgtgtggccagcttcctggacctggtcctgggcaaggacattcagcatggaggtcaggatgaatgtggtcatgccccctgtatcctcctcccccagcagcccccagagatggttcccacagtcaccgagctcctcaatggtcacagtagcgctgggctcagagagggcgccttccccatcggtccggtagctgcagctgtagttgccaggctgatggactggaaaggtggcctccacatcctcctgggcctcaggcacctccagaaactcatggtcgccctcccgcctcagcagaaaagtcacaccccgcagcacacctcggcacactgctgttgttttcaggccgggggtgatccaggacactggcgccatcgagagccagggagcaggcaaggactctgtgggtggggtggagttgaagagtgcttctgcataacaggagacgtgggaagcccagcagaacctgggccccacactcataagactgtgaaggagacagggatggagggcattgctgggaaaaggcaggcaggcaccagtggaaacaaggcatacggcaagagaaaaagagtgtgtgggagctgtacggcatgccgggcctgctggggacacaaccatgtattccttacaacacagacatcatccccatttgacagatgggaagattggggcttggggctcagagacatcgggtgacttggaggaagggagaccccccagtcaacaacctacccactgcctcctggcccccaattcatgccccggctcacttggccctgtcagctccaggagcttgctcagctgggtccatcctgtggacaagcccgagcggcagcggtagcggccctgggtgtcacccgtcagcaggaactggtgcttgatggcaggtgagtcaaggtgcacaggctcctgggccaccccattcttgaacagctggaagtctggagtctccaggtgggcctggcacgtcagcgtcacattggccaagggtttcagcagtgattcggactctgcccacaggctgggctgcgtctcataaactgcaaggggtggctgggatcagctcagtgccacagagacagggctcccccccggcctgggcccaccattcccagacctcacccctgcactcacatatggctgcttctgtcactgggccccaggtgacacctgcggagacagcccccgtaaggctcctgttcccgccccctcccgccccagggacccagaccccaggaggcctcaccccacagcaagagaaagaccacgagcatggacatgatggtcgcgctcactccggtgcagtgagtgtctggggtgagcgtctgcagcaatgaggccccaagggagggcggtggggtggctcgggcactgacctcttcccgtgtttgtccttcccggaaggcgggggcagggcccccatggggtcagggcaaagggtgaacttctgaggcctcaggatgcccagcaacaattataatcaataatcatgtatgattaataaactaaatcaagagtgataaaatgatgttaaaaccacctcatcctcatttcagtgatggatcctagaacctgttctagaaggagacgctgagttctccccactctacctggagctgctgaggtcaagtggagagtgccggggctgaagcccagcgagcccctccctgtcacaccacactgcacatgtgacaccaaaggtggggttcacctcttttcagactttctgcggttgccctcacatgggctgtctggaggtgcaccctcactcttcctgaggactgtggttccttctccatcactggttcattctgcatggtgtgacccaccacggctctggagtcggatttccacccaggtcattcagctgagacctgcgcttcccaggcctacccgtgacatgtgctcagttacctgagctgctggtggtcactcatgtggctatagcctgctgcctggaggccaggcctcccgcttcccctgcctccccctctcctcaccacagcctgttgggatggaacaggacaggggtgagaccgtggtgctttcacactcagcctccatggacatcctgtcattcccacccggggaggtctggtccccaccctgggtgtcccagcctagctccgctacgagtgtgagggcccagggcaaccgcctagccctcatctgccccctgcactgcatcctccccactcattcattccacaggcatttattgagcatctactgtgtgccagatgcaaagaagacagtgggataactgggcaaggagcattccaggcagagggaacagccagtgcaaacatgggagatgcgggtgcagtgagaaggagcagaggagaccaggagttgaggcgactgcagagcgattgcagagctcatagacgtgatgaagaccagctgggcactgcagcggctctggcttctgctgtgagggacggggagctgtggagactccctctgtttggtcccatttccatattgctgagcacctgctgcatgctctctgtcctgctcagagccagtacctggatggaggctgtgtgttctgggtggactgggggagaatgcattctttgcagaagagacaaccaggtgctgaggcctgaagtcataaccagacctggggcactcagacaaggactggtggccaggccagaggagcagagctcagggtgtgcacagaactcagaagtcagaccactgaacagtgacagaacctttcagcccattggcaatgaggctgcccaggcagccagaggcctggtcaaatctgaggtctgcagagatggagctgtcattctgtgtttcctttggcagtcccaacaccagcctcgttgcaccctcctcttagcttccctgggttctccagccctaagggtggtagcagcttcctgcaagtatccagctctgagattctgcaacatccacttttgctctctgagccttgcaaaacctgcacaatcagtccctaacttatatcccctctgtttgaaatacctagtgtggtttctatttcctgacttgactctgactggtgtggtacttggtataaagaaggttccctggccaggtgcggtggctcacgcctataatcccaacgctttgggaggctgaggcaggaggatcacttgagcccaggagttttgagacccgcctaggcaacatggtgagacactgtccttacaaaaaattttaaaattagccaggtgtagtgacgcaagtctgtcatcccagctgcttgggaggctgaggtgggaggatcacctgagcctaagaagtcgcggctgcaataaacagtgattgcaccactgcactccagcctgggtgacagagtgaa

SEQ ID NO: 1559933 - DNA, 4001 bp, Homo sapiens
tcccagcacagtgcgggcatcggctagcagccgggagaccctggggacagagagagggcaggaggcggggttccggccggcactgcagccccgagtttgcaggccggccgcacccactgcctctggctcacagggagtcgttgaagttgctcaggcgcccgggctcctcgcccggtgtcagctgcggaaagcaggtgttgttcacattacagatgagaccctggagccagggcacggtgcccgccgatggcagtggcttgtttgggaagtggcctgcggggagacgcctggtgctgaggccctgtggactctgcctgactccacccccatcgggtcgcccggcaccgcttgcatgcctccagcgatggagagctcactcccatgccatgtattggcggcctggtgaaggctccctgacatgcacgggggattcctgtgcacgggtgagccatctgccttcccctacacacacaaagtgcctggtccctgggggggctcacattcatggtgctccaggggcgggtgggagtggcgaacagccaccaggatgaagaagaggaagagaggccacagcaattcgaccaggagctggacctgggggagaataggtgggagacggtgggggacagtgggggctgcctgcccacccggccctggtctcacactggggcgttaccggctgtctccggcgatacatgaaattcttccagagcagcagcatcagctgtgtccagaaggccatggtgagactgggcaggggacgggacagagaggtcaggacaacggtcgggctgaagacgtgcggtgcggctgcgggcaactccctgcccctttctgaacctcattcctttatcccacagcgcagggttcctggaagctctgattagagcgaggcaaacagtagtcactcgataaagaggctccgctaccccaggggtggagtaaaccaatgggagcgcaacccgcagccgtcctcgcatctgattggctgccaggactgtcgctctgagcagggctgacagctggggacttaaagatcatcctctaatcctccagggaccgagtttgggcttaacgctttcgtcaccaggctccaccccaagcctcacctggaagcctcttccaggtcctgacccccagcctcctgcctggcccagcccaggcaaggattcctttcccctcactgttctccgaagataacagcaacgaatattggcagtgctggacatttcacacgcccaggggaagtgctggactatcaccccactctacagaagtggaaaccgaggcccaagaaagcaaacccaggcacccagagagacaggcagttgcccagctggaggcacgaccccagctctgcccacaccttatgtagcattaatcgctcagagggaccgcgggagccagagaaagagtcaggcgaaggggctgggatagagactcctggagtcagcgattcctgatctattttccttgggccggtccacctctgacacagatggagaatctgacgctgacagaggggcaggaagttgctaaaggtgaccaggccggaactgggacctcagacccagacccttacgccagggttctttcctttacatcaagcgggacttaggatctgggggagtgggctcagtttctccatttgtaagacggggcaagggggagtgcaggagttctaacgggcagggggctgcaggtgtgtgatcggcaaaggccctcttaagggtcccagatgtccgatgccccccttgagaatcagtgatcaattcagccgtcgtcaacattcaccggaaggaggtcagaggctggaccccctaattcccagggaacttgcatccctcccggccccaaccccgcattctcgagtctcgggccttcttccctctccgagtccttctcaccttccaggggctccgcagctcttgccgccttccctccgcccagcagcaggcagggagcgcgccgccccttaagccaagtgcgctgagcttgcccgcgcaggtagcagcgccggggcacgcccctgcctctgcacgctgctattgggcgacctgcccgtcactcactggcctgctccgtcggagctgcgcgggccaagggaggagacgggatcacagaagggcctcgcctagccgggtttcttaaagggaccgcgcggctcttgctgcatcaccgtagggtggcggagtgcccggcaggtcccaggcaggccgccctccgggaacgaggctgcgctgtctttggggagccaggctgcctccccacgttgtataaccggctgcaataccgcagctccgaattgcaggagttccctctgtccccgctgtccccggggctggccaggctccctctagtttagtccagactctgggactacactcgtccgtctgtaaagtaggggttccactagatcattcgttcattcattcattccacgaacgctcctcggcttctgcagaggatggcaggagggggagggggccaacattctagagtctccgattatagtggctaccctgattttgaggaaaacccgtttcccactctggaagaagagttgaaataaactcttcaggctggaggtgaagctgaaatgggagcgtgtgggtccacagctttgaaggcgctggggagagtgagaggcgtggggacggctcccgcggcaggaggtggcattgccgttggggctttgaggataaataggagttcgccaacggggagacatccaggctgaggccacgagacttgcgctgtaaggtagagtgcagccaaagcgcatggggggcatttgagggaactgcctcttctccaaatggccaggaagcccagcctctccctctaccccaagtcccggcccttcaaatcattcattccacccagactcacctgtggcttcagcttttgctcctcctcccaatggtgaggtggacattttccccttgatccccccatcccccaagacctcctctctccccacaaaagcatcaaagcaaagcacgccctcatcgacgccaactctcttggccaccttctcttcgtacaaacagaggttttattgcgtttggtccacagtcgtatttcacattatctcacggagcaggtcccctgggtggggggtccctgtgcagtacttggcggggcatgtggccggggaagatggagcagtataagctggtcgggcccagaagggaggagggctgggggctccttaaaacctactgaggggctgggcacggtggctcacacctgtaatctcagcgcttggggaggcggaggcgggcggatcacacctgaggccaggagttcgagaccagcctggccaacatggggaaaccccatctctactaaaaatacaaaaattagccgggcgtggtggagcacctgcagtcctagctactcaggaggctgaggctggagaatcgcttgagcccggaaggtggaggtgcagtgagccaagatggcgccactgcactccagcctgggcaacaaccacaactgaaaaaaaaatctactgaggccagagtgggttggggcggggagcatggagagggggtcaggcttagccccaacaactcagaatttcacttccttgtacggccctcactttctccacctggccccggggcaggtctgagggtctgaagtctgttggtctgaaggtcctaggcaaatccagtcacttgggagccggagatatttaacatcacggcccggtcccctttcccaggggactcatttcctagcactctctccactgtccttgccccacccctgggggaaaaaatgtatttttcttttgtgaatacttcctgaaacttgcgggcatagaaaccacaaactgctcagctgacaaaagggggaagaggcgaggcaagcagaaaccgtcggggaccggttccttccaagcccaggtctcttcttcccagcacagcctgaatgtgccagcagggaccctcgccctacacgtattgggatatggccttgaccccttcccc

SEQ ID NO: 1559934 - DNA, 4001 bp, Homo sapiens
agcagcaggcccctggagaccccggagacgaaggggcacaccgaggtggccagggccccactatccaggccagaaacaaagatgttatccttgacacctccttccacccactggatctgagccggtccatcaccagcccggtggctctgcctgtctcccatcagccaccgcccggtccctgcctccatcacctttcaccagagccacagcaacagcctccctccttgctgatcacctgctccaggacattctcccccagcagccaaacaatctttcacgacacaaatgcaatggagccgcttccctcttggggtgtcctgggggcctcccattattccctggatagagatcaaagccctccccacagcctgccaggtccgcattccggctcaggccgacctctccagactcactcatctcacaccctgccactcctggctccctcaagacaagccaaattgccccttcctgcctctgctcctctgccaggaactcccttccccaacctcactagacagccttgcccaacccaaccaccctttgcacctcactgccaacgctctcagagtcctcaaagctgggacaggaccccttacacgctctttccacagcttgtatttttcacacgtttggccagatctccccccacctccaaaccagaaactctatgagagcaggaccatgacctgccactcactaaaggaatgggcaggtggtaggcagcacagaattaaggaggaagcacaggaggaaaagaatccccaaggtccgccagctttgacagggaagggaaagtctagtctcctctcctctccagccacaggtacctggaacctccctagtgtcactaatgggcgtggactggggagtgcaaacccagacgcctcactcactgggcacacacccttgacaccctgaatcccaccaattccgttcccacgcacttaactgggcaaccctctgcaagctagaggtgttctgaggaccagcaagcaaccgagcagccaaaatactggaagatgacctacatatgggagacggtgactgcacctcactcaaccagtcagggtgggaaacccgcctggggggaggcgcggccatatcagagggcagacaaacgggccaggtgacagggggatgggacagagggacaagcaggagcaaaatccgaggtgacagagcaggctcctggctagagcagaccctgggaggaagaagtgagcagaagggtcctaagagagagcctgggacgggtgaggtcgcgcccccgagagtttgcacttcatcctgggagaaatggcggggccgcgaagaagtcccgagcaagcgatggacaacataggagaagggctgcatcccggagaacggacgcgagcggaggccgggaagcccgcccaggagtcagggtggcaggaagaagcctgacaagggaaacagcgactgggagctggttgggaagcagggctcgggagggcccctgggagctgccttggggggcgagaggccgaagcgtttgtcggactgggggcagtttcggggcaaaagagcggaatccgcggctcggacgggtgctccccgaaggcaagggccgcgtccgcaggagggtgggagcgcaacccacgccggagggctgaatggatggggacagggctttcccaatcacagacgctcatccgcggtccgcgcccctgctctgggctcctcgggcaggacccgcggaagccctgggactgcaggggtctcggggacgtccaaccgggctgtcaggccctcgaggcccggcccgggaccccgcgcggccgcgcccgcccccgcccctgcccggcactcaccaccccggcccgcgcccccgggccccagggccgcgctccatggctcccggccgcccgcccgtgcgtccgtcggtccctccgcacccctgcccggcctcctgcaccgccaccgccgcagctccccccacggacggaagtgagcctcgttctcaccaccgccccggaagtgacgcgaggagcgcgcggggcgggggtctgcaggcacagagcgaccgcgcgactagcgtcctgggggcggggctgatatgtcgaggggcgtggcctgctgctctgtgggcggggccaaacttaggtttcattcacttggggacccggaataggttgaggccagtaaagttctcgcctggaaaacaaaatttacagggacgccaaaaaaaactcagacatcaacatttagaaatgttttaaaatatttttctttatgagatggagtcgcgctctgtcgcccaggctggagtacaatggcgcgatctcagctcactgcaacttctgcctcctgggatcaagcgattctcctgcctcagcctcctgagtagctgggattaccggcgcccaccaccatgcccagctaatttttgtgttttcagtagagacggggtttccccatgttggccagtgtggcctcgaactcctgaccccagaatcctcctgcctcagcctcccaaagtgttgggattacaggcatcagccaccgcacctggcctcttttttttaacatagagtctactctgtcacccaggctggtgccatcatagctcactgcagcctcgacctcccaggatcaagtgaacctcctacttcagcctcctgagtagctaggactataggcacaagccaccatgaccagcttatttaaagtctttatatattgctcatcagaaattcttttgcattagtttttaaaatattacattaggccgggcacggtggctcatgcctgtaatcccagcactttgggagactgaaacaggtagatcacctgaagtcaggagtttgagaccaagcctgaccaacgtggtgaaaccctgtctctactaaaaatacaaatattagccgggcatggtggcacgcgcctgtagtcccagctactccggaggctgaggcaggagaatcgcttgaacccgggaggcgaaggttgcagtgagccaagatcgggccactgtgctccagcccaagtgacagagcaagaagactgtctcagataaataaataaataaataaataaataaataaataaataaataaaactatgatcactccactgcattccagcctgggcgagagagcaagatcctgtctcttaaaaaaatttcattatgggctgggcgcggtggctcacgcctataatcccagcactttgggaggccgagtcgggcagatcatgaggttaggagatcaagaccatcctggctaacacggtgaaacctcatctctactaaaaatacaaaaagatagccgggcgtggtggcgggcgcctgtagtcccagctactcgggaggctgaggcaggagaacggcgtgaacccaggaggcagagcttgcagtgagctgagaccgcgccactgcactccagactgggcgacagagcgagactccgtctcaaaaaaaaaaaaaattgcattatggcagggcctagtggctcacgcctgtaatctcagcactttgggagaacgaggcaggcagatcacctgaagttaggagttcagcctggccaacatggtgaaatcctgtctctactaaaaatacaaaaattaggccaccctggccaacatggtgaaaccccatctctactaaaaatacaaaaattagccggctgttgtggcgcgcacctgtaatctcagctactccacgccactgcactccagcctgggcgacagagcaagactctgcctcaaaaaaaaaaaaagtaaagaaaagaaaatggaagaaggttactggagaatctcagagcgtggtcagggcaggcctttctaaggaagtgacagggacaggggcagaaagggctgcagacaccaaaggggcccagcctggaagtgtgagtgtgaattggtgggaagccttgcttttcaggccttctctcatatgtgccttccccccagctttcgtgccttttccagctcaaaatgctcctccagcctgcaggcaaccgcagcccccgctccgtcccagg

SEQ ID NO: 1559935 - DNA, 4001 bp, Homo sapiens
tgcttcacccgcagcacgcggccgggcttgacctctacaaaggtgtagccatcgctggactcgacgctctccagtggccccacggcgttggggggcgtgcccagcaggcaacagaagataccgtcggtcaccccggtcagcatggtgtgtcctgtgagtgaggacagcagccagttcaggtgctgtctcaatgagaaccctgcaccgtgcagcaggcactccctgagccttgggagaactgttttagactccagtttggggagcgccagatcaagtgagccacggcactgagatttttttgtttgtgtgtgtgtgtgtgtgtgtgtgtgtgtgtgtttttgagacagtctcgctttgtcatccaggctggagggcagtggccggatttcggcttactgcaacctccccctcctgggttcaagcgattctcttgcctcagcctcctgagtagctgggattataggcaggtgccaccatgtctagctaatttttgtattttttgtagagatggggtttcaccatgttggccaggctggtcttgaactcctgacctcaaattttcctcctgcttcggcctcccaaagtgctgggattataggtgtgagccaccgtgcactgacatgttttgtctgagcagtgcctttgtggtagttaccctcctgggtcaccctagtctatcctcagagagaaagacttggctatggcttaccccacagggtgtccacagggaaggtggtggcgtcttgtgtggggatgttcctggagaaggggacattgtggcaaatgtggaccagccggaagacaccccctccccccagctggagtttataccatttatggcctcctaactcattcattcaggtatacactaactcatccattcaggtatacactaactcattcattcaggtatacactaactcactaactcatccaggtatgcactcactaactcacatatccccagggcctcctaaggcatctaaaatatgcaaatctttggtgagcccccagtgaggctcctggctctgaatttgactcctgaaaggtgaggccctaggagagggggatggggactgagccacagaaagccttgctcagctcccctagaccggggtgagccggggtctgtttcatagagggccaagctgaggcccagacactctgagaggaagctagactctgaacttcctccttggcaccctggattctggggatctgctatacaagtccccagaggtggcgaagaggatgggagaggcagggccctggctgggggcctccaagcctccatcccactccttgggccacccccgcccccgtgtccatggcaaccacaggcggttacataacctaagggggggatacccgagcagtgcacccccattgtcgaggtgtctagggcctggagatgggaccagctgcctgcctgccccctaccccaggttgggcgccgctaaggtaacgcacgcccgagactgagccgcagtggccccagacatactggaggggaagcaggccatgccccccacctcgagtggggccctaatcccggattgtggagggcaacgcacaggcgccaccccagccccgcttccccgcccccggcccccgccttccaggtgttcgtcatccctgcagcggggtcgagcccactggggctccgtggcttcctacgagcccaaacgcggggttggtggacaccactcctccgaagtggaggccccggggcttcgatctctccttttggggcccgttccccgctcacctcatcgagggccgcggggcccgggtcggggcggaggggtcccaggcggagaagccagcgtccgcctgctggcgccgtttacatggtggcgcggggtcaggccgggtgcgtctacgcgggcgggcacctgcccctggcggtcagcgcaggggcatcccgcggccgccgaaacagccggccctttaagttcctcccccgagtaggcggagccacgtgccgacgggcgggcacttcggcctatcgcagctgcggactgacctggcctagttaggagcccaatgagaggcggcaattccgtagtggaggcgggctctgggagcaacggccccgccccttttgggggttcaccgaggttgggggagggatggggcctggctcaaggcggagaagggggttgcagtctagggtctgcgggacgcctgggagtgtgcggccggggccctctctctgcaaatgggtctcccaagcccttgccccccagcccctgcctcccaattgccctgttcctctccaaacgaggcccccatactcttctctctgtattgacctttccattctagaagcagagactccaagatctttttccaatctccggtggggaaactgaggctcataaagggcacaagagcataaatcaagcaaggagcaaagctgggacttgaacccaaggctgtgtgattccaaaccctgggaaccattatttgctaacctcccccctacgccccccccttttcttttggtagggacgaggtctcgctatcttgcccagactggtctcgaactctgggcatcaagcaatcctctcgtctacggcctcccaaagggctgagatcactggcgtgagccatcgtgacgggcttctctaaagctttcaaggaaagtcttggagctgtgggtaattagagagtttgaatttcataatcagccgatttaacccatggctgccatggttctgagaagggctgatagcaagaggcaggcatcccagctctgtggtaccggcggggccatggtaggccctcaggagagctcaggtctcaaatccagcctctgccctttgctgatgtgtgacctcgggcaagttacttcactttcctgagcctccgtttatttctctatgaaattaatcctctcataagtttgctacgcaggtaaagcactcatcatagtgtcgtgcatataacaaatgctccatatattatgggcattattatagtggtgatgttttgctaaacgatgctacaggtaggatgggcttcggaggacgaggggttaaatgctccttgctgcttggccactcacatcccctggaatttgctgccagagctggattccgtccagacacctactcttgcccactaagggcacttctgggagactatacagtttattcatttagcaaacacctctctgcatgaaccccaagctggcacttgtagggatacagccccaggcccctggcccttgaggagcccttgaacttgggggagagtcaagggaaagcagtcgggccagaagaatggacagcggttgagagaagacgactccttttttttttgagaaaggatctcactccgttgcccaggctgcagtgcattggcgctatcattgctcactacagcctggatctcctgggttcagggaatcctcccacctcaccttcaagtacttgagactataggtggttgctaccatgtccccaggctggtctcaaactcctggccccaagggatcctccctcctcagcctcccaaaatgctggaattacaggcatgagccacacctcactcagcccttggagaggaaaggatttttaaagggcggataggggaacaccaggcagagaggagagtgtggctgaaatgtaagatggtgtgtgtagagggttttgcatgcctgatggaagggctgagcaggttttacctggggaaatggggagccaaggatagtgtgtgagtaggggaggggttcagatctgagtatcagaaaatttttcttccttttttttttttttttttttggttctaacaacagaggagaattcttctagggcccaaaatgggggcaagattgccaaagacaagcttgcaatccctgagtttacagattgagaaagcccagagtggcgcagggaccaccccaaggacacgcagcgagcttgaactcaggcctcctcggcttcctgccaagaggcggagacttggctgcagccaggacaagctgccagccagct

SEQ ID NO: 1559936 - DNA, 4001 bp, Homo sapiens
ctaaaaatacaaaaattagccaggcgtggtggtgggaacctgttatcccaactactcgggaagctgaggcagcagaatggcttgaacgcgggaggcagaggttgcagtgagccgagatcgcgccattacattccagcctaggtgacaaagcgagactccgtttcaaaacaaacaaacaaacaaacaaaagaactaagcactatgcctggatcccatcattcccagggctccaggcaaacacctctgtgttcccagcacccagtatgggcatggcatagctgcactgatctttggctttaagctttggctaaatgccgtgatcatttgtgcattcctatttttttttttttttttgagacgaagtctcgctcttgtccctcaggctggagtgcaatggtgcgatctcggctcattgaaacctccgcctcctgggttcaagccattctcttgcctcagcctcccaagcagctgggattacaggtgcctgccaccaaacctggctaatttttgtatttttagtagagatggggtttcaccatgttggccaggctggtctcgaactcctgacctcaggtgatccactcaccttggcctcgcaaagtgctgtgattacaggcgtgagcctccgcgcccggccttttttttttttttttttttttgagacagggtctccctctgtcacccaggctggagtgcagtggtatgacctcagctcactgcatcctccacttcttgggttcaagaaatcctcccccctcagcctcccaagtagctggaactacaagcacacaccaccacacccagctaatttttaaaaactttttgtagagacagggtcttgctatgttgcccaggctggtctggaactcctgggctcaagcgatcttcctgcctctgcgttccaaattgctggggttacaggcatgagccatggtgctaggtacatccatgattttttagcacttcccatgtggtgttttaacagggaaagagaagaccacctcagaatgtccagaactgaggagtttctcaggaggtgggactttttttcttctttttttgagacagtctcgctttttcacccaggctggagtgcagtggcacaatctcagctcactgcaacctccgcctcctgggttcaagcgattctcatgccgtagcctcctgagtagcttggactacagatgcctgacaccgtacccagctaattttttattttagtagagatgggctttcaccacgttgcccagggcgatctccaactcctgagctcaggcaatccacccaccttggccttccaaagtgctaggattacagacgtgagccaccgcgcccagccaagaggtgaaactttttaaatactgaaaccaggatagtcccaggcacactgggacaagttggtcagtgggtacagctgcaaacaagacagacacaatcacctcttccaggaagcctttcctgattggcccaccccctctagctcaggggcaccctctgcctccccctaccacagctgcctctgtgccctccaagaaggcaccatcgctcccggttgcaaatgcctgcagtcacatcagagttagcttagggaaggcagagaccggttcttttcctggccaccaatgtgtctccaaaacctaccacagagcttggcatcaagtaaagacaagtaaatgaatgaaagctggcactctttggctaacagatgagaaaactagggctgagacaggtgaaccactccagcaagattccccagtaaggctgtatggggaggaaccgggattcgaaccggcatctggcgagactccttcacacacccacgcactcaccgtgttgtagaactcggccaccagctccgagtactggaagttgctctcacaccagtccacctcggagctctgataggcgaagatgctaggcatcttgtctcagtggccaccaccagccggctgcgcccggcagagagaaggcgagcttgggaaggctgggccctgatgaggcggggagaggacagcccggtgccccgcggcaggcagactgggaggaaaaacctgctgggccgctccccagttgcaccagggcagcctggctgtgcagtgacagcagccctgagcataagccgtgggactggcactgtccaggcagggcagggggcagaagtaggcagggaagaggcctcccatccagattacccaggaataggaatcggggtgggggcagtggagggaactgtttttatcttttatgtatgtatgtatttatttattagagtcagggccttgctctgttgctcaggctggggtacagtggcatcatcatagctcaccgcagcctcaaactcccaggctcaagcaatactcctgcctcagcctctgaagtagccaggaccacaggcacatgctgccaccatgcctagctaattgtttttttttttggagacagagtcgctctgttgcccaggctggagtgcagtggcatgatctcagctcactgcaagctctgcctcccgtgttcacgccattctcccgcctcagcctcccgagtagctgggactacaggcgcccaccgccacgaccggctaattttttgtatttttaatagagatggagtttcactgtgttagccaggatggtctcgatctcctgacctcgtgatccacctgccttggcctcccaaagtgctgggattataggtgtgcgtgagccaccgtgcccggcctttttttttaaaattgagatgcagtctggctctgtcacccaggctggagtgtagtggcgcaatgtcagctcactgcaacctccacctcctgggttcaagcgattctcctacctcagcctcccaagtagctgggatgactggcacctgccaccatgcccagctaattttttttgtattttagtagagataggatttcaccatgttggtcaagctggtctcgaactcctgacctcaggtgatctgcccaccttggcctcccaaggtgccgggattatacgcatgagccacctcacctggcctgagttcctctactttaagctgtgtgaccttgggcaagtgaatttacctctctgatcctctgtttgctcacctgtcatatggagacgatggtgacagagccaactgtaacaaaggaagacagagataaagcatgtacaaaggcttagcccactgcctatgctagagtaggcacttgatggatggtaatgggttttctttttttttttgagatggagtcttgctctgtcccaaagtgctgggattacagggttttcttactgaagctgaccttgaactttaagtcaactttgtgggaataataataattattattattataataaaagagcctggccttagcaagcggttagcaagtgtgcataacaataataatataattatttattatataatagcaatattatattaaaatataaaattattatattaaaaatactattgttatataatattttaaatattttagtatattattttaatgtgattaatataatttaatataataattaatattatatattatataatttttctttttttaagtgcttgattttcagtattatctcatttaacgttcttttttttttttttttttgagatggagcctcactctgtctcccaggctggagtgcagtggcatgatcttggctcactgcaacctccacctccctagttcaagcaattctcctgcctcagcctcctgagtaactgggactacaggcacctgccaccatgcccagctaatttttgtatttttagtagagacggggtttcaccatattgaccaggctggcctcaaactcctgaccttgtgatctgcccgtctcgacttcccaaagtgctgggattacaggcgtgagccactgtgcccggccttcatttaatgttcttaacaatcctaccccgggtgctgtggctcacgcctgtaatcctagtgctttgggagaccaaggcgggaggatcacaaggtcaggagattgaga

SEQ ID NO: 1559937 - DNA, 4001 bp, Homo sapiens
tccggctagcacgtaccagggcactttgcgaagggagcggtcagagaatacgtcctcaaaggtctcctgtagcaaacagatagggcaggcctcttccctggggtcagtggctatgccgatcctcccaccaagtcaggataagggagacactgaatgctcccggcgcccaaaggtgccccatcaccttccctctgccctcaccaaaggaaggtcactaggtaaggcggcttctccccactgcccgcccccacctcctgccccactctgttgggcacagacctggaacctcttgtcattgatgtcttgcacaccagtgaagtaaaaattgtcccctagagacaggatgaagtctgcacccaggatctgcacagtccgagcgatctccttggcattggccatttcccgggccgtgtggaatggggcattggggacccctccccagtcacccacggctacaaagcgcagggcaggggtggcaccatcagccagggagggtagcaacaaggcttgcaggatgagcagcgccgtccacatgtccatctgggagaagagagacaagcataggtggcccgggctgtgacaagggcagggaggccttgagacccccgcctgccctgagatagagggagactgcttgctgcaggctgcccctgcgggaaccccttggtgccctaattctcaggacacacaagctgcacaaggctgcacaagctggcttagggaaggggggcgcggtctgtgagagggcgagctgtaccaagatggccctgcaggcccatttcaccctccttccacctagcctgcccagcactcacccagggggagacacaggccagtcaccggaggctctgagaggctggtgggctctagagtagaactgccggtccctgagcctttattccctgaggaggaagtggatcattagtgaggatgatgcagtttctccgagggctgtcccgggagccctccccttgggtcatgtgagccctggacttccctggagcaggacacgggattggggtgggggtgggaggatctgggcacacgtgtgcagcagcctcggcccacacagcctccgggtggacctgcaggggcctgtttgtgctgtaggcttgacacgtccaggtatctctgtgtgtctgtgtatctcagtgtgagtgtgtgtgtgtgtgcacacttgagaggctgtggctgtgattacccaagacacatctcctgcaccttctttctctgagtaagggcttacctgtgtgtgtctgggtgtgtcttgcttcctgcgtgcagctgagcatgcctacctgggcctcggctctgtacctgatggtgttgctgcagacatgtatgctgagcctgcgaggcctgtgtggcttgtctgcgatgcacgcctgtgttctcacgtggcactgggtgggaatccctatggatggagttttgtgtgtgtccatgtgtgtgtgcctgggttgcatctctaggatgggttgcgtgtctggtgtgggagctgtgtttgacaacatctgggtgggggactccgcgtgtgtccccgtcctccccctgccctctctccatcccacacataaacaccaacgggcttcccttttccaggaagtcctgcccacaccctcccctccccccagactcccattcctgcaggaggaaccaggcaggaggcagctagctggtgatagcgcgcgtgaccacagacctctgaccctcatagtctcagcagctgtctgcaggccctccacgggaccgcagcctgggagggcaggaggccctgcacctgcggccggtctgacctgctcctcacctccctgcctgcctcctccgtgctgggcgccgccgcgacacgtcccgcggacattcaggagtcccttcagtccctgcgagcgcggacccgggagagagctctcattcaacgctgaggccactggctcacagatctccccgggtcaccctgcgaagtgcttggtcccccccattcccagccctgcagcagcaacaaacgggaaggaagtgggtgacgaggacaggcagagacccctcccacggggccgcccgcatctcacctgccgtcgcggggcgggcgttgcggccggtgcccagctgcagatccgcaggcgatcgcactcctggcggccccagctttaagcaggcagcggccgatccgccctgctcgagggctcagggctgacccaggtgagccccggcggggagggcgggcgcctcggcctccccgccccggaaccctgcaccgcccagagccgccacgcctcccggctgtaggctccgcatctgtaaaatgggccgatgaaccccaagggtcggctcagacccacggactgcagctgcagctgggctagaaggggtggccaggggagccgatttcatccttttccttcctccacgccaaccaggagcctccatctgcctgggaccctttgggggcacccatgggcccacagccgcagaaccacagcactgggtggggtttcagccctggggccaagctcttgtgaggtctgtcatcatcttctcctgttgttttgtttttttgtttgtttgtttgtttggtttttttttttttgagacagagtctcgctctttcacccaggccggactgcagtggcgcgatctcggctcactgcaagctctgcctcccgggttctcgccattctcctgcctcagcacccccgagtagctgggactacgggcgccgccaccgcgcccggctaattttttgtattttttagtagagacggggtttcaccgtgttagccaggatggtttcgatctcctgacctcgtgatccacccaccttggccttccaaagtgctgggattacaggcgtgagccaccgcgcccggcctgtttttgttttttttttttttgagacagttttattctggttgcccaggctggagtgcagtggcgcaatcttggctcacgcaacctccgcctcccgggtacaagcgattctcctgcctcagcctccctagtagctgtgattacaggcacgcaccaccacgcccggctaattttgtatttttagtagagacggggtttctccatgttggccaggctggtctccaatgcccgatctcaggtgatctgcccacctcagcctcccaaagttctgcgattacaggcgtgagtcaccatgcctggccagtctcctgtttttttaaaaacttattatttagccggtgtggtgtctcacacctgtaatcctggcactttgggaggccgaggtgagcggatcacttgaggtcaggtgttccagaccagcctgggcaacatggcaaaaccttgtctctactaaaaagacaaaaattagctggaggtgctctcttgaacccaggaggcagaggttgcagtgaactgagatcatgccactgcactccaacccaggaggaggaggttgcactgagccaatatcatgccactacattccagcctgggcgacagagcaagactctgtcccccccaaaaaaaaaacagaaaaaaaaaaaaagaaagaaatctgaagcaattatgaccaaatgttaacatctgtttcttcacgtggtgggtacaggcgtgttttggaagcttctatgcttcctgtattttgagatcacacaaaattatgtttattatcttattgtgctacatgatctttgtagaaaagttggtaaattctggaatgcacgaagaaaaagattataatagccagtaatacccctgcccagagagacagtatccattaatttttctctgcctatgtttgtcttcggaaaaatgggatactattggcactattttataactttttaatttgtattaacactttctatattttttaaattgaaaaagctggccaagcatggtggctcaggcctgtaaacccagccaatgtgggaggatcgcttgagcccgggagttcaggaacagcctgggcatcgtggcgagaccacattgctacaaaaaaaaaaaaaaaaaaaaaaaaaattagccaggcatgg

SEQ ID NO: 1559938 - DNA, 4001 bp, Homo sapiens
ggtcactaggtaaggcggcttctccccactgcccgcccccacctcctgccccactctgttgggcacagacctggaacctcttgtcattgatgtcttgcacaccagtgaagtaaaaattgtcccctagagacaggatgaagtctgcacccaggatctgcacagtccgagcgatctccttggcattggccatttcccgggccgtgtggaatggggcattggggacccctccccagtcacccacggctacaaagcgcagggcaggggtggcaccatcagccagggagggtagcaacaaggcttgcaggatgagcagcgccgtccacatgtccatctgggagaagagagacaagcataggtggcccgggctgtgacaagggcagggaggccttgagacccccgcctgccctgagatagagggagactgcttgctgcaggctgcccctgcgggaaccccttggtgccctaattctcaggacacacaagctgcacaaggctgcacaagctggcttagggaaggggggcgcggtctgtgagagggcgagctgtaccaagatggccctgcaggcccatttcaccctccttccacctagcctgcccagcactcacccagggggagacacaggccagtcaccggaggctctgagaggctggtgggctctagagtagaactgccggtccctgagcctttattccctgaggaggaagtggatcattagtgaggatgatgcagtttctccgagggctgtcccgggagccctccccttgggtcatgtgagccctggacttccctggagcaggacacgggattggggtgggggtgggaggatctgggcacacgtgtgcagcagcctcggcccacacagcctccgggtggacctgcaggggcctgtttgtgctgtaggcttgacacgtccaggtatctctgtgtgtctgtgtatctcagtgtgagtgtgtgtgtgtgtgcacacttgagaggctgtggctgtgattacccaagacacatctcctgcaccttctttctctgagtaagggcttacctgtgtgtgtctgggtgtgtcttgcttcctgcgtgcagctgagcatgcctacctgggcctcggctctgtacctgatggtgttgctgcagacatgtatgctgagcctgcgaggcctgtgtggcttgtctgcgatgcacgcctgtgttctcacgtggcactgggtgggaatccctatggatggagttttgtgtgtgtccatgtgtgtgtgcctgggttgcatctctaggatgggttgcgtgtctggtgtgggagctgtgtttgacaacatctgggtgggggactccgcgtgtgtccccgtcctccccctgccctctctccatcccacacataaacaccaacgggcttcccttttccaggaagtcctgcccacaccctcccctccccccagactcccattcctgcaggaggaaccaggcaggaggcagctagctggtgatagcgcgcgtgaccacagacctctgaccctcatagtctcagcagctgtctgcaggccctccacgggaccgcagcctgggagggcaggaggccctgcacctgcggccggtctgacctgctcctcacctccctgcctgcctcctccgtgctgggcgccgccgcgacacgtcccgcggacattcaggagtcccttcagtccctgcgagcgcggacccgggagagagctctcattcaacgctgaggccactggctcacagatctccccgggtcaccctgcgaagtgcttggtcccccccattcccagccctgcagcagcaacaaacgggaaggaagtgggtgacgaggacaggcagagacccctcccacggggccgcccgcatctcacctgccgtcgcggggcgggcgttgcggccggtgcccagctgcagatccgcaggcgatcgcactcctggcggccccagctttaagcaggcagcggccgatccgccctgctcgagggctcagggctgacccaggtgagccccggcggggagggcgggcgcctcggcctccccgccccggaaccctgcaccgcccagagccgccacgcctcccggctgtaggctccgcatctgtaaaatgggccgatgaaccccaagggtcggctcagacccacggactgcagctgcagctgggctagaaggggtggccaggggagccgatttcatccttttccttcctccacgccaaccaggagcctccatctgcctgggaccctttgggggcacccatgggcccacagccgcagaaccacagcactgggtggggtttcagccctggggccaagctcttgtgaggtctgtcatcatcttctcctgttgttttgtttttttgtttgtttgtttgtttggtttttttttttttgagacagagtctcgctctttcacccaggccggactgcagtggcgcgatctcggctcactgcaagctctgcctcccgggttctcgccattctcctgcctcagcacccccgagtagctgggactacgggcgccgccaccgcgcccggctaattttttgtattttttagtagagacggggtttcaccgtgttagccaggatggtttcgatctcctgacctcgtgatccacccaccttggccttccaaagtgctgggattacaggcgtgagccaccgcgcccggcctgtttttgttttttttttttttgagacagttttattctggttgcccaggctggagtgcagtggcgcaatcttggctcacgcaacctccgcctcccgggtacaagcgattctcctgcctcagcctccctagtagctgtgattacaggcacgcaccaccacgcccggctaattttgtatttttagtagagacggggtttctccatgttggccaggctggtctccaatgcccgatctcaggtgatctgcccacctcagcctcccaaagttctgcgattacaggcgtgagtcaccatgcctggccagtctcctgtttttttaaaaacttattatttagccggtgtggtgtctcacacctgtaatcctggcactttgggaggccgaggtgagcggatcacttgaggtcaggtgttccagaccagcctgggcaacatggcaaaaccttgtctctactaaaaagacaaaaattagctggaggtgctctcttgaacccaggaggcagaggttgcagtgaactgagatcatgccactgcactccaacccaggaggaggaggttgcactgagccaatatcatgccactacattccagcctgggcgacagagcaagactctgtcccccccaaaaaaaaaacagaaaaaaaaaaaaagaaagaaatctgaagcaattatgaccaaatgttaacatctgtttcttcacgtggtgggtacaggcgtgttttggaagcttctatgcttcctgtattttgagatcacacaaaattatgtttattatcttattgtgctacatgatctttgtagaaaagttggtaaattctggaatgcacgaagaaaaagattataatagccagtaatacccctgcccagagagacagtatccattaatttttctctgcctatgtttgtcttcggaaaaatgggatactattggcactattttataactttttaatttgtattaacactttctatattttttaaattgaaaaagctggccaagcatggtggctcaggcctgtaaacccagccaatgtgggaggatcgcttgagcccgggagttcaggaacagcctgggcatcgtggcgagaccacattgctacaaaaaaaaaaaaaaaaaaaaaaaaaattagccaggcatggtggtgcacacctgtggttccatctactcaggaagctgaggtggaggatcgcttgagcctgggagtttgaggctgcaataagctacgaatgcaccactgaccttcagcctgggcaacacagctagactcttgtctcagagagagagagagagagagagagagagcacaatgaaaaaaataaacctgatcttgcacagagcatgtaataaa

SEQ ID NO: 1559939 - DNA, 4001 bp, Homo sapiens
cccagctacttgggaggctgagacaggagaattgcttgaacccaggaggcggaggttgcagtgagttgagatcgtgccactgcactccctctcaaaaaaaaaaaaaaaagcaaaaattagctgcatgtggtggcccatgcctgtagtgtcagctactctggaggctgaagtgggaggttcacctgagcccgggagattgaagctgcagtaagccccgattgcaccactgcactccagcctgggtgaaaaacaatgaaaccttgtctccaaaaaaaaaaaaaaaaaagagcttaaaaaagaaagaaagaaagaaattggcaattcgaagatattattctggctttggagtgttttcctggttagacagcaagatttgagggacagtctagacattctgaaggccacaggagaccctcaaacagcaggaggaccccagccatgtggacatcagctgggatggggacccccctcacccagctcccaccccacccacagggccctcacctgcagattgtgatcgtggccgcacaggtaggcagtgaccccgtatgtggccagcagtggccgtagctgcttgaccaggcagtgggtaggcccgtgctcggctatggaccacacggggtagtggccagccaccagcacgtagtcctccctggccgccgccagctgtttcttgagccaggacagctgtgtgcgggccagcttcacgtctcggggcctctcaggctgctggctgaggaagtcatctgagttgccacatagtgtcactgtgtccagcataaaaatggccacagacacattggtctgtgggatcttgaagtgcaggcggtagaaagggctggggaagttcctgtggaggggatagaggtcgtgggtgcacatcttgggcgcagaagtcccagggtcagctcaagccacagggcccctgtgtccctgctatgtgaggatctcggaaggcagggctgagggtggctcaccagcgcttggagatcttagagtatgcaatctgggcagagacattgccaaggtggtcatggtttccggctagcacgtaccagggcactttgcgaagggagcggtcagagaatacgtcctcaaaggtctcctgtagcaaacagatagggcaggcctcttccctggggtcagtggctatgccgatcctcccaccaagtcaggataagggagacactgaatgctcccggcgcccaaaggtgccccatcaccttccctctgccctcaccaaaggaaggtcactaggtaaggcggcttctccccactgcccgcccccacctcctgccccactctgttgggcacagacctggaacctcttgtcattgatgtcttgcacaccagtgaagtaaaaattgtcccctagagacaggatgaagtctgcacccaggatctgcacagtccgagcgatctccttggcattggccatttcccgggccgtgtggaatggggcattggggacccctccccagtcacccacggctacaaagcgcagggcaggggtggcaccatcagccagggagggtagcaacaaggcttgcaggatgagcagcgccgtccacatgtccatctgggagaagagagacaagcataggtggcccgggctgtgacaagggcagggaggccttgagacccccgcctgccctgagatagagggagactgcttgctgcaggctgcccctgcgggaaccccttggtgccctaattctcaggacacacaagctgcacaaggctgcacaagctggcttagggaaggggggcgcggtctgtgagagggcgagctgtaccaagatggccctgcaggcccatttcaccctccttccacctagcctgcccagcactcacccagggggagacacaggccagtcaccggaggctctgagaggctggtgggctctagagtagaactgccggtccctgagcctttattccctgaggaggaagtggatcattagtgaggatgatgcagtttctccgagggctgtcccgggagccctccccttgggtcatgtgagccctggacttccctggagcaggacacgggattggggtgggggtgggaggatctgggcacacgtgtgcagcagcctcggcccacacagcctccgggtggacctgcaggggcctgtttgtgctgtaggcttgacacgtccaggtatctctgtgtgtctgtgtatctcagtgtgagtgtgtgtgtgtgtgcacacttgagaggctgtggctgtgattacccaagacacatctcctgcaccttctttctctgagtaagggcttacctgtgtgtgtctgggtgtgtcttgcttcctgcgtgcagctgagcatgcctacctgggcctcggctctgtacctgatggtgttgctgcagacatgtatgctgagcctgcgaggcctgtgtggcttgtctgcgatgcacgcctgtgttctcacgtggcactgggtgggaatccctatggatggagttttgtgtgtgtccatgtgtgtgtgcctgggttgcatctctaggatgggttgcgtgtctggtgtgggagctgtgtttgacaacatctgggtgggggactccgcgtgtgtccccgtcctccccctgccctctctccatcccacacataaacaccaacgggcttcccttttccaggaagtcctgcccacaccctcccctccccccagactcccattcctgcaggaggaaccaggcaggaggcagctagctggtgatagcgcgcgtgaccacagacctctgaccctcatagtctcagcagctgtctgcaggccctccacgggaccgcagcctgggagggcaggaggccctgcacctgcggccggtctgacctgctcctcacctccctgcctgcctcctccgtgctgggcgccgccgcgacacgtcccgcggacattcaggagtcccttcagtccctgcgagcgcggacccgggagagagctctcattcaacgctgaggccactggctcacagatctccccgggtcaccctgcgaagtgcttggtcccccccattcccagccctgcagcagcaacaaacgggaaggaagtgggtgacgaggacaggcagagacccctcccacggggccgcccgcatctcacctgccgtcgcggggcgggcgttgcggccggtgcccagctgcagatccgcaggcgatcgcactcctggcggccccagctttaagcaggcagcggccgatccgccctgctcgagggctcagggctgacccaggtgagccccggcggggagggcgggcgcctcggcctccccgccccggaaccctgcaccgcccagagccgccacgcctcccggctgtaggctccgcatctgtaaaatgggccgatgaaccccaagggtcggctcagacccacggactgcagctgcagctgggctagaaggggtggccaggggagccgatttcatccttttccttcctccacgccaaccaggagcctccatctgcctgggaccctttgggggcacccatgggcccacagccgcagaaccacagcactgggtggggtttcagccctggggccaagctcttgtgaggtctgtcatcatcttctcctgttgttttgtttttttgtttgtttgtttgtttggtttttttttttttgagacagagtctcgctctttcacccaggccggactgcagtggcgcgatctcggctcactgcaagctctgcctcccgggttctcgccattctcctgcctcagcacccccgagtagctgggactacgggcgccgccaccgcgcccggctaattttttgtattttttagtagagacggggtttcaccgtgttagccaggatggtttcgatctcctgacctcgtgatccacccaccttggccttccaaagtgctgggattacaggcgtgagccaccgcgcccggcctgtttttgttttttttttttttgagacagttttattctggttgcccaggctggagtgcagtggcgcaatcttggctcacgcaacctccgcctcccg

SEQ ID NO: 1559940 - DNA, 4001 bp, Homo sapiens
gaacacagctagtgagtagcaagctgggattggaaacaggtgtccttaaacccttggctgggaaggggcagggctcacctggcacatgagggtgtccagaaccttccatgccctgcgcagtggctctccaaccagcgacagtcccgtgaagttctccaggcgactcaggaagccctggatgcgcggggctgggtgagcccaggcccatcccctgcatcccgccccccaccgccgccctgctcaccgtccagccctccagggcctcctggtactcggcggcctcggtggcctcccgcagcagctcgtggtatcggggacagctgcgcatggggaacctcagcagctggggaaaactgagtctcagagaggacagccgtgtgccttgccttgggtctcacagcgggtcgggggaacccgggctctcggcccctgcgtctttgtcgcagtttctcccagatccaggagagcagcgtgggccggggctcaccctggtctggacagaccagctcgaggacagtcttgcttctcggagccagctcaggcggccagacccagagctgcctctctctccacccgctccctccctcgccacacgtgggtccagccccctgaccttatcctcagccacgggcaccgtgtgcaccgggatcggcctccagcgggcctcggggctccctggagcagcctcgggaaacagcccggcaaggttggcctgggcactctccagcgtgcggtcaaagtccgtgctgcggatgtacacctggagcggggtggagagagggcacgcggggggtcgtggttggggacagaggtcagctgtcgtggcaaatcagaagcctcagattcactttggagtaggggtcagacactgagaatcatgtggccttcgaagttggaagttgggatcaagggtccagaggctaatgtcaggagcagttgggctggacgtcctaagctggacagccatgttggatttagggggtcaattgagtcaatgagggtcaaaaaggaagatcagaatcagtagaggctggaggttagaggtcaagtttaggagggcagcttggaggacttggagtcagagttcaatacatgttcttcagaggttaggaggactgtctgtagctgggggatgtcagaagacataggaggagacagaaaaggtaggtcagaattgataaagcgtagaggttaaaggttagaggtcaagagggcaagttacgtcaacaagggtcaaagatcgaaatcaagtttggggtcaaatgtcagaggccagaggtctgactggagtcaatgggacttagaaaacagagatggaggccagaaaataaagtcagagttgatggaggtcagaggtcgagatgtgacaggttgagatggggtcagaagtcagtgtgggttagtcagtgtatcgggggtcagagattagaggtagagggcaagtcaggttgatggaggtcaaaggccagaggtggaggcccaaagagagcgttgtagtcagtggaggtcacaggtgggaggtcagggggccaggtgggggtcactatggccctacctcctcccgccggtactccggactcaggaaggcctcgtagcggctcctcaggaagcggcccagctccagctgctggcggaccccctcctggggacagaacagcctcagcctaccactccccacccctcccacccttgccctcaccgcctacccgcttctcaccgtggtcagctggcccaggcctcgtggccacagggtggaggccacctccttgtgtgggtccatggggtaggaggccagcggggcccggtcgccatggcggaatacctggggacaggactggtcagggctagccctgggggagctaagggcaggccggggtgggggcgcctcaccagagccacgaacaccaggggtccttctggcagggcccggggtggcagcaccagcagcagcagcagcaggagaggtccagcagggtggccccaaaaccccaggccggccatttccacccagcccagacgctgagctcagcccactgtctgggccgcagccccgcctgtcccagccctgcactcagcacccccattatagcaggccctggcacgctcccccaggggccacagatcccattccccagcgcctctgccagccttggattaacccgtttcatcttcgtttcatcttcatcgctgccccaggagacactgatgtgcttaccaccatccccattgtaccgatggggaaactgaggcacagaagggttccctaactggcctgagaaaacacagatttctcagacaaagctgcgatttgaacacaggtgcctttaacctggttgcagacttggacagagacccccaccccacattgttcgtctcagcaacagtcttgaccccctgagttgcagaggctgacgatagtaactatgtgcttgattttctgtactctgatgctttgacatcaggggccttgctgatcgtagaaggaccacccctcccagggttaccagttcctggagatagtcagggactggcccaagcgcatgcctctcctgtacaaaccagccaacccaccacccaggccaccatccacctgccctgatcacccggggcagggtatcggacaactcaggacagcccctgtgccccagagcctgctgaaatggcgcaaccagccactctttaccctaccttatcccacagaaaacacaaggaagccgcttgctcgtggtctacctcctgggcaccattggtgcgtccccatgtggcccctgtggcatgccccctcctctggggaagctgtgagtataacaagtcatcttcctttctttcttttttcttttctttcctttttttttttttttttgagatgtagtcttactctgtttcccaggctggagtgcagtgacacagtctcagcttgctgcaacctccacctcccaggttcaagcgatcctcctgcctcagcccccctagtagctgggattacagacacacgcgaccatgcccggctaatttttgtatatatatatatatggccaggctggtcttcaactcctgacctcaggtgatccactcgcctcggcttcccaaaatgctgggattacaggcatgagccaccatgcccagccaacaagtcatctttcaatggcaatcgtctgctgctcaggcggcctcaccatcccacaatgctaataaaatctacacttcgcagcaccacctggggctggctggctctcctgcctcactgcgcacagtcagcctccagtcctgtcctaggtttttgttgttttttgagacagggttttgctgtgttgcccagactgctcttaaactcctgggctcaagcaatcctcccaccttggcctcccaaagtgctgggattacaggtgtgagcccctgcaccagatacaaaagttttgtgaatctctgtctctcctcgtacttgaaatagggtagaggcccctggaataaagaagtagaagggctggaggcttaagccagaccaggagctggcagctcacacctgtaatcccagcactttgggaggccaaggtgggagggttgcttgaggccaggagttcaagaccagcctggccaatatggtgagacccaccccccgcacccgactccatctctataaaagataaacaaaaattagccaggcacggtatggtggcatctgcctgtagtcccagctactcaagagactgagatgggaggatcacgtgagtccaggaatttgaggcttcagtgagctgtaattgtgcctttgcactacagcctggacaacaaaccaagagcctgtctctaaaaaaaacagaaaagagaaaaaaatcctgaagcaaaattaagaaactagaaaccacgttctagcccctggagatgtcagcactttcctatctactgatgtattggctgctgtgacaagttaccactcagtggcttaaaatgacacacatttattcccttacagttctggaggttggaagtctaaaatcaat

SEQ ID NO: 1559941 - DNA, 4001 bp, Homo sapiens
ataaataaataaataaaaataaaaaagtgaaatgctggcccaaccctgtctctcctctgcctgcagccctccatggctcccacctccctccaggtaaaagcgcaagttctccccacggtccacaaggccctgcacctccctgtgctctcctccttcctccctccccctcctcactctgctgcagccacgtgggcctcctcactgttcttccaactcaccaggtgcagtccttccttggggccttcgtacgggctgtgccctctgcctggaactctcttcccctcagatagctgggactacagaagcatgccactacgcctggctaatttatttttatttttatttttgtagagctgggggcctcgctatattgcccaggccggtcttgaactcctggcctcaagcaagccccccccccccccccaaccccgccacctcggcctcccaaagtgctgggatttgcaggtgtgagccaccacaccaggcccctcttttctttataaattgcccatcttcaggtattactttatggcaatgcaaaatgggcaaataaaattagtatccggagtatgaaaagaactctggatttaaaagacaaatgtaaacaacccagtgttttatgatgaaaaatgtaaacaggcagttcacaaaaaaggagcctggaaagggctacaaatcctggacaagatgctcagtagctttggtcatcagggaactgcacgttaaaaatcacacgatcggccgggtgcggaggctcacacctgtgatcccagcactttgggaggccgtggcaggtggatcacttgagctcaggagttctctacagaggacttgtaagttactagtaatattcgatttcacgaagtgaaaagggcacacagatatttatcgttattcattaaatcgtacagatatgctttgtgttattttatatgcattatatgtttcacaattttaaaaggccatgtagggttcagatgtggtgactcacacctgtaatcccagcactttgggaggctgagtcgggtggatcgcttgaggccaggagttcgagaccagcctggctggcatggtgaaaccccatctctactaaaaatacaaaaattagctgggcatggtggcgcgtgcctataatcccagcactttgagaggtcgaggcgggtggatcacctgaggtcagaagttcaagaccagcctggctggtatggcgaaaccccatctctactaaaaatataaaaattaggccgagtatggcggctcacgcctgtaatcccagcactttgggaggccaaggcgggtggatcacgaggtcaggagattgagactatcctggctaatgtggtgaaaccccatctctactaaaaaatacaaaaaattagccgggcatggtggcaggcacctgtagtcccagctactcaggaggctgaggcaggagaatggtgtgaacctgggaggcgaagcttgcagtgagccgagattgcgcctgggcaacagagcaagactctgtctcaaaaaaaaaaaaaaaattagctggacatggtggcaggcgcctgtaatctcagctacttgggaggttgaggtgggagtatcacttgagcctgggaggcagaggttgcagtgagctgagatcgtgccactgcactatagcctgggcaaaagagtgagaccctgtctcaaaaaaaaaagaaaagaaaacgcatgcccttctcccataccactggcacctgtcactcttcaagaggtgtggttctggccatctggcaaggcacctggagctgggacatctggtcactcaggtgttttcttcttcctgcaaagacagtcaacaggtagcccctcctggaaacctgaacatgagctgccccttcccagcccccgtcaccctctccgtccagccaggatgatggtggtggtgggaggcaggaggatgggtggtttccctccacaacaggccttctaccccattcaaccttccagaacgttccatcccagccacctcttgtgacatcactggctgcccctgcctccgcaccccacccccacccctaggggaagctgcttccaggacagggagattgctcttttcatgcatcattcatttattcatgcatgcatgcacttctgcgttgcattcgtgacgtttttatgaagccatgaccctaatggcagggattgtgctggatgctggagacataaagatgaacaaagccagatgaggcctgttcaagaaaataagaggaggcctagaatcacacaaacaaatgcaaacttaccattgtgaagagagccccaaggcatgttgagggcttgatcaaaggatcccgcccaggcagggagtctgggagtggtttctttcttttctttcgttttttgagacgggagtcttgctctgtcacccaggctggagtgcaatggtgcgatctcagttcactgcaacgtctgcctcccaggttcaagcgattctcctgcctcagcctcccgagtagctgggattacaggcgcccgccaccacgcccggctaatcttttgtatttttagtacagacggggtttcgccatgttggccaggctggtctcaaactcctgaccttgtgatccgcccgccttggcctcccaaagtgctgagatgacaggcgtgagccaccgcgcctggcctgggagtggtttcttgagctgggatctgaagtatgcctggatgttattcctgccctcgtgactttctcttacgctgcctgtcttcatgtgtttacagcggcctcccccttctcgttctctgctttagtcactgctaacaatgtccactaccaggcacagtggcttgtgcctggaatcccagcactttgggaggccaagtccgtagcatcacttgaggccaggagttcaaaaccagcctgggcaatgtagtaagaccccgtctctacagaaaaatttaaaaaattagccgggcgtggtggtgcgcaagtgtaaccacagctagtagggaggctgaggtggggggattgtttgagcccaggagttccaggctgcagtgagctgtgatggtaccatggcactccagccaggcctacagagcaagaccttgtctcaaaacaaaaaagacaaaacagtgccaggtgcagcacatactagatgctcagtaaataaagatgtagcaacagaatcttgtgctgtgccaggagaaaaggacaaggagtgttcctttgtctccagggccttttgtgtgtgtgtgtgagagagagagagagacggagtttggctcttgttgcccagactggagtgcaatagcgtgatcttggctcactgcaacctctgcctcccgggttcaagcgattctcctgcctcagcctcccaagtagctgaggttacaggcatgcaccaccactcccgactaattttctgtatttttagtagagatgggttttcaccatgttggccaggctggtctccacctcgtggcctcaggtgatccacccgcctcaaccttccatggtgctgggattacaggtgtagccaccgcacctggccaccagggccttcttaatgtttcacaaatatctactctgcagagcacctgggcagctgtgccaggacagccagtgtccaccaatgtccattcagcccttcttccccagagctctcacctaaagagagagaatgtttcccaggccccctgactgcatggcgtgtccatgtgactacatcctgccctgtgggatgtgggcataagtggtgggggccatgcctggtcatgcctataaaggaaaggaggtgacacccttccccaaccccccatccagtagaatcctgggatcaggagcagcctccttggacaggggtgaagctggaggggagggagcaggtcaagaggtccccaacaggagggaagggacctctgtctctaaagacagttgagccactttgctggtgccagacagatttatgcaagttgcacacacgctcgctcgctcgctcagacactctcacgtgcacaggtactcacac

SEQ ID NO: 1559942 - DNA, 4001 bp, Homo sapiens
gattagggagtcagtatttgaggatgtcttgggcacatagtgggtaattaatgaatgtatgtgggatcaatgcatgaatcacttaaactagaaatggaaggaattgggtatgtggcttgggtatgtggcagaccctaggggtgtgtgtgggcatggggtgggtggtcagaggctttcatgttcttcatgtttggggttgggggcaggtgccaggtggaggcttatctatgactcataggaggaggtgatatttctaacaatagccttgaggtagtgaactccccatctctgggagtgtgtaaatgggaagggcacttgtcagaggtggtctggggagggggtgtcccaacccaagggtgcctggggaggggcacagatcacaggaggatgggttgacaggattagaacttagtggtctgttgggagttattcatggggaaggtgggtttagggggtcaggattggggtgtctcagggcatgcatcacaggaggtgagttaggtcagcctgtggggcgaggtgcccaggagtggatggggcaggccctggaggaaggacaggacagagccggctgtagcagaggctttactgcccccacgccctccccagctctgccctggtcagtagcatttgcggtacacgatatagggaccctgttcctcgtactgctcccgcaggacccagcaggactggaaggcgcgcagggaggccaggatggagcccccgatccatacggagaaattcctggtgggctgggcagccaccaccacgtgggtctcggctggcagagcgcgcagcagctctgcccggaagcgaccctcgaagccggtgaagagcgaggacccaccgcagagaagcacgttttgggccaagtccgcgcgcatctccagtgacaacttgcggagactctgcttggccatggtggagaggccgacgggtgacagccccgggacctctggggggttgaacagcagctccggacactggaacagctccttgcccagggtgaccgtgcgcccatcgggcagcttcagagtccgcttgtactcctgctccggccgggcctgctccttctggaagtcggaggccacgtagcaatagtggtgcttaatgttctccactaggtccaggtcctgctgtcccaggggcaggccggcctggagcagcatctccgccaggaaggcggtcaggttgttgcccgccaggtccagacgctccgtggcgtggagcaggttgtagccctggaagacgggcactgtgtaggtgaccccgtgtcccgtgtccaccaccagcccgctgacacgaccgtgggcgtagacagacagcaccgactgcgatgccacgtacatggctggggagcgcagcgactcgaaggccacctccactagcttctcgcggttggtggccgggctgaagggtgggtcggagaacagcagcgggtggtcgtgggtggccactcggaggtcgtgctccagcaggtggcgccagatgagctcggcggcatcccagtccacgacgatgccgctgcgcaggggttgcaccagcgtcagctctgggagcacgcgggctgcctcgccgatgaacgtctgcagcccggactgccccgaggtggcgggtttcttgggctggcagcccaggatggtggccacggtgtaggtggggctggcctgcccagcaaaacctaccttacaggtgcctgtgcccatgtcaataaccaccgcgccggtctttggtggcagcctgtcggccaccatgccgggggagtcccgctgcaggggcttgttcaccacgttgggactggggtttgggccgggcctgggggcctccagggaggactgggattccgaggacttggggcgacttgcatccatggttgcgggacgccaggtgagggggcttttcctctggggttggggttgcggggagaagaggttgaggcccggccagtggggagggcaggcagacagggggaggggtgggcccgcaatctatgacgtcacggtgccccttcagtcttcttaagacatcacaatgcagccaagaggatgggtccctgcccagccctgcctgcccaaaggctgtcatctcttctctgaagagccaaatttggaggaggagatgagcatctcagagcagggccctcttaacacatttctgtcggatgcgctagaagctaatacgatggcacctggtttttgagaaaagacaagctttttgttgcatgtcaacccactgggagctaggaatccagcacaagtctgtttctcagctggctttaaggcagtaattttattagaaaagttctggggccgggggctgtggctcacacctgtaatcccagcactttgggagaccgaggtgggagatcacctgaggtcaggagttcgagaccagcctggccaacatggtgaaacccgtctctaccaaaaaatacaaaaattagcctggcatggtggcgcatgcctgtggtcccagctactggggaggctgaggcaggagaatcacttgaacccaggaggtggaggttgaagtgaaccaagatcatgccaccgcactccaggctgggggatggagtgagactctgtctcaaaagaaaaagaaaataaaagaaaaaaaattagccaggcatggtggcacatgcctgtagtcccagctactagggaggctgaggcaggagaatctcttgaacccgggaggtggaggttgcagcgagccaagatcatgctactgcactccagcctgtatgacagagcgagactcatctcaaaacaaacaaacaaacaaacaaagaaacaaacaaaaaaccctcataagtggaaggcatttcagcaagttgtttcttttttgatctgccattctgcaagctcaaacatttctttggggcatggtttcactaaaaacatgcaaaattggtttctctaactctttgggccacgctttcaggaagacccaggaatcctcctctgggtacctcgccatgaagctatttacagcctagtggcagagagcttgccacaggcctccctagaatattagaatattcctcctcagaatattaattagaaggtggggcgggctagcatggcttcctggtttccaaatggagacagaggccagccttggttggggatggagagaggcagggagagacaggaacacccctgtcctagattctttgcttcctctgctatattcactgcctgaatcattctccctgtcccattcctgccaagaaggaatttgcctcttcaaatctcagtctgatgccacctcctcctggaagccaaccctgatttctactctgtactccaactagatgagggatgggggaagtctgccttctctccaggggttgttacctgcttcctcctggcaggagaggggctcagtgagatacaagaaggggtttcagtatagataaaaggggagagggtgcatttgggaggaaggaattatctcaacaataaatagcaggcttcaaaatgcattaggagagttgcttcaagaccatggctgtttttggtgatatcagatatcacctgttagttaaagcaaataaaaacgtttttcttagtgtatgttcatgcatgtggtggtagaaatcaccaggaatagtgctagtgaatgtcttatgggatatctaaatgaaagaggtttaattttctagttgtgtctagatttattactctgccagagtgtggtttattgagcattttaattaattattgatttactggtatgtgtggtctaatccatgcttttggaaatatttactcagcaatttattgagggtctgttttttggactgttcacaacaaccagaaatacactaagtgataacactttattgttttcaatttttttttgagactgggtcttgctatattgtccaggctggagtgtagtggtgcaatcactgctcactgcagcctccttaacctcgtggtctcaagcaatcctcccacttcagcctccaaagtagctgggactataggcatgtg

SEQ ID NO: 1559943 - DNA, 4001 bp, Homo sapiens
accttcagagccctgtccaaagtcccaactctacacacatccctctttattaacagaatcaccgcagggaaccctcggatccctttgcattttgcagataacaaaactgcccggagagttcaagggtcttgtccaaggccacagagcgaatcagtaacaaatctggaaagaaaatccagatctccagatcccacgaaatgcttccaacttcaagtacctcccacccatttcacgcacaaaacttctgaacaaccccttccccccacacacacccactcaccacgctcctttctttagctcttcctgcacacactcagagctcccccctcaaccacactggatttatcccccccccacagacactgacacctcgctcggggatcccactccacttctgatcaccttttcactgctgtggggccctaccaagttgccccccccgccccccaaaaaaacagtgccacctgaacacagtctctgcttcaggatcccttcacctacctccggtctctccaaaaaagacacaattcttcctggacactctcaacgcttcctccccaaactcattctgcctgcacgacacacacacgctctccagtcccgggactgcacctccaggagccagcaccccctcctcaaattcctttctcagtctatccattacgcattccctttctaatgagactttcattttcctaaacgaacctctctcccattatccaccattccagctcaccctccctcccaccgatctcaccttctccctctacacttcctcattctctccaacgctttagcttttcagcttcccatcaattctttagaaatccctccccaaattatccccactctccgtatcccctctacttcggcttctccatccctcatcaattcctcttattattcctcctatctcttaatcttctcccctttggaacagggcaccacaaataaatctcacccccttcaaaaacgtctgattcacgggccccttaacttcttccttccgcaccccaccctcctcagacccccagtcctggcacctctaccctcctcacaccctaagcccatgtcttttcatgctcaattctacccttagcccctgttttcatcttcccagcctccctagtcttcccacccgtcttcagaccccacaatctccactccatcctcacacttgattcttcatcccctttataactcccccaacctgaggctcccccaattccaatctccttcagatctttctgctctccaaataaccaacccctccacactcaagctcctcctcacacttcccagacccagaaattcccttctcagcctcccctgattctcctcccagcacccccaacccatgctccgacccttcaagcccgcctcggatcccagttccatttcagcctgcccagtcatctcctcggtttcccctaatggcacgcccagaccctccaaatccttcatcagccttcccgattccttttatttgactcccatattccccacccagccgccaattctcttttcagattcccaattccttcctctagctcggcgattcctcctcaggactccaattcccttcccggacccgccaattccttctcgggacccccccgttcccatcacagacgctccagttacctttcaggacctcccacccctccccgggccccctcagaaaagcccctccagcccgtccggcccgcgggccgcgcaccttgcgctgctgcttctcccaggccgggtccagcagcaggtcccggtcccagtcgtcctcctgggccatgtagtcgcccatgctgcccccgccgccagcgccattgcccgcgctgctggggccgtactggtacgactggttcgccgcgtggtagtccaccattccgccgcctctcgctcgcccaccagcctgtccgctcccgcctcagctcccgcccctctgcccgagccgccgccgctaccgccgcttcagctgcttcagcccgccctccgcccgcgcctgcgcactgcccgccgcgcctgcgcacagcgccgaggttgccgccctcccgcgcgcgcgcgcctgccaaaccagaaaaggcaccaaggccgcgctccggagcttggcgcctgcgcagagtcccgcttcctggccgcccgactcagcccgggggcgagccgcgccccctctccggcgtgaacgcgcgcgtcgttcgcgtatgggcggggccagatcatgaatgattcataagggcaggccccgccatcggacctgaaccagctcaggcttggaatgcactgcaccgggttcccattcagcgacacaaattcaacaaatatttattgaacacctattctgtgccagactatgttttacgcaggcactaaaaacagaaaaaaatcccaactttcatgaaactaccttctagtaaaggaagccacatacacacaaatctacttttatttttattattttttgagacggagtctcgctctgtctcccaggctggagtgcagtggcgcgatctcggctcactgcaacctccgcctcccggattcaagcaattctcctgcctcagcctcccgagtagctgggaacacaggcatgctccaccacacccggctaatttttgtatttttttagtagagacggggtttcaccatgttggccaggctggtcttgaactcttgagctcaagcgatcctcccgcctcagcctcccaaagtgctggaattacaggcgtgagccaccgcgcccaaccaacacacaaatttttttttttgagacggagtttcgctcttgttgcccaggctggagtgcaatggcgtgatctgggctcactgcaacctccgcctcccaggttcaagctattctcctgcctcagcctcccgagtagctgggatcacaggcatgtgccaccactcctggctaattttgtatttttagtagagacggggtttctccatgttggtcaggctggtctcaaactcccgacctcaggtgatccgcccacctcggcctcccaaagtgctgggcttacaggcatgagccactgcgcctggcctcaacactcaaaattttaaaaaatatgtagacaggcacaggggctcacacctgtaatcccagcactttgggaagctgaggcgggaggatggcttgagcccaagagttcaaggccagcctaggcaacataacaagaacctgtctctacaagaaatgtaaaaattcactgggcatggctgtgtgcacctgtagtcccagctactcaggaggctgaggaagggacatcacttgagcccaggagttccagtctgcagtgagctgtgatcacaccaatgcactccagaagcgaaatcctgtctcaaaaatatacataaaagtaaaaaataggtagtattgtatattccaaggtgttgagtatttggagaaaaatcaagcatgggctggaatgcaaataaactactcaggtaggcttcatggagaaggcagacatttaaacaaaggtgcgagccactgcatcaggaagcatcttaaatttaaatattcagccaggcactggtggcttactcttgcaatcccagcactctggggagtcaaggctggaagagtgcttgagcccaagagtttgaggccagactgggtaacataacaagatctcatctctacaaaaaaatgtttacattaaaaataaatggccgggcgcagtggctcatgcctgtaatcccagcactttgggaggccgaggcaggcagatcacgaggtcaggagttagaggccagcctggccaacatggtgaaaccccgtctctactaaaaatacaaaaattagccgggcttggtggcatgcacctgtaatcccagctacccagggggctgaggtaggggaatcactggaactcgggaggcagaggctgcagtaagccgagatcgcgccactgtactccagcctgggcgacagagcaagactccgtctaaaataaaaataaaaataaataaataaatatccggccaggtgtggtggc

SEQ ID NO: 1559944 - DNA, 4001 bp, Homo sapiens
attagaggtctgagggtgagctgggcaggacacacctgggtttctggttccaggctatggaatctttcttgcttgcttgcattttttttcttttttgagacagaatctcactctgtcgcccaggctggggtacagtgcatgatcttagctcattgcaacctccatctcctgggttcaagcaattcttctgcctcagcctcccgagtagctgggattacaggtgcatgccactatgcctggctaatttttgcattatttatttatttatttatttatttttagacagagtttcgctctcgttgccctagttggagtgcagtgacacaatctcggctcactgcaacctccgcttcctggattcaagtgattctcctgcctcagcctcccaagtagctgggactacaggcgcgtgccaccacgcctggctaattttttgtatttttagtagagacggggtttcaccatgttagccaggctggtctcgaactcctgacctcaggtgattgacccgcctcggcctcccaaagtgctgggattgcaggcatgagccacctcatccggcctaatttttgtatttttagtagagatggggttttgccatgttggccaggatggtctcgaactcctgacctcaggtgatctgcctgcctcagcctcccaaagtgctgggattataggtgtgagccactgcacctggccacatggagtctttcttgagagagaaggtctggaagggatcagggtttatagaaagtgctagcatgtggattctctgaagacctggttccccccagctgggaggctgaaaagtccaaagctctcactgccctctaaaacaccccctccccagtaaacttctcactgctcactgatggttgcaggtcagctgagggcacaagcagaggacagacacctgtcactgggtttggtgagaggaagcttcagctacaactttgggggatgacagaaggcaggggtaggactcttcaggggaagttgggctgtaaagggaggggagagactggatggtagggggttgtgagggccaagcagtgatttcaaggtgggggcttgtagtctaaatgtaggaggaaaagagagctggaaggagccaggtctttaaggaggaggggttggggacgagaaggtggtgggggtcagggagaggagggaagagaggggtggcggctgcaggttccccaggaggcagcaggtgcctggatgaagcactctgatagcgtttttgtttttttttttttttttgagatggagtttcgctctgtcacccaggctggagtgcagtggtgcgatctcggctcactgcagcctccgcctcccgggttcaagcgattctcctgcctcagcctcccgagtagctgggattacaggcgcctgccaccacgcccagctaatttttgtatttttagtagagacggggtttcactatgttagccaggatggtctcgatctcctgacctcgtgatccgcctgccttggcctcccaaagtgttgggattacaggcgtgagccacggtgcccggcctctgatagctgtttttaatgcttcctccccccacccctcaaggggtttgggggaactcacatccgtgttgcaggagcggtgccgccttctctcacccagacagtacttgcccccgatggttggcctggaaagggtggtgggataggagagggatgaggcagtgggcgatgggggcaggggtcgcgctgccctcccgggtgggggtcctgagggctgacctggggctgtcgcagtgacggctagaagaggacacgccgccgccacaggtccggctgcagtcgccccatggagtccacggcccccaggctccgtccacaccctctgggcgcgacccaaaggggacacagacccgtttgtagcaccactgggtggggggagacaggaaggagtgagtccagcccggaggacactcgtcggccccatgcaccgttccccactccaggccccagccagagatatcagcctctccgggatgggcagaggcggggtctgaacatgcgaacagagtcaggttacgtaggagagtggtctgggagacagaccaggtacaagcgagaggcgtggcctgagcacagggtgcttaacggggaggggtgtagacaggaccacgataagcgtggagacgaggtggggcgtggcttcaggctggggaggggaggtctacaggcagtaggcgtggccagagccgagggcagcacaggggatgggcgtggccaatgagggagagagcaaacagtaggcgtggccagagccgtgggaatcattacacggtgggcgtggccaacgcgggagggagttaaacagtaggcgtggccagaaccaagggacgcatagacggtgggcgtggccaacgcgggaaggagcaagcagtaggcgtggccacagccgagggagcacaaatggcgggcgtggccaatgtgggagggagcagataataggccgaaggacaggcgggtaggcgtggccaacgcgggaggtggctcagggggcgtggcccagttgggggccctggccggcgctcacccccttgtcgatggtgtgcgtctggcacagcgtgccctcggcggccgggatgctgttggtgatgcaccggttgctcttgctcagacaccacagctcgctgcagacctcctgcgggccgaggtgcccgctcaggctcgcccccctcccttcctccctggggcagcccgcccggcttgggaggacccagatgtccggctcactgccggtcccagagcagagagcccggtgctcccttcctggctcgcggtgggtcttcgtgcatccccttgcggggcatggcctgtgacttatactctcccaataagctccatttatggagcactttatacatgccatatacctctttaggcagtactaccccatcttactgggagaaaaccaagcttcagacaggtaaggtcacacagctactaagggaatagcctggagtttaacccagctctttaattcagagtctgtgctctaacgaactttgcaattcagttcctggtgccttctgagtttctggaaggaaacgtgggaactgctgaggaatgaacaggaaggatttggggttcttttatgggatgggcaaagtagccgaagagaaagtggtggttctgagaaatcggcctggatgatgactaggccaacggcctcatctctagttttttccagctgttggttctctttgttcccccatctaaactggagaagcccccaacacttttaagctatgtggaggggtgggagtttgggaggggacaatgccgagttaggtctgtgtgggacatgcctctctttctccaggtgaaaaatcagccccaccttcttcccgtctgaatcctggatgggctgaactagtcccagggactcactctgactcttaaagtccaggttaatatccctggagaagccccagtgagttcaggtgaagcaaaatctctgaccctcttggcccacatcctaagcaacctcccagcgtctttcctctaaaaagtaggtggtcctctctgaccctcttggcccacatcctaagcaacctcccagcgtctttcctctaagaagtaggtggtccttctgtaattatcaagtgtaatccccgctttgaacccaattcttgtaagctttccagatgtgggactggatcgatcaatggccacaggaaaggacccttcctaggtcagcccctgagagatacctgtacatatgtaagaagctggaagagttgttctcaaatacattctccctcaaaggtcctctagaatctctgccttctgccttatagaggacatttctcagctaaaaactcagactgtgtcctcttggccatatctaaaaatatcacatcagtcctgtcgcaatcccacttctgacacctcttcaagataatgatttcagctctgcttttgtcctcctctccacaaggaggcactgtggcatatttgagttgtgc

SEQ ID NO: 1559945 - DNA, 4001 bp, Homo sapiens
cctcatcactgtcctctgaagtgaggcgctcctcccaaaaccctcacacccccttctgtgctttgggctcaggtggggtgtgagggacaaggtttgggacattgtggaaggacccagcacagggggtgaggacaggggaaggggactcacctgtgcacagtgtatggggtagggggaggaggggggtctgcagaaggctcacaggcgtctgagctgggggtccagcccacagggtggtgtcgaggtgtgacacagcccagggcaccaggtggtggggggacatgaacaaggcagtgggtctggggccaaagatgaagcttgagagaggctcagggacagagacggtggtggccaacaggatgtcagtgagggatctgcactgtggcgtgtgtgtgtgactgcatgtacattacagcatgtatgtgagtgtgtgtgaccctgtgtgtgattgtgagcgtgtgactgcatgtgcattatggcttgtgagtgtgtgtgaccctgtgtgtgtgtgtgtgtgtgtgtgtacccaggcctggccattcctccagcccctcctccccgaaggcaggagggaggtggccagcgtgggggagggtgccaggcctggaggaggaaatgcctccgggaaatggaaatggcttagaaacagaggctctgtcccatcccatcccatcccggggatcctgaagggaccctaagctccacacccaaacctctccggccaggctgcggggacagggccgacggaaggtcccccgtggaggccaaggccgcgtctccccaggcagaggccccagcctgccggcctcctcccggctgcacatctggccgggccggcaggaggcagtccctgccggagagcagacaaaggcccagccggggcctgcgggaggagggggccggcgcccgggctggtcccccacaaccggccgctaattaaaggccctgagcccgaccgctggagacaccctgagacagacggctgtggcctcactgaccaactcaggggaagtgggcggcgccactcccacacccagacacacaaacacacactggcagcgacacacaccccgcgcaaccagagaccggcgctcgggcactgtagacccacaaaagacgcaggacgcctccaccgcagacacacacgccgacaggctcagtgcacactcacacacccggagacaaacacatggagacacacaaccacacactcccagacatgtgtaaacacacactcatttacacgcgcacacacgggacaagacagagaaacacgcggacacacaaatacacgcacccggggcctacacaaacagaaacacacacatacatacacagacaacccaaggagacagacacacaggcctacacgctgacacatacacactcatttgcatgctcacaccaaaccagagacaaactcacaagtcccacagacctagacacccccccacaccagacacacacacacaggtatttacacactcatcacggtcagagacaaacgcacacatgcttggggacacacacacaaacccagacacacacacactcgcctccagatctgcgcgcacatagcaaacccctatgcgcacacactgtccaaacacacagacacacaagagactcatccccaggcactgacacacacatgtaatgcacaaccactctgcccctacgtggacggacacacacacacacacacacacacagcgcaaacaaacccacggcaaccccgggcgtgatcagtggcgcgcgcacttgcggacctcaggcaccgaccggagtcgcacagcgggatgccctcccccatccagggcaccacagccccacgccctcacagcccgatgcggacacacaaagtcccactgaatcacgcacccccgggccccccgcccgcgccgctacctgcgccgcgcccggggcctccgcgccgtcgccgccgctgtctcgccgccccgcgcgcgcaggaagggagggagcgagcgagcgcggcggcgtggccaggggagggggcgcggggaaggcacttcctgagccgcctgccagggttataaaaaaacccccaaactgcgcgcggccagaaaccccgcccgcctgccgccgcccggcctgggccgcgggctggaccccagccagggacccgggaactcgggccgccccgcccgggaccagcgcccccgccgcgtgggagggggctggggaaccgcggggggcggggaggggacgaagcgggagaaatcgagtggcggcggggagaatgggtgggggaggggagaaagaatcaggtgggggatggggatggaggcagaattgggtgggtgggggttcggggaaagggaggaagagaagggagaggttgggggagggggaagtttgaatgggaaggggtagggggagatggaggcctggaggaaggggctgagtgaggtggggggaggtgggggcctggaggaagggctgagtggggtggggggaagtgggggcctggaggaggggctgagtggggtggggggaggtgggggcctggaggaaggggctgagtggggtggggggaggtggggcccttgaggaggggctgagtggggttgggggaggtggggccctggaggaggggctgagtgggttggggggaggtgggggcctggaggaaggggctgagttgggttgggggccacgggaaggaatggaggggggtaaggaatggggctggaggggggatgggagcatgagatgctggggttggggaggggagagcccacttcctcgccagcctctgcggcatcaacaacagctgttatttattgagggctgggcctggctcaaacaagcatttattgggcgcctcccgtgtgccaggcacggtgcccggggcgggaaataagtcccagctcggccccgccctctccgagctctcaggggggtttgatcggtcctgggcctggccttggtctctgtgccttaactcctttgcggtgacgtaggctcagctggtcccatttcacagatgaggaaactgaggccacagagatggggagagtgaaaattctgttggaaccggagccctcttggtcttggtcactctgggtctcgctccataaaatgaacgaatgcgtgaatgaggaggacctggatggttggggcagggctgggatttgaatcccaggcgcctggtacagtgcctggttccagggaagggcggtgacccccaggcctcacaattgcaggcatttcccaggaacgcccccccccagggagctggccagagccttggccttggctttgtctgagtctgggtttactcatccacacagtgggggtaataacagccttcccagggctggagtagggggtggaggaggggtttcattctgcagcaaagatttgttgttatgtgctgggttccagggacacagctgagaccaggagggcagcttcccaactcggaatttttccttttgaacttggaatgacctgtcattactcacgcatacagcaggtgctgcataaataccagactcctggagttcccaccacactaccttaccccaacctcctgggactccaggctagaccagaggtgcagcccccaccctcctgtttgctccccacactccctccttcccaccagggcctctcgggcccccatttgaggaacgagtctaagtcagccatttctggcctctgttagctgttcttctactacctatggggccctctttctccatcaaagaggtggtggcttcctttctttgctgtagatactaaaggctcccactgttagcctagtgactggtccagccacctgtccctactttttttttttttttttttttgagatggagtcttgctgtgttgcccaggctggagtgtggtggtgtgatcctggctcactgcaacctccgcctcccgggttcaagcaattctccagccccagcctcccgagtagctgggtttacaggcacctgccaccatgctcggctaattgtatttttagtaga

SEQ ID NO: 1559946 - DNA, 4001 bp, Homo sapiens
gtttttgagacggagtctcgctctgtcgcccaggctggagtgcaggggtgcgatctcggctcactgcaaccctccccggttcaagtaattctcctgcctcagcatcccgagaagctaggattacaggtgcctgccaccacgccggactaatttttgccgttttagtggagacagggtttcaccatcttggccaggttggtctcaaccttctgacctgaagtgatccacctgctttggcctcccaaagtgctaggattataggcatgagccactgcacccagcctacaatattattgatatgtgtattgtgctataatgcagacagtaggtgcttaatcgatgcttgatgattggagggatcattcaaaaatagtacacaggtgcctcctagggctggggccccctccccgccctccccaccatcactgcttctacctttccgtgtggcctgaggccagccactccactctcccaggcctcagtttccccatctgtgcagtgggggccaagtggactcagtccatgattctgtgacaccctgcggaaggtgcggccggcaggggctggatcaggagttgggtccctagaagaggccctcagctgcaccccggccccagggctccctcagctcccagacagcagggagtcccccggattggggatgggacagggagggggtgacctggcccaggtccgttcggtgcctcatggcctcatcggcggagggggtgggactgagctccggggcagcccgtggagggaaggggccactgctgaggctggagcagggaaggggaggaggctgactgcctctctgggccttagtttctccatcctgtcagggcagggatgaagtcacttgccatccacaccctcctcatgaccccagcctgcagggggaaagaggggggaagggaagcagccgccaagtgagccagggcgtcctgctgccagcagagcctgaaggcaggtgggtgagccccggcccgggcaccagctggggaagaggctgggtcccacctggaccctgtttccctggctccagcatttggacttctgaggcaccaagggtctagggtcctgggtatctctaggtactgagacagctgtgtggtctgctgcatccgtgcccctctctgagcctagagcctgggctggcccaggaagcaggaagaagtctgcaccagaaacttaaaacaaggggaggggggccaggtgcggtggctcacgcctgtaatcccagcactttgggaggccaagacaggcggatcacctgaggtcagaagtttgggaccagcctgaccaacatggtaaaaccccatctgtactaaaacacaaaaattagcccggtgtggtggtgcacacctgtaatcccagctacttgggaggctaaggcaggagaatcgcttgaacccaggaggcggaggttgcagtgagccgagatggggccaatgcactccagcctgggcgacatagtgagactcagtctcaaaaacaaccaaccaaccaaaaaaaacagggggagggggcttgaccttctgaccacccccaccggactctaagcctggtttgaggagtgggggtctaggtggtgaaaagtggggggctacaaggaccaccctaccccctcctcaatgggccctgcccagaatcaaggctctcccctccccgtgtgggctgcagcccggactggcggagggatctcaaggcaagccgcacctctgggcctcagtttcccccggagaaagtgggaggataggcagatggacttaccggctgcgcggagcccaggcagcgcgtcccggctccctgagcggccccagggcgagcggaagcggcggggcccaaggtgctgggcggggtggggagcctgggacggtccctcccaccgcggcctccgcaggcgcgcccaggcccgggtcaggaggggcggcggccccgggcgccctcgcgcggcgggcgcggatctgcggcaggggactgcccggcggacgcgagcgcaggggtcccggagccgcaggctggtgtcgggcgcccgggtccgggtgaccttggcaggctcgggcgggggcgcggcgcggggactgaccgccctcctctgccccggggctgctattccgggcgccgcgctcagggcccgggaatgtgcgcgaaccgaggtcaccccgccctgggtctgggagtcccgggcgctgcccctaccccgccgacgcccggattgcgtcccaccggcgtccccatccccggtcacagccccctcccctggtcctgcccctcacccctctcgcggggggtcgacctgctcgtggatggggaccctggcgcgcctgggctcccatccgggggttccccgacccaggtcccggtcacccccagcgcagggccccagcgcactggggagaggctcggccccgtgggccgcgcgcggggggcggagagaccctcccagctggcgcattcccgggcgctgctgtcaccaggggacgcgccccaccccgcctcccgccctccctgccgggccccggggctgccagcggggcttcagagccagacccgggtccaggcggtccctctccctcacagccgcggccacaccctctccggcctcagtttccccatcccagcagtgggcccggcagggatctccaccgcgaaccttccatctggaatccggctctgcgcggaccggcaacgcgagggggcaccccgggactccccccaccccaccctttcccgccgggcgtctgtgagccgccccgtgcccacccacgcagggatgagaccaggccctgggttctgggctccaccagtttctggtgtcgccccacggcgccccctggcgggcgggctgagggactggggcactaaaggagggggtggagggactgtcctgctccctgggctccacccaggctcggtctgagcaccccctcctccaggaagcccaccctgctgtcccacagcgctgaccacagggagagaggtttgctggggacatacagggtgttgctggtccaactcagtctgccctccagcctgtagcatgtcagcagagccacccatatgccatttattgagcacctactgtgtgcacagctgtgaacaacccagccagtcccaggccagcgggtaaggcagccccctggaatgtatgaccccccaccttctgacctggactattggagaaaatagcccaggcccaccactgatggccccaggttggggggtggtggttgcggggatgtcaagaaggccctcactgaaggggtcaagagagaagggcaggccgggcgcggcgcctcatgcctggaatcccagcactgtgggaggccgaggcaggcggatcacctgaggtcaggagtttgaagccagcttggacaacatggtgaaacccagtatctactaaaaatataaaacttagccaggcatggcggtgagtgcctgtaatcccagctactcggaagactgaggcacgagaatcgcttaaacccgggaggcagaggtggcagtgagccgagatcacgccactgcactccagcctgggagacaggcgagactccgtctcaaaaaaaaaaaaaaaaaaaaaaaaggaaagaaagaaagaaagaagtcagctcaggacatgtgtcaatgtgtcattaggacaattgtatcctcctcagatgtgccccattcccagatgtccagtccacagagctccactgggagtgcagacagcaggccctgtgccccgcagggaaggtatacagaaagcacagcgcccacagggagcacacacagcaggcattatgctctgcaggaagggtatacagcaggtgctgcatcttgtagaaatgcatagagtagactctgccctgcaaaggagtgtatacagtagatatggcaccttcagaggagtgcatacagcagtcactgcatcctgtagagagtatatacagcaggtgctgcatcctgcaaggaaggtatacagcaggtgctgcatcctgcaaggaaggtataca

SEQ ID NO: 1559947 - DNA, 4001 bp, Homo sapiens
cataagagaaaatggggggatggaggggcctgaccatcttcagcagaatccaggagggctcctcggaggcagtgacccacagcccagcctggaaggctggggaagtaggggagagaactcggagagggaacagctaatgctcagttccagggcacaccaatagtctgcgtgggggcttttttttttttgggacagtctcactctgtcccccaggctggagggcagtggcgcgatcctggctcactgcaacctctgcctccctggttcaagcaattctcctgccttagcctcccaagcagctgggacaacagatgtgcaccactatgcctggctaattttttatatttttagtagaggtgggatttcaccatattggtcaggctgctctcgaactcctgaccttgtgatatacctgcctaggccccccaaagtgctgggattacaggcgtgagccactgcgcccagcctggggcttgtttctttacacacacacacacacacacacaatttttttttttttttgagacggagtctcactctgtcgcccaggctggagtgcagtggcacgatcctggctcactgcaagctctgcctcctgagttcacaccattttcctgcctcagcctcctttgggagtagccgggaccacaggcgtccaccaccatgcctggcttttttttatttttagtagagacagggtttcaccgtgttagccaggatggtcttgatctcctgatctcgtgatccacccgccttggcctcccaaagtgctaggattacaggcgtgagccaccacggccggcgctacacgtatgtattttatttatttatttagagacagggtctcgctctgttgcccaggctggaatgcagtagtgccatcacagttcactgcagcctcaacctccggggctcaagcaatcctcctgcctcagcctcccaagtagctgggaccacagacatgtgtcaccatgcctggcttattaaaaaaaaatctttttttcttttttttggagagtgagtcttgctagcttgctcagcctggagtacaatggtgccatcttggctcactgcaacctccacctcccaagtccaagcgattctcctgccttggcctccccagtagctggttttacaggcgcgtgacaccacgcccagctaatttttgtatttttggcagagatggagtttcaccatgttagacaggctggtctcgaactccggacctcaggtgatccactcgccttggcctcccaaagtgctggggttatagggtgaggaactgcacccagccgtccttgtttccacggagtcgatcctctgtttctggccaccctacaaggaggccttctctgcaagacagcggggaacctcggtcctcggggtagtgtgtgggagataactgggggcctgtgatacaaaaacctgaaaaactcatactctaggtaacgatgaggaacgatggtcaattctggggatgtaccaaggcctaggggaatctccacataaaggcgaatcagagctggggaggaaggacgcgaaggctacggaaactcgcgagagcgcggttcagaggcaggggactgcgggacatgacctgaggaagggccaccggaagcagctggaggatacggggtctcccgcaccgaccataagggcgcacacgcgcagaaaggcgctaggcccgggggagcgcggtcctgaggcttcccccaggccagcgccgcgcgcgcgcgcgcacgcgcattcgcgccgcctccccgcgtcgcccaccggcccgcccgagacgcgcgcgaggctggcctgggccccccgttttctccccacaaacggccggcgcccctcaccgccgagaccccccatgtcagcccctactccccctctggggaagtctgagcctggagaacccgagacctcggggccgcgcgcttacctgagggatccgggcgcgagcgcagcgcttcgccaagtcttagcaaccggcccggcccaacccacctcaccccgcctcgtctccgcctggagccgcggagcacgacgggagcgtagttccaggggcgggatcttcgccaggccaaggtggggcaaggactacaattgctagtaggcactgcgcgccgccgcctcgccccgccccgctccggcactgcgctcacatgacctccgggcggcgggaggggaggagaggcggggccgctgcgctgggcgagcgctgagtttgcaggttcgaatcccatcaagcggccagggaaaactcggaacccgggggatctttggaaggttagcagagtgggaaggatgaggcagagggggtatatgacacccgtcccctgagtccgggatggggccaggttccagttctgcctgttactgcactccggcgtgggccgccctcaggtttgagttttctcaccagtaacgtaggtgaagaagacctcttgcctctcctgggccaaacaagcacatttttttttttttttttgagacgtagcctcagtctgtcacccaggctggagtgcagtgctaggctcactgcaacctccacctcctgggttcaagcgatttctggctagtttttgtacttttagtagagaaggggtttcaccaaaacatgcatattttatgagcaatttgttactccttccagttggacaggtttaaccaagtggttctcaacgggagggaatttgtcatcccctcccccaacagcttgacagtgcctggctgtaaccagctcaggctccgatgccagagtcttgacaaaccagtaaggaggaaaaagtgcagtgaaaggaaggtgacttcctttcagagttcgcagcagggaggcagctggtttaggcctccagaaaccccttcaaacttgaggctggggtgaggggctaaaaaaggggaactgggaatggtgggtgtgcaggggaggtgctgattataagctctgtgtgttcatgaattttggtggcttaaaagcgcaggctggcctcatcctaataagggccgggttgcagaccaccttgaggaaatctctgggattttgcaggtgggtctccgtgcttggcctgtctccagattagctctaaaacgttctttcttttttcttttttttcgagacagtctcgctcttgtcaccgaggctggagtgcagcagcacgatctcagctcaccgcaacctccacctcccagattcaagtgattctcctgcctcagcctcccgagtagctgggattacaggcacacgccaccacacctggctaattttgtatttttaatagagatggggtttctccatgttggtcaggctggtctcaaactcctgacttcaggtgatctgcccgcctcggcctcccaaagtgctgagattacaggcgtgagccaccgtgcccagcctgttcctggaacttttaggtaatcacataattagatgcatacagttaggtaaacctgcagagtgtgagggagtttatggtgagaaaggggaggacgtgtttcaaagaaagtgcatttcaaggtcggatgcggtggctcatgcctgtactcccagcactttgagaggccaaggtgggtggatcacctgaggtcaggggttcgagaccagcctggccaacatggcgaaaccccatctccactaaaaatacaaaaattagccaggcatggtggcaggggcctttaatcccagctgctgggaaggctgaggcaggagaatcacttgaacccgggagacgaaggttgcgatgagctgagatcgcaccattgcactctgttgcctgggcgacagagtgagactccatctcaaaaaaaaaaaaaaaaaaaaaaaaaaaaaaaaacagcattccaggaaactatttcgctctcagttgctttcttttttccttttctgaataaaaactcagactgctgtgagtttcactttttctttttttagcttaaatacacatctctccatccctggatgcctcatgcaaactagccaagagcccctgttttgctgatttgttttaaaa

SEQ ID NO: 1559948 - DNA, 4001 bp, Homo sapiens
atcccaacactttgggaggccgaagtgggtggatcacttgaggtcaggagttcaagaccagcctggccaacatggtgaaattctgtctctactaaaagtacaaaaattagccaggcggccaggtgtggtggctcacgcctgtaatcccagcacttgggaaggctgaggcaggcggatcacaaagcgaggacatagcagagtcatcccttgaaccctgggcagcctggtgccaaagctctaccactgcctgacaaacatggtgaaaccccgtctctactaaaaatacaaaaattagccgggtgtggtggatgcatgcctgtaatcccagctacttgggagtgtgaggcaggagaatcggcttgaacccgggaggtggaggttgcagtgagccaagatggcgccactgcactccagcctgggtgacagagggatactccgtctcaaaaaaaaaaaaaaaaaaatagccaggcatagtggcaggcacctgtaatcccagctactcaggaggctgtggcaggagaattgcttgaatgtaggaggcagaggttgcaatgagccaagacggtgccactgcactccagcctgggcaacagagcgagactctgtctcaaaggaaaaaaaaaaaaaaattacccgggcggatggtgcacaactgtggtcccagctactcaggaggctgaggcgagagaattgcttgagcccagaagtttgaggctgcagtgatcgcgccactgcactccagcctgggtgacaaagtgagactctgtctcaaaaaaaaaaaaaaaaattatcatttatgttcctcttgatttctcttggccttgcaggcccttgcctttgtctctctttttttgtctctctctctttcctgtctctgattcatcctctcccttgcttcaatctgtaaatgttgccctttctaattgaggtcacaccaagatcccccaaagtcacacctacccccaaagttggccaagcggctgatgcgggaggcaggcaccttgcgttctcgagagcggtcactcagctgggaaatggggacaaggtctgagggtgggaaagtgggcatcgtggccagagagtgcagccactctgccaccacacccttccccaagctcagggggccagcagtattcgtggggtgttgctgggtgggtgggggtaatgatacctggggccggggtgtcttcctgggacgggcctcccgtgccctgcgaatgtcctcctcacccaggcctctcccaggcccatcctggtaaaacttttgggcccaagaacctccacatggtccctgcaagagatatactttgataaggaggggaggacatgggatcacctggcccttctggacccctcctgtccttttaccctctgaagtctccctcagcctcttccccttggggacctgctccctagcctcttacccagcggtggggcccaggccccagggccccacaaggccaaccaacagtctggcccagctgtccaccggtcccccgaagtaggccccccaccttcagccacattgcctggaggagaagaggagggattattcaggtgggagttgcctggcttcttggccaggcccccatgttcctctgtgtccaccctctctcattcccacccactaaatacttcctccactattaatagattcccacagtttctcctggttctcccctggttgctaggaacccttagctcttcctgcaggcctcccaaaacccactttcccccctctcccaaccctcgccgttgctagggtccgcccccgttactagacacccacagttcctcaggggctacctctccacttctctgaaacccccctcgttgctatgcaccgccttcccctctgttggccctgtaggcacccgcaattcctccggtgtccccccgcccgatccccaccccgttactgagcacctccccccgttgctaagcacccactgctctcagcctccgagtccgcaacctgctggggccctcctgtgcttccgggagcctctgtatgcccgcccccttcggccagccaaccaatggcgcggcagcaactcgctgactggcacggagtttctccatctgtgcgcgggggaaggggccagagagaggccctagcgatggagcctggaattaaggtgggcatcgggggcccatctggggggattgctgaggcatcgcgggagcgcaagcgtgccctgtctgcccttccactcacctcaaagtgccttgtacgcgacagacccttctgttccctacactttcttgcaaagtctcccttacaaacctgacgcctctcttctgcacgaatatcttgccaaccccccttcttatttttacccctggcaggctcaacacaattcctttgaatacacattcttcccagcaaacatttcccttgcacatggagcccctccactttgcacaaacacccacattctggcacccaacctccttccttgtgcatataaatcccttgccttgcttgccaactgtttcccgctcacgccttcaactctctcgtgtacataccctcccccccacttgcacactgagtctctgttccctcacacaccctgttctctccgctccccgcccacctgcggaatggtgcgactgggagccctctgcttcctgtaggcctgacatttcccagaacacactcagccaagattcccagtgctgagtcaggaaccttggcatcccagaaaaccacctcccatcctatctttctttctctgtgtgtgtgtgtgtgtgtgtgtgtgcgcgcgcgcgttggaaagcctgctctccccacaacaggctgactcacccacttctcacagtctggaatagaggcatctggttggggcatctttcccaccactgggagagggagggatgccgatgcttcccccacagaaccccgctgccccaacccctcttgtcgggaatcaggcctctttgtctctattcccgtactgtgtgacctcagaaaagccctcatccctctctggacttctccttcccaacctgtatgaggtactaggtgggctcctgccttcgatttctctcattggtctgtgaaaaggtgactcattttagagccttggacctgtgcccaatgtctcccccagttgactcaatttcaagacaaaccacctcctctcccccttcagaggtgaacggctgactcaggagctgggtggcagctcagccttgggggcaaaatatatcaaaatcacctaggacaataaataatcctactgggctacaactgacagtgccaggcccggggccacatgcttcacatacatgagatcatgtcagatagccccgtagctgcaagcaaagggtagaggccggcagatctctgagcctctgttctcacgtgtaaaatggagccctggcatccctattgttcagccttggagaatgaactgaaatcgtgtcagggtctgatacagaacaagtactctatacatgacagagatttcttacggaaaatccaatggagcgtaagtcatttgctcagggtagcggagctgggaactggcagaggaaggtctcgaacccacacccgtgggaactccaagtctttgaaagtccgtcccgcccctgcgtgaagaatgggcgcgcggctggactcgtcaccgggggttttagggaaggttgaacttgtcattcaaccgtgtagggagggtggtttagtcacaggggtggagggagggggcccactggcgcgccaccaggaccccggtgccctagatgcatacctggccgcgcttcggatgctcagaggcaaaccccctccccttgggaggcggagtcggacaaggctccgtctcgttccgttccgtcacgtccggtggggcggggcttcggggctttcccctttgaggggagtatcggttaacccttgcgcggcggggcgggctggagctccgcgggccggaacccgggagtcggggctccccagccacacccctcgcgggatttaaagggataggaggggccgggtc

SEQ ID NO: 1559949 - DNA, 4001 bp, Homo sapiens
agacacccacagttcctcaggggctacctctccacttctctgaaacccccctcgttgctatgcaccgccttcccctctgttggccctgtaggcacccgcaattcctccggtgtccccccgcccgatccccaccccgttactgagcacctccccccgttgctaagcacccactgctctcagcctccgagtccgcaacctgctggggccctcctgtgcttccgggagcctctgtatgcccgcccccttcggccagccaaccaatggcgcggcagcaactcgctgactggcacggagtttctccatctgtgcgcgggggaaggggccagagagaggccctagcgatggagcctggaattaaggtgggcatcgggggcccatctggggggattgctgaggcatcgcgggagcgcaagcgtgccctgtctgcccttccactcacctcaaagtgccttgtacgcgacagacccttctgttccctacactttcttgcaaagtctcccttacaaacctgacgcctctcttctgcacgaatatcttgccaaccccccttcttatttttacccctggcaggctcaacacaattcctttgaatacacattcttcccagcaaacatttcccttgcacatggagcccctccactttgcacaaacacccacattctggcacccaacctccttccttgtgcatataaatcccttgccttgcttgccaactgtttcccgctcacgccttcaactctctcgtgtacataccctcccccccacttgcacactgagtctctgttccctcacacaccctgttctctccgctccccgcccacctgcggaatggtgcgactgggagccctctgcttcctgtaggcctgacatttcccagaacacactcagccaagattcccagtgctgagtcaggaaccttggcatcccagaaaaccacctcccatcctatctttctttctctgtgtgtgtgtgtgtgtgtgtgtgtgcgcgcgcgcgttggaaagcctgctctccccacaacaggctgactcacccacttctcacagtctggaatagaggcatctggttggggcatctttcccaccactgggagagggagggatgccgatgcttcccccacagaaccccgctgccccaacccctcttgtcgggaatcaggcctctttgtctctattcccgtactgtgtgacctcagaaaagccctcatccctctctggacttctccttcccaacctgtatgaggtactaggtgggctcctgccttcgatttctctcattggtctgtgaaaaggtgactcattttagagccttggacctgtgcccaatgtctcccccagttgactcaatttcaagacaaaccacctcctctcccccttcagaggtgaacggctgactcaggagctgggtggcagctcagccttgggggcaaaatatatcaaaatcacctaggacaataaataatcctactgggctacaactgacagtgccaggcccggggccacatgcttcacatacatgagatcatgtcagatagccccgtagctgcaagcaaagggtagaggccggcagatctctgagcctctgttctcacgtgtaaaatggagccctggcatccctattgttcagccttggagaatgaactgaaatcgtgtcagggtctgatacagaacaagtactctatacatgacagagatttcttacggaaaatccaatggagcgtaagtcatttgctcagggtagcggagctgggaactggcagaggaaggtctcgaacccacacccgtgggaactccaagtctttgaaagtccgtcccgcccctgcgtgaagaatgggcgcgcggctggactcgtcaccgggggttttagggaaggttgaacttgtcattcaaccgtgtagggagggtggtttagtcacaggggtggagggagggggcccactggcgcgccaccaggaccccggtgccctagatgcatacctggccgcgcttcggatgctcagaggcaaaccccctccccttgggaggcggagtcggacaaggctccgtctcgttccgttccgtcacgtccggtggggcggggcttcggggctttcccctttgaggggagtatcggttaacccttgcgcggcggggcgggctggagctccgcgggccggaacccgggagtcggggctccccagccacacccctcgcgggatttaaagggataggaggggccgggtcggccgaagcccgaaccgaaggagcgggcatgaggcgctgcccgtgccgtgggagcctgaacgaggcggaggccggggcgctgcccgcggcggcccgcatgggactggaggcgccgcgaggagggcggcggcggcagccgggacagcagcgacctgggcccggcgcaggggccccggcggggcggccggaggggggcgggccctgggcccggacagaggggtccagcctccacagcgagcctgagagggccggcctcgggcctgcgccggggacagagagtccgcaggcagaattctggacagacggacagactgagcccgcggcagctggccttggagtagagaccgagaggcccaagcaaaagacggagccagacaggtccagcctccggacgcatctagaatggagctggtcagagctggagacgacttgtctttggacggagaccgggacagatggcctttggactgatccgcacaggtccgacctccagtttcagcccgaggaggccagcccctggacacagccaggggttcatgggccctggacagagctggaaacgcatgggtcacagactcagccagagagggtcaagtcctgggctgataacctctggacccaccagaacagttccagcctccagactcacccagaaggagcctgtccctcaaaagagccaagtgctgatggctcctggaaagaattgtatactgatggctccaggacacaacaggatattgaaggtccctggacagagccatatactgatggctcccagaaaaaacaggatactgaagcagccaggaaacagcctggcactggtggtttccaaatacaacaggatactgatggctcctggacacaacctagcactgacggttcccagacagcacctgggacagactgcctcttgggagagcctgaggatggcccattagaggaaccagagcctggagaattgctgactcacctgtactctcacctgaagtgtagccccctgtgccctgtgccccgcctcatcattacccctgagacccctgagcctgaggcccagccagtgggacccccctcccgggttgaggggggcagcggcggcttctcctctgcctcttctttcgacgagtctgaggatgacgtggtggccgggggcggaggtgccagcgatcccgaggacaggtctggggtgagtgggacccatcctgcccttgagccacatcacgcaaaactccttattcctccgcctttgcttaggaagttctctacccatttactgttagttgcccaccagcaatttcatctccgggaacctcttccatccactgacctcctccctctgacagccaggttactaattcactccaggcaccccttcttaattctctcctttccccttcctgcactgtctccactcctgggggtctacaatggagggccactgaccgactttatggggcccaggaacccctgaaattgtaggactaaggagcctgccgtgcgtgttcacatacattgttgcagcgacggtctgacatctgtctaatcctctggaatctgaagaacactgggatagggagacaggcagggtgcactttctaccccacatttcttaatctggggcctgtggctgtcttaaagggtcacaaaccttcaccaccccttagcctatttgtatgtacatttttctagggagcaaagcgattcccccagcttgcatcagattcgcaaaagggctgtgtgaccccaaacgccaaaggatccttggcctagccgggagcccac

SEQ ID NO: 1559950 - DNA, 4001 bp, Homo sapiens
ggtagacagtgggacttccgtgagggagaagcagcatggctaatagagaaaggtatattagagacccagcctcgactgagaggtcgaaataggtacagagaagcagagactgaaacacggaactcttgtttattcggctctgggcgtcagtgttcttcgcccagcctggtcccgtgtgcttctaggtccaacctagtcgcagcccggggagggactggggaagacggtttcaggggctggagttaggggagaagaaatgtggagtagaagctccaacatacagataggcaaactgaagccgaggaggggacgagccgtgcccgaggtcacccagcgagctgggcactgcgctagccccctcgctgcaggccggaatcctgggaaccgagccgggcttccgcctcgcgccaccggcggcgcccatagctgtaggggtcctggggctcgtggctggccttccccgagggctccttggtggagacagcgaatccagtatatgatctccgccaggcggtgggtccggcatacgcccaggtagcagacgtgcccgcggtgctgggggacctggtgctggcctcgcctggagagggagcgtgggagaaaaccgggttcaaaccgaattgagagatggagcgtgatggaggtgggcacccaagcactccaagaccagcggggaggcttacagatcacctgcccgttccgcggccgggagagggcgctcgccctttacggtctccctcccgccctgtccctgctgccacccgggtttctcacctggctgcagtgtccaggtccccttgggcggagaaggcgaggagcaacagcaggatgaggatgtggatagtcatcgtgggcagggcgggtcaggatccgtggcccgtagttgcggccaccccgccccgttcccgcaccgggctgatcgcctctgggtgcagctctggagccaggtaccagggccagtccccacttcccaggcggggaacactgaggccaaaagtctgtgggaagaggccgcaccacaccagaggggcaggattcaaacccgggtccccgcttcccgcaccgcggctccagagacctcactgggtgtgtggggtcacaccagctgctgtctatccccctaggaggtctgtggagactcgcccccttcaaagcgtggggaaatggggcggggccaatgacacccgcaggtagctaagcagcgggattccaagaaaaggggtggcggcggggaagcgctggctctggttgtagatgcgacctcaccctcaccctgtcgggaagccggttagtagacagttgggaccctggaacctcgggggccaggcaatgcagggcaagtgcacatgcggccccctggagggcgtggagcgagggagaccccaaacacactgaggagcgcccctccggaagagaaaaggccgaggtgtcaggcactcgccggtgagggctccagttgcactgaagcaggtgtagccagggctgttcaacgaggagggtgtcctgggtcaaccaggtcgagtgcacagtattgtgggggacccaggaccccgtggccaggccctgagggtggaagggtgggtgcagacgccatgtctgcagcagaggcagagggacctcgtcttcacctctgtaagatgggtaggccctgccaccttacagctgcaactcccactgacctccatggagggcaagtccccagccctaagccccaagccattctaggggaggaagcagggccactcccccatgagaaattctatccttgcaaacatacacccccaacccactcagtgtccccagctgcagagggctgggcacagttgggccttgaagggacccgaacaggaaaaaacagccagagaggaacaatgtcgagtgttggggggaggtggggagactgttctgggaaacttgagggctggctgtgctggaaagccacccccatcccctactaggcaggacacgggtaccgcagaggggaggggcgcagacccaggagagggatgaaaagagttggacaaagaccctgagagacagctgtggaggacagggaccccgagaaggaaccaaggaaggggagcaagaggcctagagacgggggacgggagacgcagatccacagaatggcagccaccagcaggtgccaaggccggtccccccactgctgaggctggcactgcagtacctgcgaaaggaaccccaaacctcctttgcccccaggaaacaaagccagaccccagctgaggatttattggcgtaaatgcaaccatataaaaacataagttatgaaaaacacagtcacgatgtgccctccccatccccccagcccaggcccctaaaacccccttctgcgggagggagggagaggaagggggagccccgaaaccgcctaggaacgctcagcccctgggctcgtgcagggcgggagagccgggcctcagcgcatccggtagtcggtggagcaggacagctcgcacagctggcccttgaagtccaggtcgatggtgaagtccaggtcccgctgcagggagaggtggggcatgagggcggaacccaccaggaggtggtggcggggggcgggtgcaggcaggctatgcgacgatgagccgggctccagcttcctgcccatctccacgctgcagaccccaactgctggtcccaccctagcagctgccctgaccctgccaagggacagcaccacatggacacccccaagcccactagactcactcaggagtagagcccagctgctgtcccttgcccttggatttctccatcaggatgattcccatcagcaatgcagtgattgcttctttcataaaaaagaaaacctctcccaagcccacttcctcctcaggcaaacgttccagtgaaacacaatggtccagcctgctgtctccacttcctctcctccccccataccctccagcacatgaagatgagacaaagtcaccaacgcccgaggactcctcctccctctccagtatccgtttcccagctagtgccgtggtcccgggggctgcatgagtctttgtagggggtggtcctgtggctgcaggacatttaccagccccctggcccctacctaccagatgccaggaccaccccttctccggagtgacaaccacaaatgtttccacagacggtggcaaacgtcctgggggggggcggggagcggagggggcagtaaaactgcccagttgacaactgctgctgtcacaggctcgtgggtgtcccagggtccacattccatgactaccctgagtgccacccaccctcgcacccatcggccgggacccacttttccaacccagaccactcccggcgactccaggctccaagccttccatcctcctgcctgctcagacccaccacactggatctctgcccagaccctgtctccgagaagcccccccagctcccccggaagccccctgatctcaggtgatggcagctcctgccaagtgctcaggaggaaaaagaaaggggagcagaaaacaaaaagctgcctttctcctctcatgcctcccagctgggctagaaaaccccgtgcactctactgggggctgcctcttgccctggagcccacctacaccaacacctgtctgccctgctcccagcctgacagaggtcacctccaactggcatcaccatgtcactgacccccttgtctagagtggaagcaccaggagggcagggtttcagcctgggtccccaggcccataacttccggtgaatgctcaagcaatcctgctgtgtagacaggcatggggctgaggggcttggggacccgggaataggcagaggtgctcgcccccgccagctgcccccatcccccaccccggctgcccccatcccctacccccgctgccaccattcctcccccaccactccccccccaatctacactccccgccctagctgccaccctcccacccagctgcccggagcctcacgttgttcttggcgttgggccgcatgccgatggtgccgaagat

SEQ ID NO: 1559951 - DNA, 4001 bp, Homo sapiens
ccaggctggagagcagtggctccatctctgctcactgcaacctccgcctcacgggttcaagcaagtttcctgcctcagccacccgagtagctgggattacaggcgcccgccaccacacccagctaactatgtatttttggtagagacggggtttcaccatgttggccaggctggtctcgaactcctgacctcaagtgatccaccttcctcggcctcccaaagtgctgggattacaggcatgagccaccacgcctggcctgggcttaagtttctttaagtgtaagaggactaaatagttccttccccttagataccgcagcgtggcaagctcttcagaaacgccagatttctgaaagaagcagcaccttggagaatctgacgggtgctgggaaccctttctccaaaactgggcaaagagagagatgaccaggctgcagaatgtttctgttttgggggttgagggatggcgagtccgtgccgtaactccaattgttggaaggtcttttatccaatgggggacttgggggtattggggaggagggaggggctctgaagccacacagctgaatctttgggcaaattatttaactatttttgtgcctcggttttctcctctacaaaatggggctgtttaaaataaatgaattcagtatttgtcaagtgattaggtcagagtctagcatatattattttcccaatctccaggcctcagccttgccatctgcgcagaagaaatggggggactcacattctcgggacgcagggacccccagtcccccagctcacctgtggtactgagcttgcagtagctgaaattcgtctttgatgcggtcgcaggagtccgaggtggtgaatttgagttgctggggtaggtgcgaggagccctgtagggatggggcggcccgggtcaggcccaggcgtgggctggacccccctcaagggccggctaggagggagcggccgcgcagctgcggcgccccccctcctgccccacttcctgggcccgtgtttacggcccctggcgcgaccccacccgcgcttcctgccccccgcctctcccgggggaagccgagcgggtgggtgcgcccggagccgccccgtcccccgccacccccaggcagtgggggtgcgttttaaggcccgccctagatggggggcagggtgcgccctctaccgccctccaaagcgccgggagggagtgcacatccgaggggggtagaaacgcgccctagggagccccctccccaagttggggggcagcgattcctccctgcaaagtcctcttgggggaggggtctctctctcggtgctcgaaatcttccgggggggcccaaccccagattcccagcgcccttcctcggggacacgctcttccgggaggggtgcgcctcggatcaccccccccaccacaggcccccaaaggatccccgggctagaggtgcctcgcggggcttccggagcgccccaggcccgaggccaaggccgtccgaggccctgactgtcccggcgggttggggggggggggcgccaagccgggagctgcggcgggggggctcggggcccggaagctggggtggatcgggaactggagggggggtgtccgggggccggcggcaggaggggaggggggtcgcgccgggctgggagctggagagggaagacagggccggggagttggggggggcgccgggccggaggcaccgggcctgggggttggggggcgcggggccgggagccgggggtcgggggcgtagggcccggatccggggtgggggcgccggccggacgggccccgcttaccgaatgcctgctttgtggaaacatcatgtcaatcgcggcggggggcgcgggctgcgccccggctgtgcgccccggctcgggctgctgggggcgccgggcggccgcgcctttgtcccggcgccgatcggcagctcccggggccgccgccgcctcccgcgcccggcctcgcccgcttcctgcgccccctccccgcgcgcccggccccggcgcgccccgggccccgcttcctgcgcgcccggcgcccctccccgcccctccccgccgcccgcctccccgctccccggccccaccgctattgtctaatggcggcgacgccggcagtggccgcggctcggctgctgcggaggcttcggctccacctgccgccgcccgtgccccgtgcgcgccgccgaggggggggacgcgcgcgcccggggaggcctgcggatccccacgccggcccgcctccccgtggcccgcccgccgcggtgaccttgggcccggcccgcccccgccccgggcagcggcccccgccaccctctcctacccggcagccggccgggcctcggtttccccatctgtcaaagaaaagggacccggctgcccgcgtcgaagccgccggccctgctgtggcacgacctggacgcgtgccacggacgtgctctgtgaccttggctctggctgggcggtggttcttgctgagccttagtttccttttctgcagaaaggcagcggtaatgccgccttcctgagggaagccattcttgtgacacatttatagaacgcctactgtgtgccaggccccgctgctccagggccctggggtggggcggggcgggggtgggtccctgccctggtggtggtgcctggagacagacagagacaaattcacaagctgaattcctggcaggtcagatggtggggacagttctgcagaaaaaccagccgggagaatggcagggtaggaaggtgcaaagttaaagaggtgggagggaggatcagagacggcttcctccacccctaaagcgacctgaagaaggagggagaacagggggatggggtacagaggtagtcagaggcaggaccaacaggtgcaaaggccctggggcaggactgtgcctggcagcagagtgcccggggggaggtcaggaaggccggagggaggcagggccgggggcttcgtgcttttgtccagggcccccccaccccacagcagggcttgtgcttgggttaatatttactgctgcattttgagatttctaatcatttttgaacaaggggcctttgagttttcttttgcactgggccctgctaactctgtagctggtgaagcaggccagtccagcaaggacttgtgggtcttggggaggacttgggattttgctctgagtgaggtaggagccctggaaggctgtgggaggaggagggacgggacctggtggttggttggtttgttttttgagatggagtttcgctcttgttgcccaggctggagtacaatggcacaatctcagctcaccgcatcctgggttcaagtgattcctgcctcagcctcccgagtagctggattacaggcacgtgccaccacgccccgctaattttggagttttagtagagacggggtttctccatgttggtcaggctggtcttgaactcccgacctcagatgatctgcccgcctcggcctcccaaagtgctgggattacaggcgtgagccaccgtgatcagctgtttgtttgtttttgagatggagtctcactctgttgcccaggctggagtgcagtgatgtgatgttggctgactgcagcctctgccacccggattcaagtgattctcctgcctctgcctcctgagtagctgggattacaggtgcgcatcaccacgcctggctaatttttgtatatttagtagagacaggtttcaccatattggccagactggtcttgaaatcctgacatcaggtgatcctcccgcctccacctcccagagtgcagggattacaggtgtgagccactgcgcctggccctggacttgggcttttgctctgagtgaggtgggaatcctggagagccgtgggaagaggagggatgggacctggtggcggttattaaaggatccctctctctgccacgcagagaacaggtcccaaagaggctactgaaataaggctatgacattaaggtccccctttggcaggtgcgaaacacagtctcttcatcatc

SEQ ID NO: 1559952 - DNA, 4001 bp, Homo sapiens
tttgtgcctcggttttctcctctacaaaatggggctgtttaaaataaatgaattcagtatttgtcaagtgattaggtcagagtctagcatatattattttcccaatctccaggcctcagccttgccatctgcgcagaagaaatggggggactcacattctcgggacgcagggacccccagtcccccagctcacctgtggtactgagcttgcagtagctgaaattcgtctttgatgcggtcgcaggagtccgaggtggtgaatttgagttgctggggtaggtgcgaggagccctgtagggatggggcggcccgggtcaggcccaggcgtgggctggacccccctcaagggccggctaggagggagcggccgcgcagctgcggcgccccccctcctgccccacttcctgggcccgtgtttacggcccctggcgcgaccccacccgcgcttcctgccccccgcctctcccgggggaagccgagcgggtgggtgcgcccggagccgccccgtcccccgccacccccaggcagtgggggtgcgttttaaggcccgccctagatggggggcagggtgcgccctctaccgccctccaaagcgccgggagggagtgcacatccgaggggggtagaaacgcgccctagggagccccctccccaagttggggggcagcgattcctccctgcaaagtcctcttgggggaggggtctctctctcggtgctcgaaatcttccgggggggcccaaccccagattcccagcgcccttcctcggggacacgctcttccgggaggggtgcgcctcggatcaccccccccaccacaggcccccaaaggatccccgggctagaggtgcctcgcggggcttccggagcgccccaggcccgaggccaaggccgtccgaggccctgactgtcccggcgggttggggggggggggcgccaagccgggagctgcggcgggggggctcggggcccggaagctggggtggatcgggaactggagggggggtgtccgggggccggcggcaggaggggaggggggtcgcgccgggctgggagctggagagggaagacagggccggggagttggggggggcgccgggccggaggcaccgggcctgggggttggggggcgcggggccgggagccgggggtcgggggcgtagggcccggatccggggtgggggcgccggccggacgggccccgcttaccgaatgcctgctttgtggaaacatcatgtcaatcgcggcggggggcgcgggctgcgccccggctgtgcgccccggctcgggctgctgggggcgccgggcggccgcgcctttgtcccggcgccgatcggcagctcccggggccgccgccgcctcccgcgcccggcctcgcccgcttcctgcgccccctccccgcgcgcccggccccggcgcgccccgggccccgcttcctgcgcgcccggcgcccctccccgcccctccccgccgcccgcctccccgctccccggccccaccgctattgtctaatggcggcgacgccggcagtggccgcggctcggctgctgcggaggcttcggctccacctgccgccgcccgtgccccgtgcgcgccgccgaggggggggacgcgcgcgcccggggaggcctgcggatccccacgccggcccgcctccccgtggcccgcccgccgcggtgaccttgggcccggcccgcccccgccccgggcagcggcccccgccaccctctcctacccggcagccggccgggcctcggtttccccatctgtcaaagaaaagggacccggctgcccgcgtcgaagccgccggccctgctgtggcacgacctggacgcgtgccacggacgtgctctgtgaccttggctctggctgggcggtggttcttgctgagccttagtttccttttctgcagaaaggcagcggtaatgccgccttcctgagggaagccattcttgtgacacatttatagaacgcctactgtgtgccaggccccgctgctccagggccctggggtggggcggggcgggggtgggtccctgccctggtggtggtgcctggagacagacagagacaaattcacaagctgaattcctggcaggtcagatggtggggacagttctgcagaaaaaccagccgggagaatggcagggtaggaaggtgcaaagttaaagaggtgggagggaggatcagagacggcttcctccacccctaaagcgacctgaagaaggagggagaacagggggatggggtacagaggtagtcagaggcaggaccaacaggtgcaaaggccctggggcaggactgtgcctggcagcagagtgcccggggggaggtcaggaaggccggagggaggcagggccgggggcttcgtgcttttgtccagggcccccccaccccacagcagggcttgtgcttgggttaatatttactgctgcattttgagatttctaatcatttttgaacaaggggcctttgagttttcttttgcactgggccctgctaactctgtagctggtgaagcaggccagtccagcaaggacttgtgggtcttggggaggacttgggattttgctctgagtgaggtaggagccctggaaggctgtgggaggaggagggacgggacctggtggttggttggtttgttttttgagatggagtttcgctcttgttgcccaggctggagtacaatggcacaatctcagctcaccgcatcctgggttcaagtgattcctgcctcagcctcccgagtagctggattacaggcacgtgccaccacgccccgctaattttggagttttagtagagacggggtttctccatgttggtcaggctggtcttgaactcccgacctcagatgatctgcccgcctcggcctcccaaagtgctgggattacaggcgtgagccaccgtgatcagctgtttgtttgtttttgagatggagtctcactctgttgcccaggctggagtgcagtgatgtgatgttggctgactgcagcctctgccacccggattcaagtgattctcctgcctctgcctcctgagtagctgggattacaggtgcgcatcaccacgcctggctaatttttgtatatttagtagagacaggtttcaccatattggccagactggtcttgaaatcctgacatcaggtgatcctcccgcctccacctcccagagtgcagggattacaggtgtgagccactgcgcctggccctggacttgggcttttgctctgagtgaggtgggaatcctggagagccgtgggaagaggagggatgggacctggtggcggttattaaaggatccctctctctgccacgcagagaacaggtcccaaagaggctactgaaataaggctatgacattaaggtccccctttggcaggtgcgaaacacagtctcttcatcatcgtcatccactaggcagcctgctcccttgaatgaatgcaattgatttgggccttgggtgttcccatctgtaaaatagacttggaaccccaggctccttaccttggcaggtaagggtgatagccttcagtgatcaagattaataatctttaaagcagtgttttaatatttttattaaaaaaaaattttttttttgaggtggagtctcactgtgtggcccaggctggagtgcagtggtgccatctcggctcactgcaagctccacctcccgggtttatgccattctcctgcctcagcctcccgagtagctggggctacaggcgcccaccaccacgcccggctaattttttgtatttttagtagagacggagtttcactgtgttagccaggatggtctcgatctcctgacctcgtgatctgcctgcctcggcctcccaaagtcctgggattacaggcgcgagccaccacacccggcctaaaaaaattttttcagacacagtcctctgttgcataggctagagtgcagtggtgcaatcatagctcactgcagcctcccactcctgggctcaagtgatcctccgacctcagcatcctga

SEQ ID NO: 1559953 - DNA, 4001 bp, Homo sapiens
tggacctttaagtcccagagccttcgcctggccctaaggcatcagacagcactcttcacccctccacaccccccgcccactatggcatctgtctggtccctccaggaaggagaatgggaactgtgttctctttatttctgtgtccctggggcccagcactgagctgcgcgcgggtggccaccatgcctgttaaatgacttcactttgatgaggcaggaacatatccatgtctccctcaccagaacaactcccccgcccccggctaagtgcctagtgcgtgccgatacaccgcaagcacccagcaaaccctgttgtccggaatgccattcagagacaagggagctaggctcatgggttacgagacttgacccagtcatactgctgagttttgccctctgctatgctacgccttcccctccgtcataccgcaaaaccttctaaattcgcatccgtgcagcagaaaggcagactgcagattccaacagcaagtaaccaacctcgagagactgcttctctgtgaagctctagtgtaagtggcacgcactattaaccttaaaacgctcccggaaacacaagaaatcagggaagcttaactatctccagtgtgtctgaaaggttttcggcaggtaggaagagggggtaaaaaaaacctctccaaactaagaatgaaaagaaggaatacaatacctgcagaaaagatctgatgggaaagaagggaaagaatggtgaaatctacccaggctgcggaagaccaggagagccaggctgagccttcgctaggacccggaagacaccaaagcacaccgcgcacgctgccgcctcaggaccgaaacctctctctgcaatttctggtgctgggatacttttgccctgccacttctcaagatcgacaacttctcgagctcctgcagccaggatcagaccactagcttctctacaaccagtcgagctccacccagcatgtcccaactatcccctgtgggcaaactttgctcccaaaaggctctgattccagaagcagggagcaggcagctcgagaagatcggccctactgcaggccaagcgctaaatcctagtggggaaaggacacgttccctcctgcacagcccctcggcccctccaggccaccacaacagactgcctaaaggagaactgccaatgtcaccagccccagggcacatcaggtttccagctttatacgaacactcagcatctgcccctcaccatcctgtcccaagccagcacgcgccgggtacagagctggagcccggcgaggctgactctcgcgccggcagcactcggccccaccgcgctgcaccggggactaaaggcccgaccccgcgcagcccgacggcttccgggacaggcgccctgggccacgtgagcccagcggagaccctacacggccccgcgggcctagggcaggtcgggagagaggcggcccccgcggtccgcccgcggccccagacccagctccccgggtccgacctcacaaccccacgctgtagctccgcccccctagcgccgccattttgtggcgtcttcggaagaggaagccgggagtgcaaaccccggggtcgctgggggccggaaggactccgccgaaggtgaggggcaaaaacggcccacactgtctaagacgcccccacgaagcccaccgcggcgtctgccccaaccccgagtcccgcccgcctcctcggggcctggcggccaatccgcacgcagagccccgggagcgacggcgccaaagcccaatgagcggcgcgcgcgcgccctggccgcctctccggagggcccagctggggcaaccacgctcgggacgaaggcccggccggcggcagtctgcgcagcggctgcgtcgcccgcacagagccttccctccccgctccgcacccagcagccaacacaaacctccgtagccctggtccatgtcttcgacgcggcccaccagcagccccgtttactaggcgaccacagcacgcatgcgttcagcgcacctccgccatcgactactggaagaccaggcgcacacgtcactacttccgcgcgcccccattggctggtcttcacgagggcccgccctcgccgtcccagctggcctttcgggctgctacgatccagctccgtggcctaatgggagttgtggtcccaccgcggtgcccgacggcccggcccgcgcgcatgcgcaccccgcccctctgcccaccccgccccgcccgcgcggcacagtaacagagaaacccggaggtgggatgggaaaactttattaggtttggtttccagcttcggccacgcgggctccgcccgccccgagctcgggtcacggggcgcccccgccgccctcctcgtcgtcctccacgtcgaggcccgggatgccgcggatctggcgttgcagcgcccctcccagcaagggcacggcgccctcctcctcctcctctgggggcggcggcggtggcggcgacacggccccgggggctggctctgggggcacgggaggctgcgccggcacgccctctgcgccctccgagatccctgccgcttcgccctgcgccccctcgtccagggcaccgccctcagcctcctcctgctccttctcctcctcggggctgtcggtgaaagggttctcgccctgtggggaggggcgcggacactgaagggagggagcacaggcggggactaagctggggacagggcaggcccggaccagtgcctcaccttcaggtagcgctccagcttcttgctgatgagcttgttgttgagaatactgcgggccaccatgagggaggacttcttggactgctccatcatgagctgcgggcagggcagaaggagctggagaggctgctctgagtgccctacaagttgctgccccgaccctgccagcttagagggaccccaccccgcccctgcacccacgcacttccagccccaccaacggagggccactccacaagcatggaaccacaacctatctgatctttgttcaaattccctctccttccacaccacacttactgtaggtaaataaaaatacagatctatatatctctaactttacggctgtattacagaaatctgatttgcttacaaaaaagctataagcagtgaacaattaagaaactaagagccaaaggtgggtgcaacctgtaacaaggtgccaactaggctaataggcaaggagcactttggggccaacggggaagatataaaaacaggaacagatatttaatgaaacgtcttttttaacccacagaattccaagaatgaagaattattcccagtcatgcaagggtgaagagagtcttctctgctggtgggaggatcaactgtttccgtattttttggaaagcagtttgacacaatgtatgaaaagtaaaaatctgtctcattaatcccttcccagaacgtatcctaaatttaagaactggaaacatgcgtgcacactgattgtagtggtgaaaaatgggaaaacacctaaacgttcctcagtgcagaagaggttaaataaatcgtacattcaaaagaacatcatgcagcccttcaaatcgggctcatctctgcactggcataagaaaggtgtataatatagtactgtctgcagagcatgccagagccattttgtctggaaggatttccatcaatatgctgggccatctcatggtgggagtacaggcaaatctcactttgatcattataaaaaccataaggtaaaagaaggatatttttggtggggtgggagagcccattgagtccttcccactccatttacatgtttcagaaagccttctcacttgctgtttctactctctccatcttcatttttttttttccttagcacgttttctctactactggaggaaaatattaacagacatcatacatgctcacaataaactaaagatacacaattaggatactactatagaccgttcccccagtgactctcacttgccaacagtttatcctcctggttctagatgcccagataaccacaccataaa

SEQ ID NO: 1559954 - DNA, 4001 bp, Homo sapiens
aggtttggtcattagtgaccttgtatctcagtttcctcatctattaaaaaaaagagctccattactcagctaccccacagcacccaaccattcatcttctggtttcttcaagagtcctgtttttaaaaaccatgaaactgtcttccagttcttggtaagacttggtgagaattatattccaatcccagggatgtcagtaacaaccccatagtctttcctcctgaactaggaaagctacagaaaggctctggcagagctgcccaacttgggcactactgatgtttgacgccagatacttctttgcggtaggtgtcattgtgtataccgtagcagggcagcatcccaaacctccatccactagataccagcagcactcccactcccatatgtgacaaccaaaaatgtctccagacattgccagatgtcatctggggcagaatcacccctggatgagaacccactgggctgggggatggttgctagaaaaactggggttcttggaaagctcctgacctggcagccagggtagaggggactggcactaccttcttgcctatgccaacataaagtggtctacaaaggagccccacagactcacgttgcattctcagttctcaaaattccaagtagaatgcaggttacctggcaaccacacacgctcaagcctataataccctcaccaaacagggaggcctagtgtaagtctcctggccgagaagcctcatcagtcactgccaaggcaaacccaggaggccttggcaattcacccagtgatgatttacagtcgcccaagcatattgcggggggcggagaggggctctcggatctgtcacccactctccctttcaaatcccattggcctcccactggcctccctggctgatcttctaacaagccaggcagttcctgcccgtaagccttttacagcaaaagctccctgggccagatatctttattcgctccctccatttaggtctctgctcaaatgtcacctctttacagaaggctccaaccactccacgtagtggagcgacccccgcacggtactgaccaccctaaaatatatcctacactcgcttatttgcctattaagatcctcgcctctaagctgcttgaggaattcttgtctgtattcccaatacccagtctgtaccggacacggttcatttgacagacgcagagggaattaacatggaaccttgtcattccttgcagttcagcccctaggggcccaaggctccccgctcagcccaaacccttccaatatttacttatccccctagggcctggcgcctttcccagttctgaaatagacaaaagggggtggtgggtgggatcgggatgggggtgtagagctgcggcgtttttgcagagaaactgcgcgggggaggacgcgacaatggcgacggcagccgagcctgctgcctgctcgcaaggaccaaggcctgagaaagggaaacctaaggcgtcgaggtccaggagcgcaggccagggacggaggtggtgggggcggagacctcgtgcgctgaggcccggacccacggacacaggcgacagaagccaagacatcaggcggccgggagccgggacgccggctgcagacacagagagctgaggcaacgaggcgtgagggcagcgaccctgaggcgacgggccagcggcgccattttgtgaccgcagggaaggcagtgacggggccccaggggaggtgcgggcaagcctggtgcggcatccgcacgtccctgtcccatcccccacgcagagcccgaccccaccctgccaggcccacctgtgtagctcatggtggcgggcaacacaacatccgacgacgccggcttctgctgctctgaacatccgacgctgcgatagctgctgctaaccacagggtcccctccacacacacccgagccccgcctcccgaccgcattggctcataccggcctcggcttcacgtctattggaaggaaccgctgtctatctctatgcctcctcatatcagtggctggaagctgctggcaatctcgtgagagccccgccttgtccccgccttctgttattctaaggcctcagtgattggcctacagaagccggcagagaggcggagtcctatagaatttgagggggcggagctgtgcactacggaaaggcccaaggcccaagcatggtcgggctggaggagcgcccgtaccctggagacccgccagagggagtcgggtctacggctcagggcagggctgggatgccaactccgccaccgaggtgctgggtaggggacctagctaagtctctcaaattctctggccttcggctccaaaacaagcatagcaaagccatgttgagaagagaaaattaaaacagcaccaaacaagatgctggacacacgtttcaacattacgtgacaaagtgtgtgtaaagaaatcattctggtgccagtgcactgaataaatgtgattaatcgtaacaaaacgataatatatttatatggcatatgcttatatgtgtaataattccgtttgtattgtgtgtcattcgaatgctccttcaaacctgcaaaaagcttttaatcctcacttaaaactgaagcttggaactcatgatttgctcaaggtccttgacagttacgtgttaaaatgggagctttgcttctaaaaccctcctgattcactctgggctcgagagatcctgcaatagtgcagccgggcaccagtcatgtcctcagtctgtttcctgggcatatggaaaccctgccagggacaactcataatttctagagatgacagagctgcaccgaagagtacttaacacgtgtgtttgtgaaaactcattaagctgcgcaattacgacttctacgcttcgtgtgttttaaaactttttttaaggtatgctgtttctttttgatattgttgatttctttaggtgtaatagtggcatttacaacgttgagagaaacatactgaaatactaagaagttaactgatcttatggccaggatgtgcttcacacaattcagacaggtagagagaggaggaggaagcaaggagctataagataaatctctgacagctgaagacattggtcatgggttggtgatggatagatgagagtccattttactgtttgctctacttttgtatagttggaattctccatgataaactgttttaataaaactccccccacccaaatgaggcttctgcagaacttgctgccatacggaacaaagccacttctgatgtgttaagtgagcaaactccaaacatgaagcagagatctgacggataagcactctggcttcggggttcatctccccatcagcctcagggatgcctgcctgtcttccaaaccaaggcagggccccaggacacgtcttctgcgccctgcaggttcgttccttcatcgcacttgccacagtcatcattgtaccgatttgatttcgttcacatccaacaccctcagagaccacggctcaaaagctgagactttgctgcctgaggtgtattgaagtggcttgagcagagaagagcaatgctcagaaagttttaggaaaacatccccctgcaagaactggaggtgactcttccaaggacacacatgaccctcacttcactgcatgattggtggggaggaacttgccatatgactttataagctcttgtatcatttgactgttttttgtcacatctagcctataccacttttatatttcaaaaactgacttacgggccgggcatagtggctcacgcctgtaatcccagcactttgggaggctgatcacttgagctcaggagttcaagaccagcccgggcaacatggtgaaacccccgtctctacaaaaattacagatataagccaggggtggtggtgcatgcctgtgatcccagctacctggatggctgaggcaggagaatcacttgaacccaggaggcagagactgcagcgagccgaggtccctacactgcactccagcttgggcaacaaaatgagaccctgtctcaaaaaat

SEQ ID NO: 1559955 - DNA, 4001 bp, Homo sapiens
cactggcaaaaaagcacacagctacacagggcacaagtggggctgaaactgctgactgcccagccccaaaaccccactgaactggggggtacccggtgtctcaaacacacccatgtccttcccagctgatgagggaggaaactgaggctctaagcaagaaatggctggtccaaagtcaactgcctcgccgtgctaggcctggggctctcacttccacgggcctccagcccctaatgacatgcggagaagagggggagaggaggtcccggaagagaacgtcaggatgaactctccgtgtactcaatcttggagtagccacgggattaaagagtgaaatagggtgagtgagttgtgagggctcccccaactcaggagacatgagcaaaaaggacagggcgacttccacagacctctttgccaaggtccaggggcaccctgtaatgctacccaacaggagagtagccaagacctgggggtcctccttacccttcagcttctagaggaggtcctgtttcctccaaggagctgagagatggaggaagaacccgccccgatagacgagtttcgtgtaagatcagggagagattagaggaaagtgagacgtgttccccacaggagggggagcacgatgtggctgtcctctttggatgcagggaggagggaaaagagctaaggaggagaggggtggaaccacccctcctgtcgaaattttagtaccccacaccccaagatgtgaggaacctgagcatgaacgcggtagccatggggtgagcgcctggggccacgctcagctgccccgagacctcccaacctcgcccggggtccagggaggacccactggtctaggaagaaaacaggaaatcccgcccagacggaggccaggaccggaagtcccgcctttggacgggtgaggggcgccccgaggccccccaaaccatcccccgaccccgtggacgtggtccacggcccaggtagagatcccaggcgctctggaaccgcaaggtgagactgtctacgatttgcctcaggtctgacaggacgattcccacgggcgacccccttccagcgctcagcaaaggatcgctggcagacctctgccctctgatctgtgcaggccatacccctcccgtgagccgctcgccctcccagcgccccgctgcctcaggacggccaaatcctccccacaccgcggttaacaacgccgcctccactcacgtgcccgtagccagcatggccggcccggcgccgtcaccgccctcaaaagacatggcggcgccttgcgtcacgtccgcgcagttgccccgcctcctctccgcacactccgcctcccttatcggggccgcccgagatcaagatggcggccacaggggcttcatccgaaccagttgacaagggtgacgacagcttgcccctaagaaaaatggccccgcctagagcatttccatttgcccccaacaataatggccgtcctcatatgctcaatcatgaccacagtaaacgaaggcaagcgacctgacgtccctgacccacaataaacttcttcgacaaaagtagaggaaatcggtgctcgttaacaacatggcagccaaccgggcttaatcagcccatagtgtatattggctctccctccctccaacctgctcccattcggcacgaaggctggcaaagatccaacacggcagcatttcttgcttcggtttgccaggcttcaaaatggcggctcagcccgctttctcgcgacggtgactcagaaattcgtccggggccgcttcgtttctgggggcactgacggcttcatcccgttatcctgagtccctcagtgcctcttgtggtgtacagctcctctcacctcctcttctcttatccgttcggctcttccagctgtcgcgccccgcagagagatgggacagccccgtattaacatggccttagctgaccggcttaggccatgccctcgagcaaaatggtacctccttggcttcaattccagtatacaatatggagaaggaagtgggcgtttcaaggcgtgcttgccccaggtggtgcagctctcagaccctcccacttgtttacttcgtggcgagagggcgaacactgcgcctgcgcactctccgtagccggatccaccttcagcgtctgcgccacgtgactccgatccaccctcgaggttccagtggaataacccccttctgaaaaatggtttcacccgctccttctctagaacgggtcgggccgctaccactgtccggcccggaggggaactgttttctccggaagtgacaacacgctgactaggaaaaggaggaggcggggcagtggggccttcggcggcgactatggaaggagccggctacagggtaagcactgaggacgcattccctcgcttcagtgtatgcgaaacgccccgtctagtgatcagctcttctctcaggccttggctctcgagaatccggcacggccttggcaaacaccgatctcttataaacgcgccgtcaccctcccgtccaccgccccagggaagaacctcccatggccccgcccccccggctcaggcgactccttgagccctgccccctgtggaacgcacgtcagcatccgaacgcgggctggaccattctccccgccttggtcccggggcaatggccctcccggccccgccccctgagggtggctcctccctgggcccgtccctattggctccccaggctggtcccctcgcttgggccccagccctcgctggttccccccaactcaggtggtgtttgagaagggcggagtgtacctgcacaccagcgctaagaagtatcaggaccgagactctctcatcgctggtgtcatccgtgtcgtggaaaaggtgcgctgggagggagcagggctcggacccgctccgagcgggatgcaggcggtctgggatgcaggcggcagctgtaggagtttggtctggcggtcagcagtgggacctgaagaaggctgggtgtgggaactggaatgaggggcgggactttgaaaggctgagggtagaaactgggaaagtttggaaatttgcaacggaaagttttgggaatgtggtttggggagcgcctctaaccccgcctccctccttaccctaggacaatgacgtcctcctgcactgggctcctgtagaggaggctggagattccacccaaatcctcttctccaagaaggtaggctccacccgctttgcccttctccactcgctttttttctaggtccgtgctgttgtaagtcatttgagggacctgcgtacaatcccagacctactcgtggggcatgtgtgaccctgtttaggcttgggtactctgcctctccttttgctcctctctgtgaaatgggcagaggatgcccattcaaggaaaaagagcagggagcataagacgcacggtcgtggggacggctgacccctctctccctttgcttcttgggagatccctgccagggtgcaagatgtggattcgagttgcttgaagggaaatggcatttcctctggtgccagaggacagggcctgacagcctactcacccacttcgtcactgctcccggctttcccttcgttatgtctcctgggacttcccatggctggaccccgtcctgggcaattctgagacccagagataagtcagatccagacccacctaagccctgacccttactcactttttgagaaactgatagatgaggtcgaaaacgctaggaagtgttggaactttttgcacccagacagtctgattccagatccccaacgcttcctgggagagcagacatttgagctgggactcccaggatatgaaaggacaagaaggtatttcagggacagcagaacaaccttcaaggcacacggagaagttggatgcctctgtaggggggttctttagtggggaatgagacctccattggagctgatgagttccacccaggggccggaagtcagtcggcacccacagagctagtgacgagacactggaaggctgagctgaccacct

SEQ ID NO: 1559956 - DNA, 4001 bp, Homo sapiens
tggccaccttcccagcacacttccttccagagggaactggctggttctatgactgaggcctcagagagtcggggctgaaatggtgctggcgctgctctctgtgctgggaaatccacacggcttttcctacaagactgttctggcaggtcctctgttgtccctgatcccccagggtgcatcagatgacttcaggagcccatccgatgccctgggcttcctccatgagcattcatgtcacctgagcttgtgacagctgtaacctggctgcctcctgcatcagactgtgaattcccccaaggtcagggatttgtgtttgcaggacaggtcggccctaagcagacaatgcagggtgcgtctccttactgggtgagaagagcgagggcaggggggctgggtccttgccctgactctgtctcaaacctgctgtgtgaccttagatggctcactggccctctctgtgcctcattttcttccccattaaccagcgtggttgagccagagctgctgggctgcggaagacgctcttccgggaggcagtaagcacaccgccactgcacggattcaggcacagctgtggtccagcccaccagggtgaagggagcagggagtctggagtctgaatgaaatttgcaggccttttatgactcacgatcattgatgttggtgtttgctgagcacctattcagtgctgggattccacacctggcatctcacctatctgactcactcagggagttcaaagccccaagggaaggaagaggtttatccaccacctcccagaagccacgcaaggacccaagatgggatcaaccttctcatcccaccctttcacctacactatgagacaggagctttagttacagttcaccccattttacagttgcaaactcaggcccaggggcagtcagcatcttgaagggccacaactggaagaggcagggctgggacctggactcagaaagtctagatccggggcctgttctaaatcctgaccgccatcctgcctgcctttaggagggcagatattctaatccagatggaaaagtgaggctcagagagcttaggacactggcaaaaaagcacacagctacacagggcacaagtggggctgaaactgtgaggctcagagagcttaggacactggcaaaaaagcacacagctacacagggcacaagtggggctgaaactgctgactgcccagccccaaaaccccactgaactggggggtacccggtgtctcaaacacacccatgtccttcccagctgatgagggaggaaactgaggctctaagcaagaaatggctggtccaaagtcaactgcctcgccgtgctaggcctggggctctcacttccacgggcctccagcccctaatgacatgcggagaagagggggagaggaggtcccggaagagaacgtcaggatgaactctccgtgtactcaatcttggagtagccacgggattaaagagtgaaatagggtgagtgagttgtgagggctcccccaactcaggagacatgagcaaaaaggacagggcgacttccacagacctctttgccaaggtccaggggcaccctgtaatgctacccaacaggagagtagccaagacctgggggtcctccttacccttcagcttctagaggaggtcctgtttcctccaaggagctgagagatggaggaagaacccgccccgatagacgagtttcgtgtaagatcagggagagattagaggaaagtgagacgtgttccccacaggagggggagcacgatgtggctgtcctctttggatgcagggaggagggaaaagagctaaggaggagaggggtggaaccacccctcctgtcgaaattttagtaccccacaccccaagatgtgaggaacctgagcatgaacgcggtagccatggggtgagcgcctggggccacgctcagctgccccgagacctcccaacctcgcccggggtccagggaggacccactggtctaggaagaaaacaggaaatcccgcccagacggaggccaggaccggaagtcccgcctttggacgggtgaggggcgccccgaggccccccaaaccatcccccgaccccgtggacgtggtccacggcccaggtagagatcccaggcgctctggaaccgcaaggtgagactgtctacgatttgcctcaggtctgacaggacgattcccacgggcgacccccttccagcgctcagcaaaggatcgctggcagacctctgccctctgatctgtgcaggccatacccctcccgtgagccgctcgccctcccagcgccccgctgcctcaggacggccaaatcctccccacaccgcggttaacaacgccgcctccactcacgtgcccgtagccagcatggccggcccggcgccgtcaccgccctcaaaagacatggcggcgccttgcgtcacgtccgcgcagttgccccgcctcctctccgcacactccgcctcccttatcggggccgcccgagatcaagatggcggccacaggggcttcatccgaaccagttgacaagggtgacgacagcttgcccctaagaaaaatggccccgcctagagcatttccatttgcccccaacaataatggccgtcctcatatgctcaatcatgaccacagtaaacgaaggcaagcgacctgacgtccctgacccacaataaacttcttcgacaaaagtagaggaaatcggtgctcgttaacaacatggcagccaaccgggcttaatcagcccatagtgtatattggctctccctccctccaacctgctcccattcggcacgaaggctggcaaagatccaacacggcagcatttcttgcttcggtttgccaggcttcaaaatggcggctcagcccgctttctcgcgacggtgactcagaaattcgtccggggccgcttcgtttctgggggcactgacggcttcatcccgttatcctgagtccctcagtgcctcttgtggtgtacagctcctctcacctcctcttctcttatccgttcggctcttccagctgtcgcgccccgcagagagatgggacagccccgtattaacatggccttagctgaccggcttaggccatgccctcgagcaaaatggtacctccttggcttcaattccagtatacaatatggagaaggaagtgggcgtttcaaggcgtgcttgccccaggtggtgcagctctcagaccctcccacttgtttacttcgtggcgagagggcgaacactgcgcctgcgcactctccgtagccggatccaccttcagcgtctgcgccacgtgactccgatccaccctcgaggttccagtggaataacccccttctgaaaaatggtttcacccgctccttctctagaacgggtcgggccgctaccactgtccggcccggaggggaactgttttctccggaagtgacaacacgctgactaggaaaaggaggaggcggggcagtggggccttcggcggcgactatggaaggagccggctacagggtaagcactgaggacgcattccctcgcttcagtgtatgcgaaacgccccgtctagtgatcagctcttctctcaggccttggctctcgagaatccggcacggccttggcaaacaccgatctcttataaacgcgccgtcaccctcccgtccaccgccccagggaagaacctcccatggccccgcccccccggctcaggcgactccttgagccctgccccctgtggaacgcacgtcagcatccgaacgcgggctggaccattctccccgccttggtcccggggcaatggccctcccggccccgccccctgagggtggctcctccctgggcccgtccctattggctccccaggctggtcccctcgcttgggccccagccctcgctggttccccccaactcaggtggtgtttgagaagggcggagtgtacctgcacaccagcgctaagaagtatcaggaccgagactctctcatcgctggtgtcatccgtgtcgtggaaaaggtgcgctgg

SEQ ID NO: 1559957 - DNA, 4001 bp, Homo sapiens
aggtagagatcccaggcgctctggaaccgcaaggtgagactgtctacgatttgcctcaggtctgacaggacgattcccacgggcgacccccttccagcgctcagcaaaggatcgctggcagacctctgccctctgatctgtgcaggccatacccctcccgtgagccgctcgccctcccagcgccccgctgcctcaggacggccaaatcctccccacaccgcggttaacaacgccgcctccactcacgtgcccgtagccagcatggccggcccggcgccgtcaccgccctcaaaagacatggcggcgccttgcgtcacgtccgcgcagttgccccgcctcctctccgcacactccgcctcccttatcggggccgcccgagatcaagatggcggccacaggggcttcatccgaaccagttgacaagggtgacgacagcttgcccctaagaaaaatggccccgcctagagcatttccatttgcccccaacaataatggccgtcctcatatgctcaatcatgaccacagtaaacgaaggcaagcgacctgacgtccctgacccacaataaacttcttcgacaaaagtagaggaaatcggtgctcgttaacaacatggcagccaaccgggcttaatcagcccatagtgtatattggctctccctccctccaacctgctcccattcggcacgaaggctggcaaagatccaacacggcagcatttcttgcttcggtttgccaggcttcaaaatggcggctcagcccgctttctcgcgacggtgactcagaaattcgtccggggccgcttcgtttctgggggcactgacggcttcatcccgttatcctgagtccctcagtgcctcttgtggtgtacagctcctctcacctcctcttctcttatccgttcggctcttccagctgtcgcgccccgcagagagatgggacagccccgtattaacatggccttagctgaccggcttaggccatgccctcgagcaaaatggtacctccttggcttcaattccagtatacaatatggagaaggaagtgggcgtttcaaggcgtgcttgccccaggtggtgcagctctcagaccctcccacttgtttacttcgtggcgagagggcgaacactgcgcctgcgcactctccgtagccggatccaccttcagcgtctgcgccacgtgactccgatccaccctcgaggttccagtggaataacccccttctgaaaaatggtttcacccgctccttctctagaacgggtcgggccgctaccactgtccggcccggaggggaactgttttctccggaagtgacaacacgctgactaggaaaaggaggaggcggggcagtggggccttcggcggcgactatggaaggagccggctacagggtaagcactgaggacgcattccctcgcttcagtgtatgcgaaacgccccgtctagtgatcagctcttctctcaggccttggctctcgagaatccggcacggccttggcaaacaccgatctcttataaacgcgccgtcaccctcccgtccaccgccccagggaagaacctcccatggccccgcccccccggctcaggcgactccttgagccctgccccctgtggaacgcacgtcagcatccgaacgcgggctggaccattctccccgccttggtcccggggcaatggccctcccggccccgccccctgagggtggctcctccctgggcccgtccctattggctccccaggctggtcccctcgcttgggccccagccctcgctggttccccccaactcaggtggtgtttgagaagggcggagtgtacctgcacaccagcgctaagaagtatcaggaccgagactctctcatcgctggtgtcatccgtgtcgtggaaaaggtgcgctgggagggagcagggctcggacccgctccgagcgggatgcaggcggtctgggatgcaggcggcagctgtaggagtttggtctggcggtcagcagtgggacctgaagaaggctgggtgtgggaactggaatgaggggcgggactttgaaaggctgagggtagaaactgggaaagtttggaaatttgcaacggaaagttttgggaatgtggtttggggagcgcctctaaccccgcctccctccttaccctaggacaatgacgtcctcctgcactgggctcctgtagaggaggctggagattccacccaaatcctcttctccaagaaggtaggctccacccgctttgcccttctccactcgctttttttctaggtccgtgctgttgtaagtcatttgagggacctgcgtacaatcccagacctactcgtggggcatgtgtgaccctgtttaggcttgggtactctgcctctccttttgctcctctctgtgaaatgggcagaggatgcccattcaaggaaaaagagcagggagcataagacgcacggtcgtggggacggctgacccctctctccctttgcttcttgggagatccctgccagggtgcaagatgtggattcgagttgcttgaagggaaatggcatttcctctggtgccagaggacagggcctgacagcctactcacccacttcgtcactgctcccggctttcccttcgttatgtctcctgggacttcccatggctggaccccgtcctgggcaattctgagacccagagataagtcagatccagacccacctaagccctgacccttactcactttttgagaaactgatagatgaggtcgaaaacgctaggaagtgttggaactttttgcacccagacagtctgattccagatccccaacgcttcctgggagagcagacatttgagctgggactcccaggatatgaaaggacaagaaggtatttcagggacagcagaacaaccttcaaggcacacggagaagttggatgcctctgtaggggggttctttagtggggaatgagacctccattggagctgatgagttccacccaggggccggaagtcagtcggcacccacagagctagtgacgagacactggaaggctgagctgaccacctgcgctgccccagggcaggaggatgaagatgaagatgaagatgactctccaccttgctccacagccaaacacagccaaggcaccaggaagttgcgttacatcacttccgctttccaggttggcctgcatctggttggtagaatttgtcctgtgtcctggattccagctgcaaagaaacctgggaaatgtagtgtgttttttttgttgttgttattgttttttttttttttttttgacagtctcactgtctcaaaagagtgcaaagtggtatcttattgtggttttggtttgtatttacctggtgagtacaacagtgtccattgagcactccgcagcctgactgcagagccacctgctgtgtagcatggacctccccatgcagtgggagacatggggtcaagtcctggctcgctctctggctgcattgggtgaccctgagcaagtgctgtactttcttttttctttttttttttttttttttaatgagacagaatttgctcttgttgcccaggctggagtgcaatggcgccatctcagctcactgcaacctccgcctcccaggttcaagcgattttcctttctcaccctcccgagtagctgggattacaggcatgcgccaccatgcctggctaatttttttgtatttttttagtagaaacgaggtttctccatattggtcaggctggtctcgaactcccgacctcaggtgatccgcccgcctcagcctcccaaagtgctgggattacaggcgtgagccaccgcacccggcctgctgtaccttctttgtgcctcagtttccctctttattcaatggggctatcttccagggtagcctcgaggctaagatctgaatccatggccccttactgtctgctcctttcctctcctaaggactccagtgggggtgactcatgtgcttctgaggaggaaccaacctttgaccccggctatgaacctgactgggctgtca

SEQ ID NO: 1559958 - DNA, 4001 bp, Homo sapiens
acccctagtggagaaagattctacagagtcgccgctgcctcacagactgtgggacctttctctccaggaaccacgagccacggaagccagtcagcttggaagtcactgctgcggactaggggcaaccatctgccccctctgaccacatcaccagcccaggtctgctgggtcaatcagggactgcagccagtcctctgggaactccagacccagagcaaaggctacagggcaagccaaggtcatgatctggcctagggagcagggacactggccacagacctctggggctggctgctcccagcaccagcccacagaccacaataagacaccagatccatgggggatctgactgtcccaagcccttcagagcagccttcctccctgggccaggctgggccaggggcacccccactccaagtccccttggcctatgcaaagaggaacagctgggaaaacagctcccggcctcactgcaaggccaactgttactgccttggtggggagtgtaaacatgatgtgtgaccgagctggtaactgggagacacaaacagcttcgtggccagcgacagaggagcatgtagtggtctgcgttggttcctggacccttcacatccactgccaaccaagttcagcccacgagtgaactcctgctgcttctctgggaaggtaggagtggatgaagttgaaaagcagcccattggaggctctagttactccagcccaggcgtcttgctgagccccaagaggtctccaaatgagaggaagaggtcctcacaatcccaagatcaagatgcccccagagagcttccctggggggaagaggtgttcccccaaacactccttcctcccaagttttaacaagcgggtgcaggggcacggctcctcaaatccaagcccaatccctcttcctcttcagaatgttaaggctcagacaacttcagtgacttctaacacagctttcctccctcccctatggaaggaaagaactgttactgcctggtaaataatctgagagggtaatggaatccagagcagcacctccatggtccaaagcaccccagtaaccatgacgttccctccagagtcgttaagaagttcaataaaggctgagatcagtgtaaacccccaacgccacacacgtcaaatacaggaaacagaaacccctcctcaccaatcggcatcacagtcctcccaaaatacgcccctaaaacccactagggcctgtcccgccccgtcccagtcccttaaagatcacaaacatcacagtcctctgatttgggttcccctacgttctaagcagggctcccccaacgccgtggtgatataacccagccacagttggggaagcatcctccccagaagcccccacccctgtaaatacagcacagcaacggcttccacagcgccaaaaaggtacagccctctacacttgatgcggcgcgccccctcgatagcttagcccgcgcacgccaggctcgatctgcccgccgcgcccgaaaggtccagcccccggcccgcgcacgctgcggcctgcgctccccgtcccgcaaacttgcagcgctccccccaccgcctcagtggtatggcccgccgccaccgccccggccccccgaggctggtcccaccgcccccgctcggccacccccactcagctcctgaaggaggggctcgagggccgcggtccccccgccgggcacgggtggtacagcccatcgcggcaccgcggggggcccggacgcgaccatcgtggggggggcgttcggggacacgcgctggcgcactcacctgtcaccggcagccgcccagcctctccggcggggctctacccccgcccatcgccacgctgcgctggttccctttccttgtgtttcccggcagcggcaacggcgccggcagcggcagcggcggcggcgacgcctcctccgaggcaggcccaacggctagcacggcgcggccccccccgccccctccccccagcccccgcttaccgccccctcccaccctctggacggaaataccgccctctcgcgccacaaacaggaagtgacgtacaaagagccagagacgaactctgagagagcgagagcgcaagagcagggcagagaaggaggcgggctcacagcagggcgcctgcgcacattagacaactttgggcctgtgtgggttagagatgggcctcgctaggccgtggggcggaaaggcgagatggggctacgcaggcgcactaggactccgacgtctgctttccctagggcctagccgtagtgattatttcccggcagcccctagtccgtatttacatacgctttgatcttgttttactcagttctgggttctgacgctcttaaaggaccccggagcgggagttagttaggaggggtttccttttcagtgtgctcgtcatggttgagctcaggctctgaagccacacaaccccagacttgaatttcctcctttctggtgactgtgggcagaaggcttgaccgttttctgtgcctcagtatccacatctgctaaatggaaacaatcatcgctgtgtcgctggcttttgaaccattttaatgtaaacaaaacggtttttaccaattagttcattactgcaagatattaatgccacctgctctcatcgtacatattccagtgaatctgggatataacattttataatgcaacttgggcccataaaggccttaaaatcaccctgcggccgggcgcggtggctcactcctgtaatcctagcacttggggaggccaaggcagacggatcatgaggtcaggagttcgagacagcctggccaacatagtgaaaccccgtctctactcaaaatacaaaaaaaaaaaaaaaagccgggcatgtcggtgtgtgcctgtaatcccaactacttgggaggcttgaggcaggagaatcgcgtgaacccgggaggcagaggtttcagtgagccgagatcatgccattgcactccggcccgggcgacagtgcaagtctccgtctcaaaaaaaaaaaaaaaaaagaaaagaaagaaaaaagaaaaaaaatgaccctgcaagaaaagagctttgcacagatcctaatccgtatattagctagtatactggacagctgtgagacatctggctcccagcccctcctctctcataggggattgtgctgcctcctgaatttgggttccagtatgccatataacttggcaattgtatgcattggtaagtgagaaaaatgcctgactgagagttgaatcctgggtccacctcagtctgtgagagtgtttcaggcaaatcctgctgagggttcggctttcgttttctgagacgtaaacctaatgctggaactagccctttcttatttggtttctagcttggaacttgctgcttggtattcctaattcccggtcttccccatcagtcggtgttaataactctgaccaatgcctcccccttcacagccctaaccattttcatctattactgtctggtgacaggtctgtttcccccactgcacaggaaacacagtaaaggaagagaccaagactgtctcagagatcagtgtgtatccaacattgcccagagtgggctcttgcagaatgtttgtttcaagcattagcccttctgccctaatctagactcaaggttactgtgaccaaccctcttcactcctgtccacactgaacagctcacaggccattcccctacgtctaagtctcccctgggccaacttgaatcctagcccctcctagggcacttaattatgacacactgagatctcactgaaaccacccatgtgcttgtgtataaactccttgcagcactggtagtcaagggcagtggctttctctttttttttttttttttttttgagactcactgcatcgccaggctggagtgcagtggcgagatcttggctcactgcaacctctgccctctgcctcccaggttcaagcgattctcctgcctcggcctcctgagtagctgggattacaggcacgcgccaacacgcccagcta

SEQ ID NO: 1559959 - DNA, 4001 bp, Homo sapiens
ctcgatctcctgacctcatgatccgcccgcctcggcctcccaaagcgctgggattacaggtgtgaaccactgcgcccagccatttttgtattttttttggagacagcgtcttgctccgttgcccaggctggagtgcagtggtgcaatctcagcttactgcaacctctgcctcctggattcaagcaattctcccacctcagcctcccaagtagctaggattacaggcaaacaccaccacgctcaggtaatttttgtattttagtagagatggggtttcaccatgttggccaggctggtctcgaactcctgacctcaggtgatccgcccacctaggactcccaaagtgctgggattacaagtctgagccaccacgcctggcccaatgttttgtattttagtagagacgaggtttcactatgttgcccaggctggtctcgaattcctgagctcaggcgatctgcccgtcttggcctccccaagttctaggctgtgccagggttctgatccagttccttccacttggatcattgctctggcctcctgccctccccctcaaagaagcctaagctcctttcgcctgggtgctgggggaccctgggggatcatgagagccccgtgaaggaattctgagagtgcctggggaaacgacagaaagtttgaggtgccctactcatttgcaggaaccccacgagggttctgggggcctctgaggggtcatgggagtcctagggaggttctgaggacccccaggggatcatgggaccctcacgaggacttcaggggttcctgaacaatcatgggaaccctatgggacattctgagagctagagagatcataggagccccgtgagggtattgtgaggggccataagtaattacaggaagtcctgatgtggctgggtgcagtagctcacgcctgtaatcccagcactttgggaagtcgaggtgggtggatcacttgaggccaggagttcgagaccagcctggccaacatgctgaaaccttgtctctagaaaaagtacaaatattagctgagagtggtggcgcgcgtctctggtcccagttacttggggggctgaggtgagaggatggcttgagcccaggaggttgaggctgcagtggtgtgatagcgccagtgcacttcagtttgggcgacagagtgagaccctggctcaaaaaaaaaaacaaaaaaaaaacccaacccaaaccggaagtcctgatgtattctaggctcctgagagttccgatgaggtcacatgaaccccacgagtattgaggggtcctatgggatcacgggggctccatggaagttctgaaggtctctgggtaatcaaagggatgaagggagtccctcaggaggtctggggtgctctggaggcccatggaagccataggatgttttgaagagtcgtggaaagacaatgggggttgtgggtcactggagcctcacaggaatcctaaggggtctggtgggtggcgtcaggttctgaggggaccctgaggaatcacgagagcgtctagaggagttcaggaaaaccgcggaaacactacgaggagttcaggatcaaggggcaagagaaccagtggggaagaccggaacagactaaaaggctgccaccgccaaggctcaagggagcgtcctacagggcgcgatcctattgggcggcgggaatcacggggactaagagaggcggagcggctgagctaccgcagtggatgacgggactccccgcgaaaaaccgggcgcccaggcctggggaacgcagcgagcagcgccggccgggcagactctcaccagtgcgcatgcgtggctctccggcaccggtccgtactccagcgaggtgaagatctcgcgggcgcggggccctgcacgcgtcgcagccatcgcctaccccgaacgctttccgcgaagactgcggggcgctctgtgttaaggggaaccttgaggtccgaagagcgacacctccggttccagcccaaaggggcggggctaatgggaatggggtggggctacaagatacagagagcagccacgcccacactttttccttaggacccgatggccccgcctacgtcccccacggggaagcgtatttaggagcatgcgcactgcttaaaacggggaggaaggggagacggcgatgtgggtactttgcgaatagttaggagggctccggatttatgaggatcggcgtggccgggcacgatggctcttggctgtaatcccagcacttcgggaggccgaggcgggcggatcacctaaggtcgggagttcgagaccagcctgaccaatttggtgaaaccccgtctctactaaaaatacaagcattagccgagctgtggtggtgcgcgcctgtaatctcagctactcaagaggctgaggcgggagaatcacttgaacccagaaggtgtacgtttcagtgagccgagatcgcgccactgcactccagcctgggtggcaaagggagactgtgtctaaaaaaaaaatagtaataaaaaaaaagggtcgtcctattgatgcgtcttcccagtgccttgttttatagtagcaggaagtgcaggttttgttttaccttttattttcttgagacagggtctccctctgtcgcccagggctggagtgcagtggtccgatcacggcttactgtcgcctcgacttttcaggtttaaacattactcctgcgtcagcctgcacagtagctgggactacaggcaggtgccatcaagcctggctaattttttttttttttttttttttggtagagacaggatcttgctatgttgctcaggctggtctcgaactcctgggctcaagcgatcctcctacctcggcctcccagcctcaaagtgcagcttttctaattatattgactagaggtctagatctagatctagacctggcgggtctagatctggacgtattaggatctagagctggcaggaagtgataattcaaagataaaaagggtaccttttaggatggacattgagattaaggtttggaaaatgcaaccttcactgcaaagtaagggggccagttttggttgtggaaagagtggaagtctggcgctttttttttttttttaagagatggggtgtgggacgttatctcattgtattgcccaagctggtttcgaactcctggcctcaagcgatcctcttgccctggccttccaaagtgctgggactaccggtaggagccacagcgcccagccggaagtgtggctttcatagatacaggaagtgtggcactcagggatccgccttggggtttatttttgattgatgcgaggggcgtggcttgtcgataacgcgataccagcttgtgaatgaacactggggtactcggaagtgtggcatactccagtcctgtgtttaccgatagaccggaagtgtggcttcgtttacagttcggcacgtaggacggagggtagtgcgtctagagacacatattccccacggatttgacgatggtgttcggtcttgaatggaaatgtagtcttaggccagtcttaggtttttgaacaggatagtaggtatccggagtcgattgagggccagagcaggcactggggttcggatcctgggcaaagtttcccacgttgagggtctcgaggacgcctagatctctttcccagggccatggcgaacccgaagctgctgggaatggggctaagcgaggcggaggcgatcggtgctgattcggcgcgatttgaggagctgctgctgcaggtgcagtgaccggacccctggatccttgagtattcggggattttggcggggtgctcaaagatgggactgcagttcccagaatgcactaaggcgggaaccaggcctcggggaattgaggttaatgggcttcaagtttgctaagaaatgggagtggggggccgggcgcggtggctcacacctgtaatcccaccactttgggaggccgaggcgggcggatcacgaggtcaggagatcgagaccatcctggctaacacggtgaaaccccgtct

SEQ ID NO: 1559960 - DNA, 4001 bp, Homo sapiens
ggagggagtatgcaaagctgggctatctcagcacagcaaagaaagtactttgaaaatcttccactgccaagatcctaatgatctagaatgggctatctcagtccaacaagtctagctctagttgataatctactcattcccttcatggttatggagctgtactgggctatttcagcccaggaattctataatatgtagatttttcaatgccaagaacgcaaaggtctggaatgggctatctcagcaaaaaagtctgtgttctgtagctaattttttcctggactcaagatcagtgggttactccaacacagggaagatctgtgctctgtaacttaggcactggggctgcaaagggcaggaactctgagctttgaaaattcttctttccccaaaccttaagaacagaatgcagactgggccatctcagcgtagatggtctgtatttggtaaccttattgtgctctgggtctatgctgggctattttagcacaggaaagagtttactgggctatctcagcacagaaatctgaatacaaaattctttactccccagtctcaatgatctgaactgggctatctcagcctatgtttataaccccctattctctaagctagcaggattgggctatctcagtagagggagtatgagctctgtaacttccttgttccttctgtcggggtcttcactgcagccttgggggctctcatacagaggatggacattggggaggaatatgggaagagtgggaaaacagaccagtagggcactgaggtcacctgtcgaagcaaatactcctcctcttctttggagatgaagtcagggacatagtagattacaggtggtgcctaggatagaaagaccccctgaaggtgtggcccttcaacccacacagaggacatatcatcacagagcaacccctatgcctggagacaggctcaggatgtcctcagacaggtcagggtctaaagtcaagggaccagtgccattccagaatggactctgacagtaagaatgaatttggtggaagggggcagtcccaacccaagaactcaggaatcagcctgcctccttcaccctctgcaccctgagttctgacaacctgctccactctgaacggttccagggctgggactctggcgtcctgctcctccatcaacaccaactccttgcacccaatcctgtagggaggggaggacatactgaagtcactaggcctcccgccctaacaccatgatgcagcattccaccccatcacaggccaggcctcacctcagccctcttctgaaacgcacttggtctctaaaatctgagtcttcagcatcttacaagccacacagagagcccctacgttccatgcccggacacaatgagccccaagaataatcccccattactctgtccactaagggcccatccaactacacatatgccttctcaatcctcccacagagaacattctctggccccacacacagggagcctttctcaaaagctctacacatagcccccagggctgcactccagagcccctttaaacaccttgagaccccgcttcagacctgcaactgtgagcccggctatcaacactcagcgacccccgccccccaccgaatcccattctgtgcactcctgtgaccccaatctgagcctcctcagacatgtccaccctcagcctcctcggatccccccatttggacgcccctcggatttcccctcctgagcgccccttcactccagcaccctgagatctttagctctgaggctgactcccaaatcttcttccctccctgaaccattcagatccccgactccgagccttttaggactccaagctctgagcctcctcggactcctactctgggctcccccggatccccactttcagccctattgacatccatctctacccccagcactccccaaaactgaccgtccaccagcgtcccctccaatttccaaattcaacatccccatccccctcccagccatttccgccccacattacagacgcagagtccgcaggccaatgggagctcccagaggcttcaagggcccgccttccacccaatcggcgctctcactcagtattcgcccgcccccttcatgctcgcctaaggataggccgcgcctcctggcctctgagccattggcaggagggcgtgggcggggcatcgtcgtctggcactggccactcagaacttaggaactgaacctggccattggcggagtggaccccgatgggtgggacgggggcggcagccgtgacagccgcgggaagacatgagaggctgctagaaggacttcccgcggccagcgccatcacctgcccacgccgcagggaggtgagactgaaggaagcacttcctttcccgtcttctcccagcaagggaaacccccaatgacccgacacagagaggccatagaaacgtctttattgaagaggacaggagtcatgctgagtttggggacatgcagtgaaggggcagtcgtgagctgtccttggtggtcggggccccaggtccgccctggaccccctgggccttcaggttctccctcgagctgttggtctggcccaggtgctgtggggtcctttgaggccagtgactagaacgtagattgaaatcggggttccaggatttgagatcccctcagggccttggggccttccatttattagagatggaggctttaggatttggggttcccttagggctggggctcttggaatttggtgtcttgaaacccatggactcggggcattgaaattctccagtttccagggatgggaattcctgtgtggggtttcctggtgcctgtgaatagggcttgaggtgtctgggagcctggaatgcatatcctgactgcagtctcctccataccaggcacaaggacctcatgattgggtttcctggggacttgggattggattttcaaatttgggattccctggggatttgggattccatgatttgggggtcctaggagttacggcattggggtcttctaggggctgtaggacttgagggcacaggggagtttgggacgtgtgtactctagggtttgggatccccagagtcctagaatggggcctccaaattttggggtcccccaaagggggaagtcgttacttaaaaaatagagaattttctgggagtctggccagcacaggagctgtgggccatgtggggtgggcttcatacaaggcactgggggtttcttgagggtgcagagggtaggaagacttggggggtcctgtaattagcacttccaggactgttttggtgtctgtaaattaggggtgacagtgggctggttatggtgggtttcttcttgagggataagaacaagggtctttgttaatgaaggaagtctctgattgaggggttggaatctaagggcttcagggtgaccatggggtcacgacatcttgagaggactgatgttaaatggggaacaatgacatgaatgtctgttactcttttgctttgggggtgtgacctatgtttatttcaagaggacttaaggggcagtgtttgttaatggggaggtttctgatccagggttgggtgattcaagaatgttctgttgtaatgcattatgtggagagggtcaccatcatttggggtgatatggaaatctgttaatctgggaatctgctctgaggggttggggatagggactagcctgaaggtgctactcagggaatctctttctgggtgacatggggtctgtatttgggggttattatgggagtatctgttaataatggggcctcaatgatcgagggctggctaacaggggtctctactctggatgtgttactgggaatctctatctcagggtgactcagggctcctcgggtgtcaggagatgctagtggggactctgtctctttgtcaggtgtccagggcctctaagactgcatctccgccctcagcatccaggggaaccagcagcagaacagcaacctggaaaggaggatgacagggtcacgccctta

SEQ ID NO: 1559961 - DNA, 4001 bp, Homo sapiens
tgggggagggagtatgcaaagctgggctatctcagcacagcaaagaaagtactttgaaaatcttccactgccaagatcctaatgatctagaatgggctatctcagtccaacaagtctagctctagttgataatctactcattcccttcatggttatggagctgtactgggctatttcagcccaggaattctataatatgtagatttttcaatgccaagaacgcaaaggtctggaatgggctatctcagcaaaaaagtctgtgttctgtagctaattttttcctggactcaagatcagtgggttactccaacacagggaagatctgtgctctgtaacttaggcactggggctgcaaagggcaggaactctgagctttgaaaattcttctttccccaaaccttaagaacagaatgcagactgggccatctcagcgtagatggtctgtatttggtaaccttattgtgctctgggtctatgctgggctattttagcacaggaaagagtttactgggctatctcagcacagaaatctgaatacaaaattctttactccccagtctcaatgatctgaactgggctatctcagcctatgtttataaccccctattctctaagctagcaggattgggctatctcagtagagggagtatgagctctgtaacttccttgttccttctgtcggggtcttcactgcagccttgggggctctcatacagaggatggacattggggaggaatatgggaagagtgggaaaacagaccagtagggcactgaggtcacctgtcgaagcaaatactcctcctcttctttggagatgaagtcagggacatagtagattacaggtggtgcctaggatagaaagaccccctgaaggtgtggcccttcaacccacacagaggacatatcatcacagagcaacccctatgcctggagacaggctcaggatgtcctcagacaggtcagggtctaaagtcaagggaccagtgccattccagaatggactctgacagtaagaatgaatttggtggaagggggcagtcccaacccaagaactcaggaatcagcctgcctccttcaccctctgcaccctgagttctgacaacctgctccactctgaacggttccagggctgggactctggcgtcctgctcctccatcaacaccaactccttgcacccaatcctgtagggaggggaggacatactgaagtcactaggcctcccgccctaacaccatgatgcagcattccaccccatcacaggccaggcctcacctcagccctcttctgaaacgcacttggtctctaaaatctgagtcttcagcatcttacaagccacacagagagcccctacgttccatgcccggacacaatgagccccaagaataatcccccattactctgtccactaagggcccatccaactacacatatgccttctcaatcctcccacagagaacattctctggccccacacacagggagcctttctcaaaagctctacacatagcccccagggctgcactccagagcccctttaaacaccttgagaccccgcttcagacctgcaactgtgagcccggctatcaacactcagcgacccccgccccccaccgaatcccattctgtgcactcctgtgaccccaatctgagcctcctcagacatgtccaccctcagcctcctcggatccccccatttggacgcccctcggatttcccctcctgagcgccccttcactccagcaccctgagatctttagctctgaggctgactcccaaatcttcttccctccctgaaccattcagatccccgactccgagccttttaggactccaagctctgagcctcctcggactcctactctgggctcccccggatccccactttcagccctattgacatccatctctacccccagcactccccaaaactgaccgtccaccagcgtcccctccaatttccaaattcaacatccccatccccctcccagccatttccgccccacattacagacgcagagtccgcaggccaatgggagctcccagaggcttcaagggcccgccttccacccaatcggcgctctcactcagtattcgcccgcccccttcatgctcgcctaaggataggccgcgcctcctggcctctgagccattggcaggagggcgtgggcggggcatcgtcgtctggcactggccactcagaacttaggaactgaacctggccattggcggagtggaccccgatgggtgggacgggggcggcagccgtgacagccgcgggaagacatgagaggctgctagaaggacttcccgcggccagcgccatcacctgcccacgccgcagggaggtgagactgaaggaagcacttcctttcccgtcttctcccagcaagggaaacccccaatgacccgacacagagaggccatagaaacgtctttattgaagaggacaggagtcatgctgagtttggggacatgcagtgaaggggcagtcgtgagctgtccttggtggtcggggccccaggtccgccctggaccccctgggccttcaggttctccctcgagctgttggtctggcccaggtgctgtggggtcctttgaggccagtgactagaacgtagattgaaatcggggttccaggatttgagatcccctcagggccttggggccttccatttattagagatggaggctttaggatttggggttcccttagggctggggctcttggaatttggtgtcttgaaacccatggactcggggcattgaaattctccagtttccagggatgggaattcctgtgtggggtttcctggtgcctgtgaatagggcttgaggtgtctgggagcctggaatgcatatcctgactgcagtctcctccataccaggcacaaggacctcatgattgggtttcctggggacttgggattggattttcaaatttgggattccctggggatttgggattccatgatttgggggtcctaggagttacggcattggggtcttctaggggctgtaggacttgagggcacaggggagtttgggacgtgtgtactctagggtttgggatccccagagtcctagaatggggcctccaaattttggggtcccccaaagggggaagtcgttacttaaaaaatagagaattttctgggagtctggccagcacaggagctgtgggccatgtggggtgggcttcatacaaggcactgggggtttcttgagggtgcagagggtaggaagacttggggggtcctgtaattagcacttccaggactgttttggtgtctgtaaattaggggtgacagtgggctggttatggtgggtttcttcttgagggataagaacaagggtctttgttaatgaaggaagtctctgattgaggggttggaatctaagggcttcagggtgaccatggggtcacgacatcttgagaggactgatgttaaatggggaacaatgacatgaatgtctgttactcttttgctttgggggtgtgacctatgtttatttcaagaggacttaaggggcagtgtttgttaatggggaggtttctgatccagggttgggtgattcaagaatgttctgttgtaatgcattatgtggagagggtcaccatcatttggggtgatatggaaatctgttaatctgggaatctgctctgaggggttggggatagggactagcctgaaggtgctactcagggaatctctttctgggtgacatggggtctgtatttgggggttattatgggagtatctgttaataatggggcctcaatgatcgagggctggctaacaggggtctctactctggatgtgttactgggaatctctatctcagggtgactcagggctcctcgggtgtcaggagatgctagtggggactctgtctctttgtcaggtgtccagggcctctaagactgcatctccgccctcagcatccaggggaaccagcagcagaacagcaacctggaaaggaggatgacagggtcacgcc

SEQ ID NO: 1559962 - DNA, 4001 bp, Homo sapiens
ctaaccgggcctgcctaccccctggctgggagtgccaaggcaccgtcctctgcccaccttgatgctgtccacgtggggcttgatgtagccgcgggcttccaggtccagcacgtgcacggaggagagcagggtctggccggggccaaaggcggccgcctgcacgcgctgcaggatggcccggctggcttctgaccagcgcgacttctctgtctctcggaagccgtggatggcctgcacagagagctcggttaagcctgggagctcccagagggaacaaggaaactgaggcaaggaggggcagaaaacggcaaggggctggtttccctatgtgactcttgaccctgccctcaactcaaactcccctagcccctcaactatggccctacctaggtgtgacctcagtccttagtactcaccctgaggctacaattccaggtccccaatgctggcccggccccagcattcaattggctgaatctccctacaacttgaccccacccaagtgtcctgtctctgtctctcaacatcatctggctccacatccgtttccgcccctaaccttggtcccaggtcgcaaaagtgctctccctgaccccaaggtcctcatcccccaggtcccgcccctcccacagccagagtttcagcccagcccccaccatagcccagctcccaaatccctgcaatagctaccgaccccaaaaaggccctgccccatcccagcatgtgtctcccctatctccgcccccagcgtggttctgccctctctaaacctcgacttccccgtcccccccacagcatggccccaacccatcccggcgcttgactccacggaccccgccccaagcttggccccgccccatccatgcgctcgacgacctgaccacgccccaatcccagccgccacgttcttctgcactgtaactgctagcagcgtaatcgcaccccaaccctacacccgactccctggccccacccccacgctcgactgcgctgtaaccgcccccaagcgtggccacgccccatcccagcactggtccccactgtccccgcccccagcgtggccacgccccgtccctacgctcgcctcctgtcccgcccccagagtgcccccgccccatccctgcgctgtctcctttgtccccgccccagcgtggccccgccccatccctgcgcccgacccccctggccccacaaccccagcaccgtagccccgcccccacgctaaacggtactgtaaccgcccccagtgtggccctgcccggtcccggcgctcgtctcctctgtccccgctccaaatccccgctctaggtaccgcccccagcgtgtccccgccccatctgatgctccacgtccccaggccgcgcccccgacgagcccccgtccctcgcccccggcgctgccggtctcaccgcgtcccagtgatcgtattcgtagcggcggcggcgcagctcgggctccagttctcggctcagcgtctcctcctctgccgtgctcaggaagccaggccgcaccacggccgcgtcctgcaggcggctcagcacggaagggcccgagcctcgcacccagctgggccctggcagcgtccgcagcgccagcagcccagtcccggccataatcccggagcggggtcatgagagagggcagggttggggaacgcccccgccaaaagccattggcggtacctgcggcagcgattgacttccctcagagtcccgcctctcgctcatagctattggttgctgctagactcgccttcacaggctattggcctttttccagaacccgcctcctctcttgagcttattgggcgccacctcccgcctgacttacaccagtggctgagtcgcaagtccgtctgcagcttagcaccgcctctttaatcattagaaaacgtacaccctaggggttgcctggccaagacttcataaggggatatgggcagtatctggtctgaagtccggaagtcagggggactggggccaaggccacggttatggagtcgactagggctagaggttaagggcagagtacagtcaggccgagataagggtccggggtcaggggactgacgtcaaggccacgattatgtgtgtggtggggccagctatccagagttagggcttatggtcaaaggtcagagcgaggtatcattcatttccccgtctccgtatcactattactttaggtttgaaaatggcattatggttgtctttttgattcctcggccgggcgtggtggctcacgcctgtaatcccagcacttcgggaggccgaggcgggtggatcacctgaggtcaggagttcgagaccagcctggccagcatggtgaaaacccgtctctactgaaaatacaaaaaatgagccgagcttggtggcgcgcgtgcctgtaatcccagcgactcaggaggctgaggcaggagaattgcttgaacccaggaggcggaggttgcagtgaacagagatcccgccactgcactccagcctgggcgacacagcaaaacattgtctcaaaaaaaaaaaaaagagtcatcgttttttacaaacgcaaactgaaaaaaaaatatttacagaaaaaagatctctgggatttgcttccacataaatccaggctgtgggggcagggagggggcgggtagggaagaatcatctttgaccgtgaattaattgttgaattggtgtgataagtacgtggggtctcattaccctgttttctctacttttgtttatatttatttttatttgtttatttttgagacagagtctcactctgtcgcccaacctggagcgcagtggcacgatctcaggccctgaagatttgcaaccgctgcctctggggtttaagtgattctcatgcctcagcctcccgagtagctgggattacaggcaacgaaccatcatgcccagcttttttgttttgtttgtttttgagaccgaatttcgctcttgtcactcaggctggagtgcaatggtgcggtcttggctcactgcaacctctgccttccgggttcaagcgattctcctgcctcagcctcccgagtagctgggattacgggaagctgccaccacgcccaactaatttttgttttttatttttttggtttttgggtttttttttttttgacacacagtctcgctctgtcacccaggctgaagtgcagtggcgggatcttggctcactgcaagctctgcctcccgggttcacaccattctcctgcctcagcctcccgagtagctgggactacaggcgcctgccaccacgcccggctaattttttgtatttttagtagagacagggtttcaccacattggccaggctgatctcaaactcctgatctcaggtgacccgtctgcctcggcctcccaaagtgctgggattataggcctgagccaccatgcccggcctttattttattattttctccctctattgcccaggctggagtgcaagggcacgatcatagctcactgcagcctggaactcttgggctcaggtgatcctctcccctcagcctctcaaagctctgggtacttttgtatgtattttaaatgtgcataatgcaaactgcaacactgtaactgctgagcgtagcgcccccccgaccccggcccgaatgcttgcattttgaaaaatattgaccccatttctccctccagctacatctgcccccccaccctctgctccccttgatagtgtaattcctcgaaagacttgtctatgtctgatatgtttcctcctatcctttctggatccactccagcctggcttttggctcccacagcaccagaaaaggcctgatttaaggccaccagtgacatccacaatgccgaatccaatagccaggtctcagtctgactgttaatgagcctacatgctgatgccgcctacattttgttttttttgagacagagtctcgctttgtcgcccaggctggagtgcagtggcgcgatctccgctcactgcaagctccgctcactgcaagctccgcttcccaggttcacgcc

SEQ ID NO: 1559963 - DNA, 4001 bp, Homo sapiens
gagttccgcggatggcctggaacccgcaattggaggagttgagagcggccacgaggccacgccgcccccgcccgctcctgccccgtgtcccggtgcctgcgcgcacctgggcggcgggaagggcacggtgtccagctggccgtgcgcaggcagcggcgcgggctcggaccgcggcagcaggagcagggccggggtcatccgtgtgaagcagcggtggtcgtcgccgaacagcagtgcctgcagccgggcggtactcagccgggagtctgcggtgggtgggcacgcggctggctcaggggctgggggcccgggggcagtcgacccggctccccgtccctctccacgcggacctaccctctccgcggggctgcagggtcaaggccagcccggagccgcgccaggcccccgcagggcggtccaccgctaacaccaggtagcgggtgtctcgggaggggcagaggctctgcggagaccagggctcagcccggctggatggaggcttacccagccccgctctaccggtccccttcctcccatcgccactggttctacgctgttctcagtactgcagaccctgcaacaaatccatgccccccgccacggcccgggcactgccccatgcaactccctggtacctgggcacccggcagcccagccctcgtcacagtgacctcagggccaggcccagggtacagcaccagcagcgccagctctggggggccagctcctccaggcgggggctcctggaacctcagcgagggtgttggctcccaggtcactgcagccgggacagcaggggacgcctgagccattgaaggccacaccccccgggaatctttgggatctgtccctgccgctctggccactgtgcaggggacctcaagcgggggacaagggtgcccctcttagctgccttcctgcagccagggagcggtgacggcaggggcaggcaggggctgcgtctgaggctgtgggtggggctgccgccctggggtctctgggttggggtgcccgatgaagccccttccccgcagggagtatcttaggccagcggccctgagaacaggctggggctgtgggaagaagggttccactggccccgagccctgcgtcgtcttcaggggtggggagaaggcagcagctctctccctggcaccgaggcaggggcaagtctaagagctgggcttcggggacaggacagagtgtggtgcccaccttccaggccacggacccgcaacccagtcctaggaacaagaccacagcctccctgcccagggtgggggctctgccagcccctgatcttccctaggaggacccggcccacctgaaggaagacggcggtgccaagcttggggctgggccccacataccttcctccaggtgtaggaccaccaggcgctgccccccagggtcccgcagccaggcccccagccgccgtagagagggcaaggcagcctgcctgtcaccggtgttgcagaccccgaaggtggccaggtctcgggggccccagcgggccctctgcacggcccccaggaaggcctgctcataggcgcttagagcccccaccacccgcaggggggagctgctgccattgctgtccccgcccagtgccaccaggcacagaggctcttgtgggctgcctggaggccagtccaagtcttctcggaagatgaggccactggtgcccacagctggctcctctgctctgagggcctcagtccccagcagagcccccagggcagacagcactagggccaggctggtgagaggcaggtcccgcatcgtgggtgctgccaggggctgggctgcctgccttaagtgagccgagtggaaggtggggtgtttgtgcaggacagacccctatctcctctgccgcgaccttgggggacagtgcccggcgcccccactccaggcagagtggccttctcaaagagccctttctgtccctggcagcctatctccctccccagtgatagagctgggcctgatgtgtcaacatgccgtccttgagggccatccccagaagacacaggagtgggaaccaggctgggagtgacggccaggcaaccaaactagacagcgctgggggcggggggcccagatgtcctgggtgctgaggtgtgggcctggaggaggagggtcccaagtcagtgggggcgccctgtccctgctcaccctccccacccctggtgggctatctggagaccccaaggatatcgtggagtctgctcttccctccccagaacaggaccccagatcccctcctagctggctggtggggtctgtcctccaccaggccatctccaaggtacagccatctctcaggcctcccacaggtgtctcctggcgggccccaggccctccccagtcggcccaaactgggggatggtgctgtgcctggcactcccacacacactgacacagtagggcggcgctgcggacatcagtgcactcagggctgggggaggctgtttaatgagcggggggcagtacaaaagagcagccttctctcagtgggaaaaggcaagagcacctggcgctgggcttgctgggggagggagcagcttctcagttggttgggggagggggaggtatgttccctgggccttcggagggaagtgggggcctcagcattgggggcatgggagttggggggtgcaccccaggatttgaggggtgaactcccggaggctgagggtggaccccaggagccgacggatggaccccgggaggttgggggtggacccccggggcctgagggtgcatccctggggctggtgggtgcacccctggggcctgagggtgaacggcgggggctgctgggtgcacccccggggcctgggggtgaacccccgctgatgggggaggatggacccctggggctggtgggtgaaccccaggggctggtgggtggactccgggggctggtgggtgaaccccgggggctggagggtggactccaggagctggggggtggaccccagaggttggtgggtggaccccaggggctgggggatggacgccaggagctggggggtggacgccaggagctgggggatggaccccagatgcagggggatgcaccactggggccggggggtggacccctggagctggcgggggtagctggggtggtcccgggggccctgagggcgcaggccctgtggggggcatgggtggcagaggcaggcctcctggcgggggcggtggcaaagactcaggcagcggtggccgagggggcagaccgttcatcagcgggggtggaggccgcttcaccccaggggggccagcagggaggctgggtggagccgggggcttctccatcttaaagtggaactggaggaagaactagagagacggagaaaggttcagcaggcacgggtggggctagggcagggctagggccgccagggctgggtgggaaggagccaggctcggggcgagccactcacctgcttggtctcccggttccagtgtgtccagaacttgccctccgccttgtcgatctctctgctcggcacctgggagggcgggggacagagagggctcctggtccctgtgacctcagggcgaccatcaggcagggagcccgaggcactagcctccccagcccggactctaccctgggagcccaggagaaggctggtaagactttcgtggggcacagggttcagttctggagtgaaacagacctggcctcaatgctagcacgctgttggccccctccctgggcagtcaccgtttgtattatttgtttcctgatggccgccctgtccaggcatggggacaggctgtaggaagccctccagcagcctggcccaggaagtgaggtcacttggcaaaggcctcacaggcctggcgctcagccctgccggcctcccttctcattggcccagtggagcccaagcaggccctcctgcagagcccaatgggagaggtgccctgcccggcctgtgcagacccttctggctccgacttggggggggcccaggggaccccaa

SEQ ID NO: 1559964 - DNA, 4001 bp, Homo sapiens
cctccctctcaacctggggtccagctatcagagggaccttttctcccttgatcctagggttacctggctttgcagatgctgaattcgcaggtgctgcttctccaggtgccgctgctgctgggccaccttgtggaagagttgctggatcctgctgttctgagccttgagttgtgtctggggaggggtgaaaaccttggtgaggacccagcttgcctaccccaacctcttaattcatccactcatccatccttccaaatctccatccgctgaggccaggcaagggagtctttcttttttcttttttttcccaatgacggggtctcgttctctcgcccaggctggagtgcagtggtgctgtcacagctcactgcagcctccaactcctggggtcaggcgatcctcctgttttcagcctcctgtgtagctgggactacagtcatgcagctctatgcctggcttattttttattttttcagacagagtctcgctctgtcacccaggttggagtgcagtggcgcaatcttggctcactgcaacctctgcctcccagactcaagtgattcttgtgtctcagcctcccaagtagctgccaccacacctggctaatttttgtatttgtattttattttatttattattattattattttgagatggagtcgagctctgtcgcccaggctggagtgcaatggcatgatcccggctcactgcaacctccgcctcccgggttcaagaggttctcctgcctcagcctccccagtagctgggattacaggcgcccaccaccacacccagctaatttttgtatttttagtagagacggggtttcactgtgttggtcaggctggtcttgaactcctgacctcaggtgatccactggcctcgccctcccaaagtgctgggactacaagcgtgagtcaccgcacctggctttatttttattttatcgctattatttttttgaggagtctcactctgttgcccaggctggagtgcagtgctgcgatctcggctcactgcaacctctgcctcccgggttcaagagattctcctgcctcagcctcccaagtagctgggattacaggcatgcacaccatgccaggctaattttttgtatttttagtagagacgaggtttctccatgttggccaggctagtctcgacagcaggtggaggctccgtgagccactgcgcccggtcgttttttaattttatatttattttattttattttatttattttgtgtgtgtgtgtgtgtgtgtgtagaagagacgggggtctcgctattttgctttaggtggtcttgaattcctggccttgagcgaacctccctcctcggcttcctaaggggggagcccatcccttgacgcagggaagcccagggagccacagttgcgcaccccgcccccacgccccactcctgtccatacccttccaagccaggagagccactaggggcgcggagaaccagccctggggacacgtacctgcaggctgtgaaggacctcagggtccacccggctctcaggggctaacgggaggtcggtggacccctcggttccctgacaggcggacccgcacgcgctcaggcgccgctccagcgcgctcagctgactgcgggtgcgctccgcgtgttcgcgcagcccctggccgagctgcaggagtccgtgcgccaggacattcatctcgtcccaggacgcaaagcgcggcgacttggactgcacgggtccgccctgagcgctcagtagcacggcggtggcggcgcagagcatcagggctgccccggccgtcggagcaccgctcatcctcttaggtagcctgggagcggggattcggggactctcggggacgttggggttccaggtgcgaggactggagacgcggaggaccgggggtaagacccgcttggttgcagaagccgctggaaagaatcggatcacagtcgtgtgaggatccgctcagctcggcttctccccgccgcgcccgaggacggtttttataagttgggtgcggagtgggcggaggagtcttggaggcggggtgcggggagtgctgggggcagggcctgtggccgggggtggggtcctgtcctctggaggcctggtagtctgcgggctgggggatgccctggggatgccaaactgtggctctcccgcccccgctccaggctcaggcaggccttcctctacgaaccgtgggagacgtgactcttctttcccccacggtgcccgcctctagtgtgaaattgcaagccccctattccgcccccgccttacccagtggcggagagggcgcacgcttgaggtcaagacttccagaccagcccggccaacatcgtgaaacccagtctctactaaaaatacaaaaaaaaattagccgggcttggtagtgcgcgcctgtagtcccagctactcgggaggctgaggcagtagaatcgcttgaacccgggaggtggaggttgcagtgcgccgagatggcgccattgcgctccagcctgggcgacagagccagagtacgtctcaaaatgaaagaagagaaaagaaaagaaaagaaagaaaagagagagaaagaaggaaagaaggaaggaaggacggaaaaagaaaagagagagaggtagggagggagggaagaaggagagagagagagaaaagagagagagaaaggaaagagagaaagaggaaggaaggaaggagggaaagaaaggaagaaggaaagaaaggaaggaaaagaaaaagagctgagttcagcggagcccggaactcaccaaaagtccttgccttgcggaggcttcgtgtgacctccatcccaagaccaggagagacttttctgggctcgcatgttccttcccgtgaaagggttcgtcatcgcagctgtgtttatgagattctttgacttccatttctcccctgagcccgaaattatgagtgccttagcggcaggacttggatcagggcctcacccccatagcctaccctctaccgccagggtctttaatgtcctgagctttgcctataataaagcaggaacttagagaacagaaagaggagacacaaggaagggaggaaccagggcggtcgcccatgactgtggtcgcagctacttgggagcctgaggtgggaggctcacttgagcccaggaggtagaggctgcagtgagccacaatggtgccactgcactccagcctgggcaacagagtgagatcctgtctctaaaaaagaaataaaataaaagtctgtggccaggcgcggtggctcacgcctgtaatcccagcactttgggaggccgggtggtgggaggggggggggggcggatcacctgaggtcaggggttcgagatcagcctggccaacatggtgaaacctcgtctctactaaaaataaaaaattagccgggtgtggtggcacgtgcttacagctactcgggagactgtgtcaggagaatcgcttgaactcaggagacggaggttgcagtgagctgagattgcaccacagcactccagcctgggtgacagagtgagactgtgtgtcaaaaaaaaaaaaaaaagtttcagacatggaagaccttcctctttctctccctcattcattcattcactcatgcactgaacgaaggtgctgctgccctctaagcccagcccctgtatgtttgaagttctcaggcaggtggagataccccaacattctgagcctggggtagggatagagttgggacaaaggaagtactgagtgaggctaaagggctggaccacattcattccacagggctaagtgttcattcaaacttgcaccgatctcctctgcctcttccctacccattcccctataccctgtcaggaaggggaggctggcacagaaaaccagcctgccaggaagaactcggggcaggttggctcagagcactggcaaggagaagggcattgactcagcagggctccaagccagctcattctctggaatctgaaactgcacacccaagggctgacgtgcaggctgccactcata

SEQ ID NO: 1559965 - DNA, 4001 bp, Homo sapiens
taagtcaaacagccgctaggtaggtcagagggtaatcgtgcttaggagaaaaatggaacaggcaagggggtgacagtcccggaggtgggggacatttaatagaggagtcaggactgggtgtgctgactcacgcctgtaatcccagcactttgggaggccgaggtgcctgtaatcccagcactttgggaggccgaggtgcctgtaatcccagcactttgggaggctgaggtgggaggatcacttgaggccaggagtttgagaccagcttggctaacgtggcgaaaccctgtctctactgaaaatacaaaaattagccaggcgtagtggcacgcgcctgtagtctcagctactcaggaggctgagacacaagaatcacttgaacccggaaggcagaggttgcagtgagccatgattgcaccactgcactccagcctgggcaatagagcgagactctgtctcaaaaaaaaataaaatagaggagtcaggaaaggcctcacagaagaagtgacacttgactggaacagtgcctcatgcctgtaatttcagcactttgggaggccaaggcaggaggattgcttgagcctaggagtttgagaccagcctggccaatatggtgaaagtccatttctactaaatataaaaataaaaataaaataaagaataagggacactttcacaaagacctgatggaagagagagaagaggaagagcattccaggcagagagaacagcaggtgcaaaggcccggagattgcacccaagaaatggcagaaaggggccaggcacggtggctcacgcctgtaatcccagcactttgggaggccgaggcgggaggatcacctgaggtcgagagttcaagaccagcctggccaacatggtgaaaccccgtctctactaaaaatacaaaaattagctgggcatggtaatgcatgcctgtaatcccagctactactcaggaggctgaggtgggagagtcacttgaactcaggaggccgatgttgcagtgagcagagattgcgccattgcactccaacctgggcgacagagcaaggctcaaaaaaaaaaaaaaaaaaaaggccaggtgcggtggctcacgcctgtaatcccagcacttgggaggccaaggcaggtggatcacggggtcaggagatcgagaccatcctggctaacacagtgaaattccgtctctactaaaaatacaaaaaaaaaaaaaaaaattagccgggcatggtggcgagcgcctgtagccccagccactccagagactgaggcaggagaatggcgtgaacccggaaggcggagcttgcagtgagctgagatcgcgccactgcactccagcctgggtgacagagcgagactctgtctcaaaaaaaaaaaaaaaaaaaaaaagaaatggcagaaatgtctatgaggccggaagagagaagggggaagcaggaggaggtaagaagtgtcagggcaaagtgtgaagggtcctgtgggcccggaggaggacttgggttttactctgagtcaggcaggagccatggagggttctgggctggagatggccacatttacttctggactcagacaccaagcaggggctcacaaggatccgggggtagggtcctctctttgtccccgatcactgacatgccccaccccccacaacagagattgagcaaccccccagaactgggacgtgtgtataacacccgctgccttttacactctcagcctggggtggcggggtggcctgggggcccccaagccaagctgtggtcggagtttccccacagtgagaatcaacctccacctaccttcccaccctctcacctctgatgcccaagaccctgaatccagcgaagctcacagaacacacaagaagtccaaggaagagccgagggtccagtggggcctctgagctagagacggggagagggcagtgggacagaaggagagaggaggcttggtaaccactccccagcccccagagcctgggagtggagctgggatgctgggcccaggagcccaaactataaatatttagcatttcccgaatgagaaatgagacagaattgccagacccccctgcccaggccaccagagcctgataacacaggtcagtgtcctggacatccctccctttcccccacaccctccactgcagagcccagagcgtgggaggctgcaggccctggggcagccaggcgtgatcccagccccagacacgcacacaccacacatagaaagaggaacatcactggggacttaccgtgtgtagggcttggctctaaactctccacaccttttacgtatttgatccttacaacctgagctggattctgtatgtaccctcattttacagcagggaaaactgaggctcagagagggtaagcaacttgcctgcggtcacacagccaaaaagagaccaggatgggagccagccaaggtagcttgactcagaaactcacacatgtacaccacagctgtcacacacatatgggcacataacagagtggacacaaacacacacacacacatttgcacgcacgcacacattaacacccagcgaaagtctgggtgcagtggctcatgcctgaaagccagcactttgggaggccggggcaggtggattacctgaggtcaggagttcgaaaccatccttgccaacatgctaaaaccccgtctctactaacaatacaaaaattagctgggcatggtggcatgcgccagtaatcccagctacgcgggaggctgaggcaggagaattgcttgaagccaggaggtggaggttgcagtaagccgagatcgagcaaccgcatgcactccagcctgggcgacaagactgaaattccatctcaaaaataaataaataaataaataaataaataataaataaataataataaagtgaggaattaattaattaaaataaaaaataaatataaaagacacagctgtaaatttttaaattgtgatagaaacaatatattcttaaagtgaaaaccctacctcagttacatgtgatttatgttttttggattaatctggattttataattagaaataaaaatgtaaggctgggcgcggtggctcacgcctgtaatcccagcactttgggaggccaaggtgggcagatcacgaggtcagcaattcgagaccagcctggccaagatggtgaaaccccgtctctactaaaaatacaaaaatttgccgggtgtggtggcccatgcctgtaatcccagctactcaggaggctgaggcaggagaatcgcttgaacccggggggcggaggttgcagtgagccactgcactccagcctgggcgacagagtaagactctgtctcaaaaaaaaaaaaaaaaaaaagaaaagaaataaaaatgtaagattttgagtccacataattatttgttgaaaataatacaagtcagtataatagagaagcattcatatattcaacactgtgagacaaaacaccagagaccttggatttgataattgatctgatatcctggacagtattcatatgtacagtgatagctatctttctttggtgttttttttgttttgtttgtgtgtgtggtgtgtgtgtgtgtgtgtgtgtgtgtgtgtagttttatggttctgagttggtggccagtaagttccatgtagtgttggcacttatttaattaactattcatgattttgttaatagcttgttatagaattcaggcatatatttttcagcataagaagccaagcacaccagcttgtcattggagagaatatattaagtgagaaaaacattcaggaatcagagctttaacatgttaaagttagtgctaaacattgtcatattggatctgaacctatcctaatatataaccataaagcttgacttctgcattggaactatgctttcataaataaaggatatctcattgattaaaaaaaatttttaaaaagacacagctggaaacataacagtttcaggcaacaactgtatgttccaaatatggtcacacacacatca

SEQ ID NO: 1559966 - DNA, 4001 bp, Homo sapiens
gaggaaggggaggactggaagccagcagcatttggtggggtcagagtcagggcctgcagacgggcattcagttctgcctccgtgccctgagacctaggtaccctctggttggcatggacaacatgcagaagtccctgcctggtcggtggcaatgacccagcccaggggggagtgtccgaggctgggtcctcagctccagagacctcaaccgctgtgacgaaagaggcgtctgagctgtaatcccagtgccctggaggggacgccgagctcccatgtttgtccacagtttcaaggggaacagggaggctggggggtcctgggtcagcctccaagccaatgtccctgttgtcacctctgcatggctgcttttggagtgctatggagtccagcgtctcatcggtaggtccagagaggcctggggctgcaggtgagagtgggggccagagaggagaggaggagggatgagacagcgatgagaataggatcaaacagaaaaaggagatcagagtgtctgaggccgaaagagctggccacaaatagtggatgtgagacggtcagaaccaatgggtggggtggggaagaccctggatgtcagggactggtccagaagtcaagccccagcagccctgcaggccctactcactgccaggtgcaggctcgggctcctgagtctctgccccgatccgggtccgggtcctggtccgcgtgtcgagatcctgcaggactcgcgcgcactccaggtgtccctgctgcagggccaggtccagcggccggagtccgtcctacaggggcgcggtcagcagggggcgcccgaggccctcttaccttccttccctccctctgggctcacccagcctttctttgcccgcgcagtgcctcccaacctggtcgcgcagcgccgggtccgctccttggctcagcagcagctccaggccgcggcggcagccccacgcggcggccacatgcagcggcgtcagtgcctcgacagatctggggcggcagcgcaagaggggtcattgcggactcagcctcccggcaggaaccccgatctccgctctggggacctggagccttcgttctcggcctcccggatctccgccgtccaccctggtacactgcccttggaacctagatgctatgacctcaggccaggacccaaacctctgccgtctgaccctggtgcctccactccaatatccgaacccttgatccccactttggtcctagcgcagccccattccacgccctcggtctgggaccccagcgcctccctcgagccctagcccctgcccttggacccccaagttccctccccaagatcccctaaaccccaccctcgagccccgaggcctggcccgggatgatggggcgccccttcccggattcccagacttcggcttggggagaccccgccccggacccaggctctatcttaccgagcgttggggtccccgccttggcgcagtagggccccgaggcaacgcaggccgcgcgggtgccgggctccggccgccaagtgcacagccgctgcgccgtcctctagcaccaaattagggtccgcgccgcagcgcagcagctcctctactgccctgcaaacaccgcggtcagagtggaccccggccaaagacccccactcctggcccgcccccggccccgccctcaccacggctcctcctcccgcagcgcatcccgcaacctgcgagccaggcgggcctccgagcacatgccctggctgggtccgaagcgcaccgcctggtcggtcgatttcctacttcccgcggggggcttgtgggcatgcgccgctcctcccctcggctcggggggcccctctccagggccgagcagggttcccagccaggctgccccgcgccgcacgggggtccacatcggggttcgagagctttagtgtcctcaggggcccttgacacccggaggcgctcaagcagggtctgggaccgccgataagagcccgggtgggaggatgccaccgggtgtgccactatctcatttaaaaacgggaaacgcgaaggcacccggctcgagtgggtggagctacgattaagaaagtccggggtgccccaggtcattaagtctcagggaatcttcttcaagggtggcctctggcagggagcacggccttatgagaggcttaggccgggcacggtggctcacacctgtaatcccagcacttcgggaggcccaggcaggagggttgcttgagctctggggttcgagaccagcctgggcaacttggataaacccagtccctacaaaaaaatacaaaaaactagccgggcgtgggtggcttgcacctgtggtcccagctacttgggaggctgagttggtagaatctcttgagcccggaagttcgaggatgcagtgagccatgatcacaccactgcactccagcctgggcaacagagcaaaactctgtctcagaaaataaataaatacataaaatagaggcttcaatttccaacccccaggccgagggcccagctcacgcctttaagcacagtgctttgggaggctgaggagagaagatcgtttgagcctactagtttgttgttgcttttcttttcttttagtgagtgcaggagtttgagaccagcctgggcaacggagtgaggccctatttttttttttttttttttttttttttttgagccggatcttaccctgtcgcccaggctggagtgcagtggcgcaatctgggctcactgcaacatttgcctcccaggttcaagctattctgcctcggcctcccaagtagctgggattacaggcatgtgccaccactctcggctaatttttgtatttttagtagagatggggtttcaccatgttgtccaggctggtcttgagctcctgatctcaggtgatccgcccgcctcggcctcccaaagtgctaggattacaggcggagaccttgtctttgttttatttatttatttatttttgagacggagttttgctcttgttgcccaggctggagtgcagtggtgtgatctcagctcactgcaacctcctcctccagggttcaacagcttctcctgcctcagcctccccagtagctgggattacaggcatgcaccatcacgcctaattttttatttttagtaaagacggggtttcaccatgttggtcaggctggtctcgaactcctgaccttgtgatccgcccacctcggcctcccaaagtgctgagattacagccgtgagccactgcgcctggccaagaccccgtctttaaaaacaatttttaaaaaatttccagtccccgttctgcgttgcccattttcaatccagcggaactaggacttcagtattttggagggctggacctctgagagtcttagtgtcccatctgcaaaatgtgagaatcctaacgaggttgatgcggggattgaacaggggcttgggcacaagggcctgacacacgataggttccaaaaaatgctcatagggaggaaaagcagtcactcaataaagctgtttgtgtttatttttgagatagggtcttgctctgtcacccaggctagagtgcagtggcgcgatgacagctcactgcagcctcgacctcctaggttcaagtgatcctcccacttcagcctctcaagtagctgggaatcacaggcgtgagccaccgagcctggcttaatttttgcatttcctgtagagacaggaaatgttgctatgttgtccagcgtggtcttgaactcctggcctcaagcaaccctcctatcatggcctcagtactgctgatggagctcttaaacctcccccttagggatgtatgatccaggcctggctcatcagaacatcacacaaccctggtacatgactagctcttaattgaaggtcatgtatccccccgggggagtccaatcatatccagatgctgagagaactctgccttgacctggattggggtctggggagtggttgaagccatcacacacctttccattggttggggggtaagcagggcacattgactag

SEQ ID NO: 1559967 - DNA, 4001 bp, Homo sapiens
tccatcctcccacctaagcactgtataaccacccactggccaccacccacaaacccacccacccaattcatgttctcatggttcttcatcaccctttaatcagatttcacccacacatccatccacccacccaaacacctaccaactcccaccattcatccatccactcatccacccatccatccacttatccatcccttcatccatccacccaaccacccatccatccatctgcccaagcatccatccatccacccatctgcccacccaatcacacacccatccacccatccacccacccacccatccactcatccatccacttatccatccctccatccacccacccaaccaccaatccatccatccacccacccacccaccagtgcatccatccacccacccaccagtccatccatggatccttccatccatccatccatccacttatccatccctccatccatttgcccaatcacccacccattcatccatccacccatccatccatacatctacccattcacccatctaccaaaccaccaatccacctattcgccccccatccatccacccacccatccattcatctacccctccaccggtgcccattcactcactacctacccttttttcttctacctctgactggaggattcaatcacacccaaagcagggggtaataagacacccaacagaggagttcacaggctgcttgggagaagacaatccgtgggcttgggggagggagaaacgcctgctaaatttaggaagctgcttgctggaagaggtgatggtaaataagaagggcctgatggccgggtgggatgttgagcacctgccttggaggaagctaggcagggcacaggccggcaagtgggaagtgcgtgggtgaacgagtgcatgtgtgtgtcagggtacctgggtagctccgcagcctggctaggactcagcacggcttctttctcccacatacaagggctcaggggcctggggccataaggggatcctccgtcctgggcctctcccacctccttcctcccctacctcctgcagctccagtgccccgagctcccggccacagtgcccactgccggctccggttacccactcccagctgggccacgagcagctccagccgctccactctgacacctgatcggctctgagcaggcggccgccccagggggccggggatgagccgagggaggagacaggctggcagcggactgcctgttggccaactggctctggcgggaagacacccacgatcttccctatcatcactggactgatttcagtttctggaaggagccatgctcttcctctttctcagcctttgcacttgctgttccccccaccaggaacattctttctgtacttcatgtcaccccaaccggctctacctgactcatgcactctttatttatttatttatttatttttgagacggagtttcatgcttgttgcccaggctggagtgcaatggcgcgatctccggctcaccgcaatctccgcctcctgggttcaagcaattctcctgcctcagcctcccgagcagctgcgattacaggccaccacacccagctaattttgtatttttagtagagacggggtttctccatgttggtcagggtggtctcgaactcccaatctcaggtgatccacctgccttggcctcccaaagtgctgggattacaggtgtgagccactgcgcccggctcactcactttttagatctttgctgcaacatcccctcctccaggaagccctcccggatgcccccagcctgggtcaggtgcctcctgtgagccccctcactgccctgtgccctctgcatcacccattgcaccccaaccacaccatgtcaccattacctggtcacatgtttgtgtccacccgcagccaccagggcatagatggtaccacctttgctctccagtgtgcccagtacaaagtaggtactcaacacatgattcttaaatgagtcctccaggccaccagccccattgaccttgagcaggacctgtcctgcagaatgcagaacctccagttggatgatactcagataacttggccggacgcagtggctcacgcctgtaatcccagcactttgggaggccgaggcggtcagatcacctgaggtcaggagttcgggaccagcctgaccaacatggagaaaccccgtctctactaaaaaatacaaaaatttgctgggtgtggtggcgggcgcctgtaatcccagctactagggaggctgaggcaggagaatcgcttgaacccaagaggcggaggttgcagtgaaccgagattgcgccactgcactccagcctgggcaacagagcgaggctccgtcacacacacacacacacacacacacacacacacaaatgagatattcaggtaactctgcgtggcattcaaaacccttaggctggggtccctgctgtccggctctgtccttacggaatttactaatccgtaaaaggggttgtggggacatggatagcctgtgtcccgcattttagaggtgactggagaactctcacgtaggcggccgccccaatttcccgcccgggtcatcggggagccccttcccaagccccgcaaacacctgcatgcaaagaggcaggcttccttctgacagcagataacatgtcgcctgcggcgtcagcaagaggcgcatgcgccttgccgtgggaggccgggtgcgcaggactggaacgcggttcctccttcttccccgccccgccccgcttccggcggaagcggcctcaacaagggaaactttattgttcccgtggggcagtcgaggatgtcggtgaattacgcggcggggctgtcgccgtacgcggacaagggcaagtgcggcctcccggaggtgagcgcgtctgagggtcccgagcatcgcgccccagggccgcgggctgggagcggccggatggcaggggggcattgtgggaatatcagggggcactgaggctagacaatgggagggacttcccagtgaggaaggggcgggaagtgacgcccctgcgcgccgggggacgccaacacgcccaactctgtggtcaccctgtcggggctgatcggggagagaggggatgtagttccaggaagaggggacgacaggcgcaaagggaggtgggaataaacacacctggagaacgattaggcctgggaggtttccagagccgggccaggacggggctcaaatgccaggctggggagttggcactttatcctgagggtgatggggaagggttttgccctggcgaggggactggacagaatgtgccagaaagatccctccagccactcagaggggaagtggagggatcggctgccccctccacgcactgtgggactttggggaagtcacttcccttttgggtctccatctccaaactttctgcaaacgaggtgaagatggccccattccataaggctggcccatgcattctgactcatgcatttaatgagcgctgatggtgtgcgcccgtccagaagccccactcttcactgctgctgttagtcactttattattattattattatatttttgagatggagtttctctgtcgcccaggctggagtgcagtggcgcgatctcggctcactgcaacctccgcctcctaggttcaagcgattctcctgcctcagcctcctgagtagagtagatgagactacaggcacctgccaccacgcctggctaatttttgtatttttagtagaggcggggtttcaccatgttggccagtctgctcttgaactcttgatctcaagtgatccacccaccttggcttcccaaagtgctgggattataggcgtgagccaccatacccggcctgttagtcactttattccaccaacatttatagagcacttactgtagctcaggcactttctaggtactaaggccacagccaggagcaacacagattaaaaacccctccttctagtaagggagactgactaggggttgcatggaaaccagttg

SEQ ID NO: 1559968 - DNA, 4001 bp, Homo sapiens
tatttcaggtcaccaggcaagactgggtgtaacttgggaatgtaagtctatccaatgtcagatccccaggtgcattcctgtccctatggctggtcagaagaagtctctgctcctgctcccatcctgcatcccctccttccaaggcctacgggctgtgcctcctggatctgccccctggatttcactcacgcctgtccaccagcaacacaacaaagcgatctttccagcgccgagctctgcaggattcctcaaaggattcccctgcactccccaccaggtgagccctcaacttctctgctaggtgctcaggacctggcacatctggcctctggccacctttgcagcttcctcaccctctgctgtctccaaagcttcccccgaagggaaagagtattttccctctttccacccattttgtcctgaaaactactatccccctgggaacgaccctatgtagcgtgtgggtggctgagaaccccccttccacacaatggtcaaggccaggagtacccaagccctggcagcaaacacccagcctactgctcacccagttaaaggacggacccctgggtgacagcaggccccggggctcagtacaccggacccttaggccacctcaacaccagtcctcatgccaggctgatctcgaaacgtaacagctactgctcagcaaaacgtggtggctagtgcctgtaatcccaacaccttgggaggccaagacgagagcatggcttgagtccaggagttcaagaccagcctaggcaacctgctagactccatctctacaaaaaaaaaaaaaaaaaattaaaaattagccgtgcatagtggcatgcgcctgtagtcccagctactacagaggctgaggtgaaaggattgcttgagtccaggagtttgaggctgcaatgagctatgatggcatcactgcactccagactagccaacagagccagaccctgtctcaaaaagaaaaaaacgaaaagaaagaaaagaaaaaaaatatccactgctctactcttcggccagtgggaagagtgcattttttaatcaaaataggggcctctatccatgaaacccatcaacttgtaaaatctgagctctctgcagcctcacagtccctccagcactgccagcagccctcgttccctgcatgctctaaatcctcagcgaagacccgtcccttgctccctcgcccagcacaggccgcgagtgcccacgtcccctgcacctcgtggggcagccaagggggcaccgcgtggctcgtgtgctcctgggcagtccattttcaaccacaagacggaacagactcagaatccggaacatctctcggtgcttaagagttttcctttaacaatctttacctgtgggaatgcagagacccccccgccctgcgagaggccggcagccagggattccccgctccgcgccctcatcaccccccggaaaccacaaccgctgcgcgcgcggctcggacccccacccgccgctcccctccagcagaccctaggcctccgggaaaccgcgcggcgaccgccccgcgccccgccagatccgaaccgccggacccggcaccccggccacacccgccggtgtcgacgcagcgaggctcggagggtgcattctccgcgccgaccgctcccctcctccagacccgaggggcggagtgggcagggcgcgccggctgcgcaccgggcacccacctggggacgcgggggctggggcggcgcggggccacctggcggacccgggagcggactccggagagcagggagcccctcccccctcactctccgggccccgcccggccgccgcgccccgaggcgcagccatcccgcgggaggggaggcgcaggaggaggccagcgcgaggacacttacttaaaaggctacatcgcttcattcccagcccatcctgggcgacggcggcacctccctcgtccgctgctgggacctcgatgcccaccaccctcgcgcggcgatctggccctatagcccaccccttactccgccgtggggcggagccgcgccacagctgacccaatgagaaaccgtcgtttcccagagtgacgtgtacgcagagcaatcatggagtccagcccagccgggggcggggctcaggcggctccctacgcttcctactccagctggccccgccccacgcccgcaactgcgcgtgcccagaacgtgaggggcggggctgggagccgggctgacactagaggtggggttagcgcttggaagcaccgaccaacgtgagcgcaacgcggcagggacacctgaccccggcggcgcccagcccctcggattgccagtcactgctcgctttggggcacggaggtgcccagtcctgcggggcacccgacgtcctgtcgccgacagggtccgggagtcagtatagctgggttctagtcccatcacaggcaaaaactccgcgggagcctggcccgctttttacctgggcctcagtttccccatccgtaaaatagaacgggttggatctcccgagcgctaacattccagaactcggatggggcgaaggggagggagggatgggccacccacacgtgacctccccgcgtggagccccgcctaccactgatccagggggtggcagctccggccgggacgagcggggtgggcgggtcctaggaaaccctacccggccgcccttggcagcgcctaaggcggagcgcgcggctctgcagcctgcttgccccggagttggcacccacggaggatggggaccgcaccctcagcttcgcagggagccaccgtggaggccagggcggtgcagagacacgacgtgtgactcggagtgcgcctggggaggatggacgagggagcgggggaccgctaacggggctccctctgcgcgccccgtccgcagaggcgcacgtcgagggtcccgggcgggctccgtggacgttggcggtagcgccgagcgagtcacggaccatgaagagcgttcgtgccgcgcggcccaaggccgggatgggggttagccacatcctgccgcgctgagggggaggctaacgggcgcgggcggccgggcccagccggagcccaccgcgatggcgagggaggagtgcaaggcgctgctggacgggctcaacaagacgactgcgtgctaccaccacctggtgctgaccgtcggtggctcggcggactcgcagaacctgcggcaggagctgcaaaagacgcgccagaaggcgcaggagctggcggtgtccacctgcgcccggctgactgctgtgctgcgcgaccggggcctggccgccgacgagcgcgccgagttcgagcggctctgggtggccttctcgggctgcctggacctgctggaagcggacatgcgacgcgcgctggagctgggcgccgcgttcccgctgcacgcgccgcggcggccgctggtgcgcacaggtgtggctggcgcctcctccggcgtggcggcgcgcgcgctgagcacccgcagcctgcggctcgaggcggagggcgacttcgacgtcgcggacctgcgggagctggagcgcgaggtccttcaggtgggcgagatgatcgacaacatggagatgaaggtcaacgtgccccgctggaccgtgcaagcccggcaggcggcgggcgccgagctcctgtccacggtcagcgccggcccctcctcggtcgtgtccttgcaggagcgcggggggggttgcgaccccaggaaggccctggccgccatccttttcggcgccgtgctgctggcggctgtggccctagccgtgtgcgtggcgaagctgagctgacggacacccgacggccgcctgctgctgccgctccctcccctgagaaaagactcgggatgggtgtggggtctggcctgtgcaaggggagtggtcctaaaaccccgtgtgtgcatgggtacacgcgcgtttccagtgcacatctgcctgggcaggacacggtttcctcttgctggcccgggaggagttaactttgcgccggccgtcagggcattaccgctaacgtctg

SEQ ID NO: 1559969 - DNA, 4001 bp, Homo sapiens
tggttggatctgggccccgccctcctgctcctataagctgtctttgaagagctccacccaactctctgcctgtgattggtgttgaccccgccctgctcactgattggctggtcctccaggaagcgcacgttgtggagtgcttctccctgcttggcacgcaaattctgcagccagaagcggatgatgctctggcgttcctgcgaggaagagggcgtgagctcagggaactcataggcacaggatgcatgcgggggcccagagccggcctcacctgggaggtgaagaagcgtagctcgctctccacattctcatagataaagtcctcctcgcaggagaagccgcgggtgcccccgccaaactcggccttcactgctttgcgcagacccagctcgtcggcccctcggagtaggctgtgaagaaggcggaggaggtgggctcacagggaggccccggcccaccatcctggagctgaggatggtgcacctggcagcctttgggacaaacgcagggcggctggatagcatggttggcacttggtagagcggggagtcgggtggcaggctcagcgagaggccagggacaggggactcgcctctcatacgtggcggtgacaaagaaggcgtaggcacgcgtgtggcggtggtggcggacttgcacgatgagctcgggaatgcccacgcggatgtggttcagcagccatagcagcgtgtggtcatcggtcgtgtctgccaaggggcacagggaccgatggctcctgccacgagggggcccaaggcctcctacgtattcccgttctgggaagccgagctcaggagagccgcatctgggcactgggcgggcgggcgggcgggcttgggtacctgggaaggtcatcagcacgtcgcagttctctgtaggcaccgtcttcatccacgccttgtgggacaccaggtagcgaccagcctgcaggagccgctttccgaaaagcttatctagggggcggcgtagcaggcccgggtcaggccactctgggatccggacccggcctccagtcttggctcctcctgcccccgccagggctcctcaccactccacctggcattcaaggccccgggagctctgggcttggcttattttcctccctccacgtccttgtaccagccaggccttcctccagaaatgcccttccccccagatcctcccttacaaatcttactcattcttgaggcccagctccgcctccaaaaccacaatcgatggggcgctcactagcagccctgagcgcttcaccacattatgacagcgccgtccttgcagcagccccagggactaggtgcggttcttacccccatttcacaggtgaggaaactgaggcccagagcgtttaagtcacgcgcccaaggtcacacagtcaagctgggatttgaacccaggaccgtatgattctgtattcttcgcggagaggctctctcaagcacatccctggcccgccgcgatcccgcagcccgggggtggcagggcgcagcccaagcctggggctctcggaggggcgtgtccgcgtctccgcgccgggaccccagcccgaagcaccgtcccagccccgcccgccgggccgcagccgcagtgccgggaggagccggcccctcgtccagacaccacgccaggttacgtttgaccctgatcctcctccccgtgtagttgacgcgggctccccaggcacctgcaaccctgtctggtccagccgccgcacacatacccagaactccggacgccggggctgcaggctcgccctccggcgggggcctcttgccacgctcgccctccagggacgtgcccccggcgccggaggcggcctcggccatggcgaggacaggtcaggtcaggggctacggacggcccgggcgacggggagccgcgggctcatggggccggtgcagccgcggagcgcgcgggaggaggagacaaaggccgcgcccgcccgcgccggcctcggtcctcgctcgcccgagcgctgcttctcgtccccgcccgagccgaacctcgattctccttcccggcccgatgcacgtcactctagggttctcagctgagttcgcccgcctagttctttggttcgcgtctccgcccgtgttgttttctgggtttccttctcgcccgcctacctcgctccctgctgctggtccccgcccgcactgatggtgcattctccaacttgtccccacccatgctttcttctggtccccgcctcggagcctcagtttccccatctgcaaactccggaccctggagacgctgtttggaatgtgagatgggcgtaagttgactaagggaggacgtgggaggggcgggccggttggggaagattcctggtgacaataacttcaaccaccccagtagggctgtgatacataattacagcaagccctgcttaggaactttgcacgcaccatttggctgcctagaacactcctcatgcactcttcgtccggttaacaccgactcccttcaggatgtaacctcggagaggatcccatagagttgtcaagtttagcaaataaaaatacagtccgtctagttaaatgtaaatttcagataaaagaataaatgttagctgggcggggcgcacctgtaatcccagctacttgggaggctgaggcaggagaatcgcttgtgctcaggaggtcaaggctgcagtgagctgagatcacacccactgcactgcatcctgggcgacagaacgagaccctgtctcaaatacatatatatacatacatacataaatgtttctatgtcctatgtctacatgggacatactagtactaaaaaattattcattgtttatttgaaattcacatttagctgggcgacctgggttttacctggcatttggccaacccctgactattctgagtagctcagtctgttagactgaaagcccagcgagggtaggaacgaggggccaggtctggttctcaatgcgagcacacagtaggcgcttgctgtacgcttgttacagatgtaacaactagcttgttacagatgtaataactagcttgttacagatgtaacaactagagaatggcagatgaaatataaatatgtcatcatttgttcctattttacaacttaaaatattaaagcctcggccgggcgcagtggctcacgcctgtaatcccagcattttgggaggccaaggcgggtagatcacctgaggcaaggagttcgagaccagcctgaccaacatggccaaaccctgtctctattaaaaatacaaaaaattagccaggcatggtggcgcacgcctgtagtcccagctacttgggagtctgaggcaggagaatcgcttgaacctgggaggcggaggttgcagtgagtctagatcgcgccactgaactccagcctgggcgacagagcgagaccccgtctcaaaaaaaaaaaaaaaaaaaaaaaaaagcttgggcaacgtagtgagatccccgtctccaccaaaaaaacgaaaacaaaacaaacaaacaaaaacaacaaacaaaaagaaacaccgaaaagttagactggcatggtggctcgcgcctgtggttccagctactcaggaggctgaggcgggcggatcccttgagcccaaaagttggaggttgcaagagccgtgatcgcgccactgcactccagcctgggcgacagagtgagaccctgtctcaaaaataaaataaaataaaataataaagtaaataaaaatattgagcagggcgaggtaagggggtattagaactctattctgtcagacagatttttcttaacacgcaagtgcgccgcccgcccgctctgatccagaaccagagaatccgccatgcgaaggcgctcccggagaccccgcccagccagtgcctggaattccaccatcagcgctttattccgagtttcagtgctgtcctgggttaacctgaaagcaatctccgaggctcccctttctggctttcggggagccagagactgaccggacacttggctctgcaggtgcagacctg

SEQ ID NO: 1559970 - DNA, 4001 bp, Homo sapiens
aataagcaagccaagacaggcagcccactggcacctctggggaggcagtggccagggtggaagcaagactcattccaccaggactcattccaccgcaccacccagcccctggcgtgctctaagacgggtgtcttccctccttccaagaaggcgggggagggaagcccagcactgggtctcaccagttgttgactttgggtggcttccagagcaggcacccactcaagggacttcaggaaagtgctgggggtggggtggggcgggaaggggcagccatttcacctcttcactctcagctgctttagggctcacccctgcccgcctcacctaggacctgacacccatgtttgtttctctcactgatcaatgttgggcttcacattgttggaccggttcttgttgcttccacatgcaacaggccaggcagccacctgccttgcacctgggatggacttaggagaaggcagaggaccatttctaaaaggtggggacaatcccttcttaaagttttctcagatcctctggggaagatgcctgggttctagtttatgtccagctccctggtgtctctggtccatttgtcacccctcctcagggaaaccctctctcatcctcgggctgaggctgactgtctgtataacacactcgcccctcaacaccactgcaattgacatttatttgtgtttttggagatgggtatccatctcccctaccagcctgtgaacaccgtaagaacacagattgttgagccctggcacatgactcacacctgtaatcccagcactttgggaggctaagacaggtggatcactcgaggtcaagagttcgagaccagcctggtcaacatggtgaaaccctgcctctactaaaaatacaaaatttagctcggcgtagtggcaggtgcctgtaatcccagctacttgggaggctgaggcaggaaaattgcttgaacccgggaggcggaggttgcagtgagtggagattgcaccactacactccagactggacgactgagcatgacactatctcaaaaacaaaacaaaaaaaaagggactgttttttgctaaacacaaatcgaccccaggcttagtaccctgcccggcattagtaggtgctccccagatatcagctgaataaacgaatgattctggatcggactcctagacttgctacttctctgtgaccattgtgaccttggtcaggttgcttcacctctccatgcctcagtttctccctctataaaacggcactcgtgatcaccactcacctcacctaatccttgtaactcactatcacaatgaacgtggagaaattcctactgagagaaagtgcacgataaacagaagctgtaacgccctgagaaggcgggactggctcgagagcacccagtccccgccacgcctcgccacccccggccaagggtcgcgcagcccctggacgccctgcctggctccgaggccggctgcggccccgcttctgggtcctccaccgaggcccgagcccccggccccggcgccggggagcagagggcggtgcagtcagttacctggcaacgcggtggctgcagcccaccgcgttacgtagcaacagggcggggattacccacttaagacccccgcccggttacccagaaacaggatggggctctcaggtgaggtctaccggcctctctgcctcacaccaggatggggctcataagccggttacctagcaacagggtgggtccccgcgggcggaggcccctgccggttgcctggcaacagggagggtggggagccctcagtaccttgcccttcaggtccagcacgtagacggcgctggcggacatgatggctgcaggaggcctcggcagcggccgagggcggtggcggcggcagcgacggtggggactgctgggcgttgagcaaggccgggcgccgcccgcgacagctcacctccacttccggttcggggagccgcgcggggaccgttatgtccggtccgggaggtgctgtcaggaatgcgcaggcgcaggacggactgtgcgcaggcgcattacgtcgtatgtaaccatgtttcttgctcccgccagaagcatcccggaagtaaggcccggtggggcggggccgaccaaatcagggcacccagtggccgctgccaggctgagctatggagccagagcagctggaaacggcctcccgtgggccgagttaggcgagagagcctggtggtgaaaccgacctggggcccagccctatggagctcacagtctggtggggaagtctatgaaacaagtgtacagtcaccaattgtgataagctcaaaagagagaggtaaggtcgtggttacttggaaagaggtcaaacaaactttctgaatggcaatcaaaccttatcaacagtcaccacctgtcattgtcaacatttatcaatgaatgagtgtgcctgtttattgcctggaatgttatgaaaaccagcctcactgaaccttgacccaacataccgtgtttcatttctgcaaagttagtaatcagtaatgcaactggtggcccttgattaatccattgagtcatatttaatttgcttttatgaactcttgggctttggagaaatgcctgcattctgttccagttagccatcatagtaccctggggatcccaaccctgcaataccagagtgatttacccaggatgcctgcctctcacatcttttattttctgtcttatctccgttttggcgtttggaaagatgatttttgcaactcggtaattatatagtgttttgcttaggaaagaaatgtgaccgaaactctagagaagcaaactagaatgtttgaagactgctaagtgactcctgggctggaaggattcttgctcaaggcacagagcaagcagccaagagagggtttttgttgtttgcttttttttttttttttttttttgagatggagtctcactctgtcacccaggctggagtgcaatggcatgatctcggctcactgcaacctctgcctcctgggttcaagtgattctcttgtgtgtcagcctctcaagtggctgggattacaggcatgtgccaccacacctagctaatttttgtatttttagtagagacgtggtttcaccatgttggccaggcttgtctcaaactcctgacctcacgtgatccacccacctcggcctcccaaagtgctgggattacaagggttaagttaaatattaaaagataagagagccagtgcccttatacaaaggctgggatgtaacaaaagcccacccagagttgtgcctaggcctttcctgggccttgaagcatgacaagataatgaaggaattcttaacaggacccttttaggattaaacaagctttattggcggtctgaagaaactcctcaggcctccacaaacaagtttattggggtttgaaggaactcccccaaacctccatgatttagcaggagataagataagggtaatcaccccagcacctggacccacttagattaagtaaatttactgaggctccagaggaaggtcttcaggactcagatcttagttatgggttaaaagactataacttacttacgtctttagatgaatgcacacctacacgtagacatatagcttagaaggtatatgagctctggaagactttgtaattttgggttggtctggtgatattttccaggccttctccctgtaaccagttacagaaataaaaactctcttcctccctagttcatctgtgtctcattattgggctgtgagatatagaagcccaaccctcagtttggtctgggaataggttaggagtgggggtctcaaaagcccccccaatacaacacacacaataagaaccactgaggcctgaaagccatgtatagagattttgttttaattggtctgggccagggtttggttattgggatttttcttttttttaattttttttttgagacagagtctcactctgtcaccaggctggcatgcagtgacacgatctcggctcactgcaacctctgcc

SEQ ID NO: 1559971 - DNA, 4001 bp, Homo sapiens
aaagaaagaaagaaagaaagaaagaaagaaagaaagaaagatgacagttcatatgattgtgcctggtagtcaggaagacacccataatagtaaacacttctgtctggacacggtggctcacgcctttaatcccagcactttgggaggctaaggcgggtggatcatgaggtcaagagttcgagaccatccaggccaacatgatgaaaccccgtctctactaaaaatacaaaaattagcttggtgtgctggcgcatgaccgtaatcccagctactcaggaggctaaggcatgagaatcacttgaacccaggaggtgaaggttgctgtgagctgagatcacaccagcctggtgacagagcgagactccatctccaaaaaaaaaaaaaattagttaaccacttcctaaggttgttttgtccagtgtctgaacagggaggacccatggcaggttctcaaacatcttagctctcactattaatattaatgggaatattattttcaccaccactcttattttggctattaaatgacaagacaggctgactgcagtggctcacacctgtcatccgaacactttgggaggctgaagcagggggatagctggggaccaggagttcaagaccatcctggacaacatagcaagactccatctgtacaaaaaaataaaaataaaaaataggccgggtgcggccgggcgcagtggctcatgtctgtaatcccagcactttgggaggccgaggtgggcggatcacgaggtcaagagattgagaccatcctgcccaacatggtgaaaccccatctctactaaagatacaaaaaattagccgggcgtgatggtgcgcgcctgtaatcccagctactcaggaggctgaggaaggagaatcacttgaacctgggaggtggaggttgcagtgagccaagatcatgccattgcactccagcctgggtgacaaggcgagactctgtcttgaaaaaaaaaaaaaatacaaaaattagccaggcatggtggcatgcacctgtagtcccagctactcgggaggctgaggcaggagaattgcttcaacccgggaggtggaggttgcagtgagccaagatggagccactgcactccagcctgggtgacagagcaagactctatttaaaaaaaaaaaaaaaaaaaaattaaaaatagccgggcatggaggggtcagcccgcagccccagatattcaggagtttgagagcagctttggcaacatagcgggatccctctacaaaaaaatgtcaagaattagccaggcatggtggcctgcacctgtgtagtcacagctactccggagactgaggcaggaggatcgcttgagcccaggaattccaggctgcagtgagctatgatcgcaccactgcactcaagcctgggagacagcaagagaccctgtctccaaaataaaaaaagacaagaggaataaaaggacttcaggaagaggcaaggcagccacagatggggggagttagaggcccctgttccagttgccttccccaggtattaacactgtggatgccgacagtgatggagataatttcaatttgctgagtccctaatatttccagaaaggccactatgctaagtagtttacacgcagcgagttgtattaattctcattgggtggggacctctgttgctcccatttttacatacagagaaactgaggccctaggaggcgaaccccttggcctcaggcacaaggcgagtggatgctggaggtgggattcccagggattgcagggggagggggtgttcccagacctcttcctggcccgcgcggaggggtcgcccctgaatccctgggagcgagacctcacctgtccgtctcccaactcctcatgcccagcctcaccttgcccttaacgtccagaatgaagacagccgaggcggacatggtggcggccgaaggacttaggagtcggggagggagcgccgggaggcgatggcggcgccgcttccttcttcctgcggaagcgcctgcgcccaggtgagagcccaggtgtgtgcgtcttaaaggggaggcggccaggtgagcagcgctgtcggccaacttgaagatggctgcggggccgggagaggtactgcgacttcagatgggtctgctgccccccttcactttccctagccacccaggagtaatgacgggtggagaccccaaaccaatcaaccatccttccatccattcattcatccttcctttcattcatctatccatccattcgtccatccatccattcattcttgcattcattaatccatccacgcatccactcatttagccattcattaatccatcttccatcgattcattgatccatccttccattcgtcatccatttcttcatccatttttgcattcatttatttgttcgtctatccattatccattcatccatccatttattcatccattcattcatcccttcttgcattcattcatttattcatctttccattcatccatccattcatccattctaacattcatcaatttattcatctatccatccatccatccatccgttcatccattcttgcatcattaatttattcatctatccattcatcaatccatccatccatccattcttgcattcattaatttattcatctatccattcatccacccatctatccattcattcatcctctcattgattcatccatccattcaccttctttctcctctgtctcacccacacacgtcagcccccatacagcagggactttgtcttgttcatgtttatgtccctagtgctcagcactgggtgctcaaaatttgcccaattcattcattcactcattcatataataattttcactggtgaattttactgactgaatttgaaatattcattcactcagtaacaggaactgtggatataattccgagcaggacaaatgtacttgcttttattattcttacaaatttactcttattcatttcaaataaaaaatttatttttttttgttttttgaaatggagtctcactctgttgcccatgctggagtgcagtggaatgattttggctcactgcaacctccacctcccaggttcaagcaatcctcctgcctcagcacccctagtagctgggattacaggcaagcgccaccatgcccagctaatttttttttttttttagactccaggctggagtgcagtggcatgatctctactcactacaacctccgcttcccgggttcaagggattctgctgcctcagcctcccaagtagctgggattacaggtatgcgccatcacgcctggctaattttgtatttttaatagagatggggtttcaccatgttggccaggctggtctcgaactcccgacctcaggtgatccacccgcctcagcgtcccaaagggctgagattacaggcgtgagccaccgcacccagccaaaaaactttttttgtagagacagggtctcactctgtaccctagactggactgcagtgatgcaatcatggctcactacagcctcaacttcctgggctcaagccatcctcctgcctcagcctccctagtaactggaactacaggcacaaaccgccacacccagctaattttttttgagacagaattttgctctagtttaccaggctagagtgcagtgatgtgatctcggctcgctgaaacctatgcctcctaggttcaagcaattctcctgcctcagcctcccgagtagctgagattacaggcatgcgccaccatgcccggctactttttttgtatttttagtagagacagggtttctccatgttggtcaggctggtcttgaactcacgacctcaggtgatccacccgccttggcctcccaaattgctaggatgacagatgtgagccactgcgcctggccacaactagctaatttttttttttttttttaatttggagtctcgtcctgttgcccaggctggagtgcaatggcacaatctcggctcactgcaacctctgcctcccaggctcaagcga

SEQ ID NO: 1559972 - DNA, 4001 bp, Homo sapiens
cagggcctggacaacactagagcaatcaaaaagtatttgtcaagtgaatgaatgaataaatgagccttcagaggcaagacactgttatgaatgaagtttgcagacaagaaaacgtcctgaaagaggttaaacaactcgtggagggtcacatccctggtgggtaacagaggcagcccccgtctgctaacagtggctcccagctcctccacaacccccatagccccgccccttatcataacaagtgatcatttctcctccaactgatactcaactgtttccaccctcctgttccctgagcacctattacatgccagatccttccataacagttaaattctaaaacaacaaccatcactgggtactttacagggctgctgttcagagccaacggagtaaaaacaatagccaagttccatctggggcctggaacgagtgaaaggcctgaggggcattgtcacaagcccctcaggaagatactatcagcagtctctcttgacagatgaggaaaccgagaggtgaagtccctcattcaaggtcacacagccagggagtggcagtgctcaaacgcaaacccaagtctggctgaccccagagcccatgcggatgcagcctctgaagactcctggcagctccaatcacccacagccattcccaggagttgagagctgacttgccgccaggattcccatcgtcacgacaactcttcctggcagggaccaccgtccccatattactgtggtcaaatagaaaagggctcagatccctgcctgtcctgctgcctgacccctgacctctctctgggattagacttcccctattcccagctttccagatatctacccctcaagcacttcagaacccaacgccttccttgaggtctgggcgctccttcttctaccctttccccaatcccctactctaatgtcctcttctttcctggccccccgttccctgtcacaggttctcccaagaccttacaccgacagctcttttcctctgtgttccttgggtccctcctttcccctcagctgcccctctagccccctccacactgccttccatgtcttctaggcaatctcccaccctgaagcccctctatccttcaccagggtgtccttatagtctccccgtcccatcatctccctgccccaaactcatggactttcaaccactctcaggcctcctctataccactggccaggagcctcggtgacctatctaacccctttcccctgtatgacaccccctatcccaggtcctcaagccctgcttcattaggcttccggcattccacttcctccaggtcccctctggcctcttcccattccatcgctccacagggcacccccgccatacacttctttcacttcttctctacattgggaatccctctaaccccatcgtttgtaagatcccccagcttttcagtctttcccaggggacacctctatgctcccatccccgggacctcactggcttcctcccctttcaagccctcccggacccctctagctactccgtgtcgtcacctcaagaggcactctatgacaccccaagcccctacgtgccccccactctaaagttcttcctggggcccatctatgctgtccctatacggccgcagaggcttttgatcccccgggtccctctgtgatccccaaacccctcaatttcacgctcccccctcccccgcgtctccagtgtcccccggccgcgcgctcacagttccggatgtcggagatgaacaccgcgagcccccgcatcccatcgcccttggacacggccggcatgatggcggtggtgtcggctccaggcctggccggacagggcacagagcagcgggggctggcaagcggggaccgggcggaaaggaccccaggcagcgccaaggagccgagccggccgcggggagggctggctggcgggcgggcgggcgggctggcaggccgtggcaccgccccctgcccctcccctccgcccgcggtccggagctctgagccgcccactggcttgagctcctgccgctcacaggcgggtttctcccccacttcctctctcattggccgccaagcaaaggcacgacgctacgattggcccagtgttccgctatttccgtttgggagctggggaggggggggaggaggcgttgcccgagagacgggcggggttcgattgcgtatcatgggcccgccccctccgcgcggccaggtcaaacactgattggatctagcggctctccaaggaggaagggagggacgtgaaggaaggcggggaacggtcctaggaggcgggacttaggttgactgggaccaatgaacgggtagacctgccccgcaggcgtcgcggattggcgagatctgtcctacttcagccctccattgggcggctgtggggcgggcggaaggcgaagatcagtagagaaggaaagaggggagggtgtcactccgctcggctgggataggtggagcgacgcctgcaattccctgctgcagagaaggggttgggcgaggcaagagagcgtgcggtgtttactgcgcaagcgtctccgtgttccctttctccctccactgtcacccccgactgctgaaatcctcttctaggaagccttcctcccctccccccttctctgcagccaacgtgtcgggacttgagttgtcaggagacctagaatctcagagtgaaaaacagtaattcaaggctagtcccattaagcagaagttaaaacttaggtcgagagggcgaatgacttgcccagggccacacagcttggaagtgaaaaagcagaaataaacgtaaaccgtatcttggcttacttttcaatatatgttgcctttttttttttgtccaaccgcagtgtctctcgggcagcctccattgtagcagatatcaaaccaaaattgattgtctcctccagactgggaactccttctgggcaagaatgggacctggccttgaacagtttcaacaacatttgttaaaagaagaaataggtgaatctgctttggcccagccccagcctccatccccaacccccagctccccagagactctttggtaaactggctttggggaaggcaaaacggccagaactcccaacgccccaggagattgagaaatttgggacaaagggaactggaagagtccatttctgtcacctgtaggaacaaaactccaccccatcagccttttctaatctcagaagccaagaattcctggaatgagccttgggggtgtgttctggacctttggaatggccattctgaatcctgggagatggaaaggaggttgagaagagcccaccttccaggctcaatggatgcgtccatttgggtttccaggaatggggcctgggaaagtccattttggattccaggaggacagaaattgctcagctgttttagtcacagggagagtccatttctaatatgggaggggggtgctgtttgcccctgaagaacataaagcagccccattaaacacaagaaaaattattaatcccaggacttgaagttctttttttttttttttgagatggagtctcgctctgtcgcccaggctggggtgcagtggcgcgatctcagctcactgcaacctccgcctcccgggttcacgccattctcctgcctcagcctcccaagtagctgggactacaggcgcacgccaccatgcctggctaattttttgtgtttttagtagagacggggtttcaccgtgttagccaggatggtctcgatctcctgaccttgtgatccgcccacctcggcctcccaaagtgctggaattacaggcgtgagccactgcgcccggccttttttttttttcttttttttgagacagagtctctctctgtcccccaggctggagttcagtgactcaatctcggctcactgtaacctcttcctcccgagttaaagcgattttcctgcctcagcctcctaagtagctgggattacaggcacccgtcatcatgctcgcctaatttttgtatttttgtagagaca

SEQ ID NO: 1559973 - DNA, 4001 bp, Homo sapiens
aatcacttgaacccaggaggcagaggttgcagtgagctgacattgcaccattgctctccagcctgggtgacagagcgagacgctgtctcaaaaaaacaaaaacaaaaacatagaggtatagtacagtgactggcacgtactaagtgttacataagaaccagctcttagcagcattatattttccattatgtgatgttcagaaaaccatggccaaagcttactccattagaagttctgggcccatttctgtctgagacaggcatgctcatgcccattttatagatgaggaaactgagatttagggaaaggaagtctcacagccagaaagcagaggtgggagtccaaaggctttgctctgaaccacctgaccccaacttgtgggagccttctctcttaggaaagagagccctctagtcctgtctttttcttttcttttttgttttcagacagtctcactctgttgcctaggctggagtgcagtggcactgtctcggttcactgcaacctctacctccaggttcaagcgattctcctgcctcagcctcctaagtacctgggattacaggcgcatgccaccatgcccggctaatttttgtatttttagtagagacagggtttcaccatgttggtcaggctggtctcgaactcctgaccttgtgatctgcctgcctcagcctcccaaagtgctggggttacaggcgcgagtcactgtgcccagccttttttttttttttttttttgagacagagtctcactctgtcgcctaggccagtggcacaatctcggctcactgcagcctctgcctcccgggttcaagcgattctcctgcctcagcctcccaagtagctgggattacaggcatccaccaccacacctggcttatttttgtatttttagtagagacggggtctcaccacgttggccaggctggtctcgaactcctgaccttatgtgatccgcctgcctcagcctcccaaagtgctgggattacaggcatgagtcaccgccccagcctgagagtctttcctaagcctcattctccacacactctatcctccctcccccaaccaaccaaactggaccggaacaggatgttacactctccttccaagaactcctgctgagccagggaaaaccacttcctagcagggcaggggtcccaggcaggaagggacgttggggggcctacaccaggcagccacagcctgggagcagagccggagacatattcacacagttaggagaactagaagcaaacccacagagttgacaaaaagctctgcctcttactcccaaattcccttgtatacctctccctgttttcttcccatttggaatctcaagtcccctccgtcctgaatctctgcatcctcacgcctctgctgtcccctctagatgccccccaaccttccctgtctccaatccccctcctctggagttgttcccttttgacctccactttctcagtctcagttcccctccttggggcctcaatgggctttttactggtgacatcccttgtcccactcccaagcttcctcccttcttcaaaaggtcacattttgcctccaaggaccctgttcctggaggagactccgcccccgctctgacactctttctcattcgttttctttcccaacttccagcccaaagaaccctttcctagatccaaagccccaacctgggggataggggcactcctaaatccaatgttgagtctttgccccaacaaagattcctccccaggtctcacactttcaagcctactccccaccccacaagatctctcctcttggaaagacctattcagttgctccccattctttccgagtgtccatcttacctccaggtcctctctccttttacagcgctttcccagacccttaagtttcattccctacagttgcctccttttggtttcctgtgccaggtctcttcttgagatcatccctctctcacaggcagtctcctgcccctgtctcaacatcccctctccacctgcaatcagatccttgtctctagagactcctcccatcaagaaaacctccctccccttttccaaggtctcgcgttctcgtcccagcgctcccgccacacttccagagcgccttcctctttcggacgccctctccccacctccaatgccttctcgctacccacaagactgtgtctcacgagtttcctctcgtttcaaagcttccaaccatctacaacgtttcccacctgcacagccctttccccttggaacaccacccccaatgcccgtcgccgcgagacccctggtaacccccgcgcgcagaatcaccgccctgtgccctccttcccggccctggatcggtcccaatccccagagcccgcgcctgacccagaccatccgcggcagagaagggacttgtcagcgcccgatccagcctcggctatttacgcgtgggccccccctccgccagtccccggcgtagcgctcccccgttaccatggcgacccccgtccagaccccagcggccccggtcccgcggcgactgggcagctccggctcagggtgcagttgtagggcccagagctagagcggacttccggtagaaaaacccgcctgccttctcgcgcacagacccctgggagttgtagtttcaccaaaggggccagcctgggtgaagatgggtgaagagtcagagccagtccttttcctaccaaacgagtcagatcccaagtgcatgctgggatttgtggacaaacatctttacagaggactacaattcccgagatgctgaagaaccagcggtgaaggcgttgcattcagggaaatgtagttctcttaggtcccctccccccacccaggggagaagggcatgctgggaatagtagttttaaattttaaaaaactgtcctggggagatagaaaatgtctttccattcctcatccagtgatttctttaatttttttaaaaatagagacaggggtctagatatattgcctaggttgatctcgaactcagcttcaagcgaccctcagccttccaaatcaccaggattacaggcatgagccaccacaacaccaagccagtgttttgcttaaaatacgttgcgtgtgtctctcgggagacaacagtttaaaagcataaatttgaaccggcccggcgcggtggcttactcctgtaatcccagcactttgggagtccgaggcaggcagatcacttggttaggagttcgagaccagcctagccagcatggcgaaaccccatctctactaaaaatacaaaaaattagccaggcatggtggtgcgcacctgtagtcccagctactcgggaggctgaggcaggagaatcacttgaagcccggaggcagaggttgcagtgagcccagatctcgccactgcactccagcctgggcaatagagagagactccaaaaaaaaaaaaaaatctctagtttggcgggggcatgatggcccatgcttgtaatcccagcactttgagaagctgaggtgggtggatcacctaaggtcaggacttcgagaccagcatggccaacacggtgaaaccatttctactaaaaatataaaaattagctgggtgtgatggcaggtgcctgtaatcccagcaactcgggaagctgaggcaggagaattgcttgaacctgggaggcagaggttgcagtgagccgagatcacaccattgcaccctagctggaatgacaagagcgaaactctgtcaaaaaaaaaaaaaaccctccaggtcagcagttagtttagtgtttttttggtgtgtctttgtttttgcttttttctgaaagagggtctcccttggtcacccaggctgtagcgcagtggcatgatctcagctcactgaagcctcaacctgctgggctcaagtgatcctcccacttcagcctcccgagtagctgagactacatacacatgccgtcacacctggctaattttttgtactttttgtagagacagggtcttgctatgttgcctaggctgctcttgaactcctgagctc

SEQ ID NO: 1559974 - DNA, 4001 bp, Homo sapiens
tcactgtgcccagccttttttttttttttttttttgagacagagtctcactctgtcgcctaggccagtggcacaatctcggctcactgcagcctctgcctcccgggttcaagcgattctcctgcctcagcctcccaagtagctgggattacaggcatccaccaccacacctggcttatttttgtatttttagtagagacggggtctcaccacgttggccaggctggtctcgaactcctgaccttatgtgatccgcctgcctcagcctcccaaagtgctgggattacaggcatgagtcaccgccccagcctgagagtctttcctaagcctcattctccacacactctatcctccctcccccaaccaaccaaactggaccggaacaggatgttacactctccttccaagaactcctgctgagccagggaaaaccacttcctagcagggcaggggtcccaggcaggaagggacgttggggggcctacaccaggcagccacagcctgggagcagagccggagacatattcacacagttaggagaactagaagcaaacccacagagttgacaaaaagctctgcctcttactcccaaattcccttgtatacctctccctgttttcttcccatttggaatctcaagtcccctccgtcctgaatctctgcatcctcacgcctctgctgtcccctctagatgccccccaaccttccctgtctccaatccccctcctctggagttgttcccttttgacctccactttctcagtctcagttcccctccttggggcctcaatgggctttttactggtgacatcccttgtcccactcccaagcttcctcccttcttcaaaaggtcacattttgcctccaaggaccctgttcctggaggagactccgcccccgctctgacactctttctcattcgttttctttcccaacttccagcccaaagaaccctttcctagatccaaagccccaacctgggggataggggcactcctaaatccaatgttgagtctttgccccaacaaagattcctccccaggtctcacactttcaagcctactccccaccccacaagatctctcctcttggaaagacctattcagttgctccccattctttccgagtgtccatcttacctccaggtcctctctccttttacagcgctttcccagacccttaagtttcattccctacagttgcctccttttggtttcctgtgccaggtctcttcttgagatcatccctctctcacaggcagtctcctgcccctgtctcaacatcccctctccacctgcaatcagatccttgtctctagagactcctcccatcaagaaaacctccctccccttttccaaggtctcgcgttctcgtcccagcgctcccgccacacttccagagcgccttcctctttcggacgccctctccccacctccaatgccttctcgctacccacaagactgtgtctcacgagtttcctctcgtttcaaagcttccaaccatctacaacgtttcccacctgcacagccctttccccttggaacaccacccccaatgcccgtcgccgcgagacccctggtaacccccgcgcgcagaatcaccgccctgtgccctccttcccggccctggatcggtcccaatccccagagcccgcgcctgacccagaccatccgcggcagagaagggacttgtcagcgcccgatccagcctcggctatttacgcgtgggccccccctccgccagtccccggcgtagcgctcccccgttaccatggcgacccccgtccagaccccagcggccccggtcccgcggcgactgggcagctccggctcagggtgcagttgtagggcccagagctagagcggacttccggtagaaaaacccgcctgccttctcgcgcacagacccctgggagttgtagtttcaccaaaggggccagcctgggtgaagatgggtgaagagtcagagccagtccttttcctaccaaacgagtcagatcccaagtgcatgctgggatttgtggacaaacatctttacagaggactacaattcccgagatgctgaagaaccagcggtgaaggcgttgcattcagggaaatgtagttctcttaggtcccctccccccacccaggggagaagggcatgctgggaatagtagttttaaattttaaaaaactgtcctggggagatagaaaatgtctttccattcctcatccagtgatttctttaatttttttaaaaatagagacaggggtctagatatattgcctaggttgatctcgaactcagcttcaagcgaccctcagccttccaaatcaccaggattacaggcatgagccaccacaacaccaagccagtgttttgcttaaaatacgttgcgtgtgtctctcgggagacaacagtttaaaagcataaatttgaaccggcccggcgcggtggcttactcctgtaatcccagcactttgggagtccgaggcaggcagatcacttggttaggagttcgagaccagcctagccagcatggcgaaaccccatctctactaaaaatacaaaaaattagccaggcatggtggtgcgcacctgtagtcccagctactcgggaggctgaggcaggagaatcacttgaagcccggaggcagaggttgcagtgagcccagatctcgccactgcactccagcctgggcaatagagagagactccaaaaaaaaaaaaaaatctctagtttggcgggggcatgatggcccatgcttgtaatcccagcactttgagaagctgaggtgggtggatcacctaaggtcaggacttcgagaccagcatggccaacacggtgaaaccatttctactaaaaatataaaaattagctgggtgtgatggcaggtgcctgtaatcccagcaactcgggaagctgaggcaggagaattgcttgaacctgggaggcagaggttgcagtgagccgagatcacaccattgcaccctagctggaatgacaagagcgaaactctgtcaaaaaaaaaaaaaaccctccaggtcagcagttagtttagtgtttttttggtgtgtctttgtttttgcttttttctgaaagagggtctcccttggtcacccaggctgtagcgcagtggcatgatctcagctcactgaagcctcaacctgctgggctcaagtgatcctcccacttcagcctcccgagtagctgagactacatacacatgccgtcacacctggctaattttttgtactttttgtagagacagggtcttgctatgttgcctaggctgctcttgaactcctgagctcaagcgatcctccctcctccacctcccaaagtattgagattacaggcgtgattttttaaatggcctttattacattttaaaaattattttatttgccctatgagtatgtgtgtatgtttgtctagatctctcattaggtagtgagttgttgagggcagggaccctgtctgataactgtatcttcattacctagaacatgacagatggtaagcagtcaataaagttattactattagtactgaggggagattggccctaataagaacaaagcatgccaggcatggtggctcactccagtaatctcagcactttggaatgccaaggcaggcagatcacctgaggtcaggagttcgagaccagcctgcccaacgtggcgaaacagcacctctaataaaaatacaaaaattggccgggcttggtagcacttgcctgtaataccagctacttgggaggctgaggcaggagaagcacttgaaccctggagatggaggttgcagtgagccgagatcgtgccactgcactccagcctgggggacagagagagagagagactccatttcaaagaaataataataataaattaaataaataaaacaaaatgtattgtagaattatgtaaatttaaggtatagtactggcagaataaccaacacatagttgttgaatattataggggcaaaaagaggccagagatcatttctgtctt

SEQ ID NO: 1559975 - DNA, 4001 bp, Homo sapiens
gtggcactgtctcggttcactgcaacctctacctccaggttcaagcgattctcctgcctcagcctcctaagtacctgggattacaggcgcatgccaccatgcccggctaatttttgtatttttagtagagacagggtttcaccatgttggtcaggctggtctcgaactcctgaccttgtgatctgcctgcctcagcctcccaaagtgctggggttacaggcgcgagtcactgtgcccagccttttttttttttttttttttgagacagagtctcactctgtcgcctaggccagtggcacaatctcggctcactgcagcctctgcctcccgggttcaagcgattctcctgcctcagcctcccaagtagctgggattacaggcatccaccaccacacctggcttatttttgtatttttagtagagacggggtctcaccacgttggccaggctggtctcgaactcctgaccttatgtgatccgcctgcctcagcctcccaaagtgctgggattacaggcatgagtcaccgccccagcctgagagtctttcctaagcctcattctccacacactctatcctccctcccccaaccaaccaaactggaccggaacaggatgttacactctccttccaagaactcctgctgagccagggaaaaccacttcctagcagggcaggggtcccaggcaggaagggacgttggggggcctacaccaggcagccacagcctgggagcagagccggagacatattcacacagttaggagaactagaagcaaacccacagagttgacaaaaagctctgcctcttactcccaaattcccttgtatacctctccctgttttcttcccatttggaatctcaagtcccctccgtcctgaatctctgcatcctcacgcctctgctgtcccctctagatgccccccaaccttccctgtctccaatccccctcctctggagttgttcccttttgacctccactttctcagtctcagttcccctccttggggcctcaatgggctttttactggtgacatcccttgtcccactcccaagcttcctcccttcttcaaaaggtcacattttgcctccaaggaccctgttcctggaggagactccgcccccgctctgacactctttctcattcgttttctttcccaacttccagcccaaagaaccctttcctagatccaaagccccaacctgggggataggggcactcctaaatccaatgttgagtctttgccccaacaaagattcctccccaggtctcacactttcaagcctactccccaccccacaagatctctcctcttggaaagacctattcagttgctccccattctttccgagtgtccatcttacctccaggtcctctctccttttacagcgctttcccagacccttaagtttcattccctacagttgcctccttttggtttcctgtgccaggtctcttcttgagatcatccctctctcacaggcagtctcctgcccctgtctcaacatcccctctccacctgcaatcagatccttgtctctagagactcctcccatcaagaaaacctccctccccttttccaaggtctcgcgttctcgtcccagcgctcccgccacacttccagagcgccttcctctttcggacgccctctccccacctccaatgccttctcgctacccacaagactgtgtctcacgagtttcctctcgtttcaaagcttccaaccatctacaacgtttcccacctgcacagccctttccccttggaacaccacccccaatgcccgtcgccgcgagacccctggtaacccccgcgcgcagaatcaccgccctgtgccctccttcccggccctggatcggtcccaatccccagagcccgcgcctgacccagaccatccgcggcagagaagggacttgtcagcgcccgatccagcctcggctatttacgcgtgggccccccctccgccagtccccggcgtagcgctcccccgttaccatggcgacccccgtccagaccccagcggccccggtcccgcggcgactgggcagctccggctcagggtgcagttgtagggcccagagctagagcggacttccggtagaaaaacccgcctgccttctcgcgcacagacccctgggagttgtagtttcaccaaaggggccagcctgggtgaagatgggtgaagagtcagagccagtccttttcctaccaaacgagtcagatcccaagtgcatgctgggatttgtggacaaacatctttacagaggactacaattcccgagatgctgaagaaccagcggtgaaggcgttgcattcagggaaatgtagttctcttaggtcccctccccccacccaggggagaagggcatgctgggaatagtagttttaaattttaaaaaactgtcctggggagatagaaaatgtctttccattcctcatccagtgatttctttaatttttttaaaaatagagacaggggtctagatatattgcctaggttgatctcgaactcagcttcaagcgaccctcagccttccaaatcaccaggattacaggcatgagccaccacaacaccaagccagtgttttgcttaaaatacgttgcgtgtgtctctcgggagacaacagtttaaaagcataaatttgaaccggcccggcgcggtggcttactcctgtaatcccagcactttgggagtccgaggcaggcagatcacttggttaggagttcgagaccagcctagccagcatggcgaaaccccatctctactaaaaatacaaaaaattagccaggcatggtggtgcgcacctgtagtcccagctactcgggaggctgaggcaggagaatcacttgaagcccggaggcagaggttgcagtgagcccagatctcgccactgcactccagcctgggcaatagagagagactccaaaaaaaaaaaaaaatctctagtttggcgggggcatgatggcccatgcttgtaatcccagcactttgagaagctgaggtgggtggatcacctaaggtcaggacttcgagaccagcatggccaacacggtgaaaccatttctactaaaaatataaaaattagctgggtgtgatggcaggtgcctgtaatcccagcaactcgggaagctgaggcaggagaattgcttgaacctgggaggcagaggttgcagtgagccgagatcacaccattgcaccctagctggaatgacaagagcgaaactctgtcaaaaaaaaaaaaaaccctccaggtcagcagttagtttagtgtttttttggtgtgtctttgtttttgcttttttctgaaagagggtctcccttggtcacccaggctgtagcgcagtggcatgatctcagctcactgaagcctcaacctgctgggctcaagtgatcctcccacttcagcctcccgagtagctgagactacatacacatgccgtcacacctggctaattttttgtactttttgtagagacagggtcttgctatgttgcctaggctgctcttgaactcctgagctcaagcgatcctccctcctccacctcccaaagtattgagattacaggcgtgattttttaaatggcctttattacattttaaaaattattttatttgccctatgagtatgtgtgtatgtttgtctagatctctcattaggtagtgagttgttgagggcagggaccctgtctgataactgtatcttcattacctagaacatgacagatggtaagcagtcaataaagttattactattagtactgaggggagattggccctaataagaacaaagcatgccaggcatggtggctcactccagtaatctcagcactttggaatgccaaggcaggcagatcacctgaggtcaggagttcgagaccagcctgcccaacgtggcgaaacagcacctctaataaaaatacaaaaattggccgggcttggtagcacttgcctgtaataccagctacttgggaggctgaggcaggagaagcacttgaaccct

SEQ ID NO: 1559976 - DNA, 4001 bp, Homo sapiens
aaagtttccaccaccaagacccccttgaaggggcccagacttgtggggaaggcgctatcaactcacaccaattccaaaggaagaaaaccaggctcaggggcttcccagtgaagacaggcacatccccctgaaaaccatgccccagactagaggtgtggtcctccactggacagaccccctggcccatcgtcagggtcccagaacaggctgctcagtgacatgcgctgaagggagcagggacgggcgctgggagatcctgcctgtgcagaaaaagtcctctcgggaagtgaaccacatttccaatctgaaccaagctcagtaaaaaccaggcccatcagcgatgctttcaactcacaaagaatctgaacattactccagttagttacacgttgtaaccaaagcagttagggagagcttctgagatgaagaaaaccaaggaggccgaagggaagtggggtggagaagaacaaaaatgacctcattaaggtgggggcaggcgaagccacaccacttccaggaaagtgtaaaggtgtaacaatacggcaagagctcgggttcccagagagagggacatgggctgagggacatggtgccaggaagcaagtcccttaacttccctgccctcctgggcacctcgtcctggacacagcctctggtactgggactggtgcggtatcagacggcggctctctttcaggcctgccttgctgtccacgcagggaagcaggcaggcagtcgctcaagtaggacactttctaaggctcccactgcccaagggctgcacgggtatccttaatgaagccagacacgtggtggccactctgcccattcttcttcaatctaggtcacaggttgggggaagggaggagcgggaaggaaacgatccccacggttgtaattttacttctggaaaactatttcctcgccctggctttcaggttcctacttgaagtcagcttccccattccagcttcccgcaagctgctacctcactggggatcaggatgccgctgtccttcctccctcctggcagcagccccaccttcctgggaacgggggcactggaggcaacgccccaagaccctgcctggttccgagccaggcctcagggagcgacctggacacgcatttacacgacccagaaggaagaaggagtttctccagggacggcccaggaccccctgcctcggtctcccggggagggtccgggggcggggcccgggcccctgcatttttaatcggtgattcggaaacacactcaggttgaagaagctctgcccagagacctcgcaagtctcctgggagggtggcccgagacgggggcaggtgggcccgaatctccctctgagagagtaaactgagggtccagggggagggcacctataggcggggcccagggcattgcattttgaacagcgcttcccccaggtgatccgatgaggcgaggatccgagatgtgctgctccaaggccttcgcccctcgtggggaaactgatgctgggggaccgaggaggtgggcggcgccccaggcccaggccaggcagggccggagccctaagcgggacctccaactaagacagagcccgggcgggcggcaggccgagcaggcccagtgagcagggctgggccctgggccggggctgtgaccaggccgagcagccccttggcgcgccgggctcacctcgtcctccttgtggttacggatgccgcggaccaagtcctgcagattcttgtcgaacatgcggtcgatgctgcccttcaccatcttgagggccatcgcggcggcccacgggcttttgcctcgggaggcccgcggctgggcgccgtgagggggcccggggcccgtgcctgccgcccgcggagcgccgcgctgccggccgctgcggcggggcaagctcccaggccagggcggcggcggggtccaaggaccgcggcagaggcggcgacccgctcggcaggtgccgcgatcccgctccgggccccttgcaaatggcggacaagatggcggcgggtcagctgacgacgagcgcccggtcccagccgagccggccccggaagccccgcctcccagaaagccccgccccgccacctccccggcagggagacgctgcgtttccctgacgacgacaggtagtccaatggaaatgtggcacctctttctcctgcgcgcggccccgccttttccggccccaaaacttgcgctctcattggtcagtggcctccggaactccgccttcttcctagttctgagccctagccacgccccttagaggctggtcctgaccctcccaccagctgacaggtgtgagcgtggctggatgtgggcggggcgcccacgtggagcttagccggcaagttcccgaggaagactggagctccgcctttcctgaatgtaatagctgacgcggcctgagagcctccaaacccaactcctgggtgggtgggggaacggatcctgtggttcccgcagcctcacaacatcctgtgaaatgggcaagacagacattaacatgcccacaggaagaaaatgaggccagagacaggactacgacattgtcattcattcagtaaacatttgtcgaaggcccattgtgtgccaggcatggtaaggggtgctgggcatgcagcggtaaatgagatatactgagtccctgccttccgagatacatcattgagattgtaaaaaaaagctctggaaacttggccagccgtggtggctcacgcctgtaatcccagcactttgagaggccgtaagcgggaagatcacttgaggtcaggagttcgaaaccagccaggccaacatggtgaaaccctgtctctactaaaaatacaaaaactagctgggtgtgatggtgggcacctgtaatcccagctattcgggagggtgagtcaggagaatcccttgaaaccagaaggcagaggttgcagtgagccgagatggcgccactgcactccagcctggcaacagagcaagactccgtctaaaaaaaaaagagagggagaaagaaagtaatcgcaataaaaactggggtaagatgggccaggcgcggtggctcacacctgtaatcccagcactttgggaggccgaggcaggtggatcatgaggtcaggagttcgagactagcctggccaatatggtgaaaccccatctctactaaaaatacaaaaattagccgggcgtggtggcatgcacctgtaatcccagctacttgggaggctgaggcagaagaatctcttgaacccaggaggcagaggttgcagtgagccgagatcgcgccactgcactgtactctgggcaacagagcgagactcttgtctcaaaaaaacaaaacaaaccaaaaaaactggggtaagatatttacaatacatatatctgacaaatgacttatatcctggtggggcaggatggctgacacctgtaaaatcccagagtttaggaagaattgcttgagcccaggagataaaggacagctagagcaatatagtcagacacccatcttaaaaaaaaaaaaaaaaaaaggcagggggaggggaggatgggcgcagtggttcaaaccagtaattccagcacttcgggaggcctaaagggacagatcacatgaggtcaggagttcgagaccagcctggccaacatgatgaaagcccatctctactaaaaattaaaaaattagccagacgtggtggagggcacctgtaattccagccacttgggagactgaggcaggagaatgacatgagtccaggaggcagaggttgcagtgagctgagattgcgccactgcactctaggctgggcaaaagagcgaaacatggtctcaaaaaagaagtggggggggggaccgggcacagcggttcacgcctataaccccagcacttcgggaggccgaggaggacagatcacttgaggtcaggagtttgagaccagcgtggccaacatggtgaaattccacctctactaaaaatacaaaaattagtcaggcatggttgtgggcacctgtaatc

SEQ ID NO: 1559977 - DNA, 4001 bp, Homo sapiens
gggcgggcactacctgggcaccagcgggtggctcttcaggtgtgactagaggcaccgtctccagccagggttccggggaactgcttgagctcctgctgccctcctgctcagcagaggccccctccacccattctggggagtcagaatcctcatctgggtcctcagggggctgcaacagtcggggggcaggctctagaggctcttcaggaccagtctgggaaggcgggcattcctcgcagtgcaagaggcccagcaggtcatcccggccagcttcggcagacaggagcccgtgggcatcagcaatctcctgggaggccaggccatggcctgtggcaatgtgtaggggacagggggctccacctggggatgggcccaccagatcgcctggcagagcttcaaactgctgcaccagctcctgaaggcttgactcatcaagttccatccgactgaggctgccggggcctcctggcatagggtcccactggctgtcaggggtgaggtcctccgaaggcacaagaatgtccctgggcccctccaagtccatggctggaggccccgaaggggatcgggaaattgtggggaagtccatgcctggactccaggcttaggccggcatcttcaggcagctgaaagagagagagtcagcactgaggtttcgcccgggtgcagtggctcatgcctgtaatcccagaattttgggaggcccagaagggctgactgaacccaggagttcaagatcagcctgggcaacagagcaagaccctctctctacaaaaaatacaaaaaattaaggccgggcacagtggctcacgcctgtaattcccagcactttgtgaggccgaggcgggcagatcatggggtcaggagtttgagaccagcctgactaacatggtgaaattccgtctctactaaaaatacaaaaaattagccaggtgtggtggcaggcacctgtaatcccagctacgcaagaggctgaggcaggagaatcgcctgaacccgggaggcggaggttgcagtgagctgagatcgcgccattgcactccaaggtgggcgacagacgagactatctccaaaaaaaaaaaaaaaaactagctaggggtggtggtgtaggctgtagtcccagctacttgggaggctgaggtgggaggatcacctgaaccaggggaggcagaggctgcagtgagccttgattgtgccactgcactccagcctgggtgacagagtgaggccctgtcttaaaaaaaacaaacaaacccgaaaaacaaaaaacttgaggtttcccggctgcctatccggtgctaggctctagctgggtactgttcatacagggcacataatttaatacccactaacccttgcaaggaagttaggattcccattttacagatgaagaaactgagccacagaatggggaggtgtgaggcagtggcttcccgagcccctgtgtcatcccagacctctctcaactaatggagtctgttcactccagccctggttcttccaggtcctcctccctcaagacgcggaacccaggctggagacccagacctcacaccctgactctaccgactggtcagaggcagttccccaagaccccagacccaagaccccagtcccatgacctcaacccccaatacctccatccagaactttagacccaggaccctggacttaataccagagacccaagacgccataaggcggaccccagtctccaaacctccaatgctaccccaagatcgactccagactcagaccccgacttcaggacccagccccaagcccagaccctagtcccccctcagaccgaagacctcaagcgccgactcagactgcgctctgcacctcgaggacactcacttcccaaatcgaggccgcctcagccccgcgcagcctccaggaccccgctccccacggacggccccgacgtagcccgggccgcgtccccagaaggcgcagctcggggattcccggtcccggcgcccgctcctctatccgcgcagagccctggcccattgagcatgcgcggcctcgcgaggcctgctgggaaatgtagttctcccacccagcctcgccacgcgggggcgctgggacaactgcagatgttggaggggagttcgaatcccaggcttcccggcccgcagactgccccggctggccccaggacctgtttgttctcctgcaaaatagggttaataatcactgcctggctctgggggctgtgttcattattccaaaggatggcagatggggagaagtggggttgggaaatattaaagaagtgtgagaggtggtttccttgggaccttgaggcaccggaagcgtcgtggagaccctgttaaagacggactttcggtttggctcacagtagggagacacataggtgcaccatggatttggggtcggcctgggaactttacctccctgagaactcagtttcctcattataagctggggaaaaaatagtacctacctctcaattgtgaggattaaattagatcaagcgggttaaggatttagcagtagtagagctggaaaagaatatataaaatatatattattaatttatatattatatataaaacatactatatattatatgtattatatatgttatatataattttaaaaatataatgttataaaaattaacagtgattagactccagccctactggagtatattagactcattgttaatcttctttttttaactttaaagctttgaataattactcattggatggaatcaggaacatataaagtgtgatatttttagtaaatgttatgtaattgaagaagggcaagaagtcaatgaaatatcccttgaacgcctcctcctatagtaactgtgtatgtctacaaaagtctgaagaaatcaccatagattatgaaagcttgggagaccgcatttcccagacacctccacggggcctacacttccacggggcctacaactcccaaacacccttgggccactgacgtcttccggaaacgtgcacttgcaagctgcccgcaatacgtcatggcgaccaaacgccttttcggggctacccggacgtgggccggctggggggcctgggagctcctaaaccccgccacttccggaagactcctggcccgggattatgccaagaaaccaggtgagctgggttaagaggaaccaaatggggacggtgggtgcactgaggaattgacagtgcgcaggcggtggttggggaggtggtgctagaactgatgcgcaagcgcagagaggcggatgccaggctgtatgcgcaggcgcagtttgagggacccagcgccgcttggagctcgggcgtctggctcggagatactgtagcgattggacccagggcgcaggcgccagcttggggcggagcggcctgggaggaggatgtggttacgtggagaccacgcgtttcactgcgcaggcgcgggttggaaaggatttgaagggagtctggggaggtcatgaacttgggttccagttctgtttctctgcctgcctccaaatcgctgggtaaccttggccaagacgttaccaaacattcaaagaaattatggagcccgtttaattggccacttcagcaagaacaaaacaaggttattaaggtttagctggatacagccttgcctgatctcctttgttgaaagggggaaattgtccaatgttcggccttaaagacagacacatagcagacaaaatataacttgaatgacttggtcattccaagcatcggtgttacttaatgctatgtccaaatcccacttaaagttacttaatgctgtgtccaaatcccacttaaagtgatttcgaggccaggcatgatggctcacacctttattcccggcactttgggaagccaaggagggaggatcgattgcttgaacccaggagttcgagaccagcctgggcaacatagcaggaccctgtttgtataaaaaaaaaaaaaaattgcctggcgcggtagctcacgcctgtaatcccagcactttgggag

SEQ ID NO: 1559978 - DNA, 4001 bp, Homo sapiens
cggctcggccctcccgccggagccccccttcacgccccccttccctctttgttcctttcccatcagcgctcgcctcctccctccgcctttgtctcagacgcaccaatggcagcccatccctctgccacctccccctgccagcctgagccccttcctcacaccggccctgtccagcccacctgctcctcccctccctcctccacctggccacacacatgtattcacccgtcatttgttctctgacccccaggtgccccctcatcccctcccctcccacccaaatgtcaccaggggcacggctgggacaggagtaggggtgggggctcagtcgcaggtgggaggatggagtcgggctgtcccgtcctgctcaggggacgcagtgtgtggcttgccatgtcatccggctccttcttggtctgtcctgagtctcagggaccaccatttggctgttcccagagggagaaacgaggccctaggaaccgaggtctggcacccagatgctgccccagaggggctgggaagtccaggctggaggcccgacaagacccgcccctctctggctttgggttgcccctctgaggaacctgcagggcaggagtgcccaagggcagggtgggaggggcacagggactggaagtcaggtggcagaggctggcacctcccaccctgatccgatgatgtccaaggctgttcaggtctccagtggggatcaggcttggggttgggggctacacgcagggagaccctggggtctggctcgagccccatgttccagctgaggtcaccatcccatgcccagccaggtggaaggaccagatgacgtgcaaagcaacacatgtctgcctcctgctccccaaacccaggcctcccccacgtggttcttctcagctgaccgaagccaagcctcagacaccttccctctccccacattcggtggtcatttctgcatcctcatcagactaagctagtccctccaagctctgcccagcgggatcatgcctcccccagctcctgacacccctctgtgaggacattctgatcagcctcttcctggcctcccacagtcccccatgcacagccagagggagctttaaacgtcacaagtgagatcccatttctcccatgctcaaacaccttccatggctccccagtgccctcaggatacgctccgactcctccatgtacaccgcgactcacttagaggctggaggctctcttctctcaggcctttgcacgtgcagttgccctgcctagagcaccttttctaagtcctgccatcccacacagtgcagcttcttccacgaagctcttctgcctactttcacccccaggttgcatcgtgtagcctcctgggggccttcctgagcgatcactccctgaaggcaccatgactgggggctggtcttattgagcgggctgcatttcaggggagggaggcacaggtatgggaagccaggcccaaaggggcctttctccttcctttaatccaaaccccctctttccagagagggaaactgacacccagagaggtgcagcaacacccccgaagacacaccactggcctgcccatcccttcctccgatcacctcagggaggtccggatggtgaagcccgtgagtgggtgtgtgcgcaggaccggctgcagaaacgctgacgcccagctcaccgggactcagtttcccctccagctcccactctggggaaatggagggtccagagtctgtgctgacgggcaatgctgagagccagggatggaaacctcgacgcgaggcggaggtcgcgcccctgccctcctccccgaggacacacacccgcttacgtgcagctgggctggcggggcgcctgggtctggggcctcctccctctgcgcggctccgcgggccccaccggaaatcccggcccggggtggcctcggagcgcgcgggctccggggtctccgcggcgcgggcaggggctccggggcggacaaagcccggtccgggcctgggcaggcggcgctgccgctcctagcgctgggcgagaccaccgcgagcgggggaggatgcgggatgagggatgcgggtgagacagccaatgagggcgcgggaagacgggctggtgccatggcaacagccaatggcggcccggggcggggaccggcgtcggccgcggggcgtcgggcctccgcgcgggctcaggggccgtgagtgcggggggcgaaacccccccgagggaagggggtgccccgaggaccaagattcctgtgtcccgcactttattgcagggtgcaacggcctcttaaaacctcctgcgtctggatttgcagaattggagagtaaaacatcaaatcctggatgttacatcagcatcttggcgggggaggggtttccagggcagtggccgggctggggccaggcctgcacccaccccacaggtccagcctggcctggtgcaggtgcgtcagggtgggacagggttcgggtccaggctggagctccctgagggtcctgcctggtggggaggggagaggggaggaggggcagggccactggggagcacctgggacgctgcatctccccacatttctccctgtctccccaacggagcgtcagatcctcctgtaactccgttgctcttcatgtccctctctctttctgtctccccctctgttctctgtctctcaatctctgtctccatgtgtctctgcccctggtgggtggcacacttaattcaccctcacggaccgaaggccagaggagggaagggccaggggtcccaggagtcgccatctccaggtgtcctggatgctccatgagtccctggaagccatttgaaggtttaacacacagagcccgtccctgcagctcggagcagcccttcctgctctggacacagactcacagcacagaaagggaggcgactggggccagaagagtgatttttttccgtgctgggcaggcagggcaaatcattcgccgctcaaccctcggtttcctcctctgtaaaatggagaggaggcggaagattctgcaagggctggtgcagggaatgataggagagggtgggaaggtccgagtattcaaggccccgtagacaaaggcaagggaggacccgtgctgtttcctgttgggccttgagctgaagacccgagggccttgtcccgggccagcactgccaggggctgagagcccttcggcctggctgtctgggagcccccagagctggacgcagctgtccccactggttgggtctggggaggcaatgcagtgggcagacacaggggatcttttcttttttctttttcttttttttcttttttttttttttgagacggagtcttgctctgtagcccaggctggagtgcagtggcacgttctcggctcactgcaagctccgcctcccaggttcacgccattctcctgcctcagcctcccgagtagctgggactacaggcgcccgccaccacgcccaggctaattttttgtattttttagtagagacgggatttcacgttagccaggatggtctcgatctcctgacctcgtgatccacccgcctcggcctcccaaagtgctgggattacaggcgtgaaccaccacgcccggcctttttttttttttttttttagatggggtcttgctctgtcccccaggctgcagtgcagtggcgccatctcggctcaccgcaacctccgcctcctgggttcaagtgattctcctgcctcagactcctcagtaactgggattacaggcatgtaccaccttgccagctaatttttgtatttttaatagagagggggtttcaccgtgttggtcgggctggtctcaaactcctgacctcatgatccgcccgcctcgaaggggatttttttctggaggctggaaggctgccctgagaagtgaacagcagtgatcaggaggagaggcgttccaggctgagggaagatcaatgcatgcttgggacacagggggtgtctggtggagccatggggtagggcgcgtggtggggtttgacaggtcaag

SEQ ID NO: 1559979 - DNA, 4001 bp, Homo sapiens
gtccgttttcaaggctctagtattcatgaggacatcgcttccctaggccctgcttctccctagcaccagccttagatatccaagctccttgtgctcattggccacgcccactagcagttttcccttaaaagtcccgtcatctttaagccctatctcttttcctgtgctgtttctttctgaaggtccctctaagcccacctctctggtcacccctccccgcagtcagattcgtctccccaaaggtctcaccctcctttaggccccgccttttcctctattccgcctctccaaaactctcccttcccgttataaatttgtcttttcatggccacgcccccccagctctccgcgctctcattgggctccacccctttccccatcttgctggtccttaaggtctctttctgtcttagccccgcctatcctttcgccactcccccctacacctctactctttacaaagaccaccagattcctaaattccacttcctctctggctatctcgcggctctccccttttcctgacttagtatctcaaaacaggtcccctgcccctagcatagttgcgcctctttattggccacgccccccagcctccacgccttagatcgcgcagcaccctggaccacgcctttttcaagtctagctttctatgggcggccccgcctctcccgttcggccccgcccacctgtctgcagtactccagcacgcgctgcgggtcccggagacagcgtcgagagcgctgtgggtctggttcccagcggccggtgcgcaggtcccggtgaagggttaggcgcccgcatagtccagccacctgggccgaccccggggcctggatggaagtggaaaggacagtgagggctcggggggcgttggcatgagggtcccctggttctttgctccctaggaccgagacccccagcaccagccccctcccccaagcaccgcacaccgcctccatggaggcaccgttccctgggaaacagctcccgtagggcgggggcgccccagcgctcccgttgctatggcgacctgggtcccccgggattctttctgccttgttgccgcggagacagactccgcccccaccccagcgcagccgctctggagcccgaaggggttaaacctgaatcgcggaggaggaggccagaacccaggagttctggcccctcctccctccatcccttgctcaggctcccgttgcaggatgcaaagctgacaaggcctggcttcaggggcctacagtcctggacaccaggtccttgaggactggagagctacatctggttggggtgggtggtgactgaaggactggactcctgggtcctgggaggctgcaagggcctccatatgggtccagagaatacaaggggtctggattattggatctaaatgcctcgctgcttggtgggtcctatgtccaggcgggagggggttggggccgagtcacctgggtctggagagggggctggacttctgggaccaggggctctgaatagaccagttcctatgctcgagatgggagggggctgggacgtcgcatgatgggggagctggggcctggaaccctgggttcataaatgtgattgggggcgcctgggggctgaccacctggctggaaagaccgcgctttctgccctggacatgtccgcgccggcgtccagagacccggtcccgccccttcccccatcccccaggacccggcccggcctcacctcggccgcgccggggctcccaccggccaggctcccgatggcgggctgcgcgcgcagaagcagcagcaatagtggcagcagcagcggcagcggcggctggcccgggcggcgacttagaccgcgagcagcggggctggcgggccccatgtcccggcccttgcgccctcacgtcccctgcactcccgcccggcccggccccagcggtgacaggagctcccagcgccaccgccgccacctcctcctcccgccgcccccgggctgcgccggcgccgccagccccgccccgcgccggccccgccttcctggtcaggacaatagcgtggcggcttcgcgcagagtggagcagctcgggaaccccgggcgggagcctgcgccaggcccccgcccctcgagattccaggcgtcccgccccatgaagggcccagccaggagtccggctatgggctccgcccgttgtggattttgagtcctcccgcaggactctcaccctctttagacccagacactcacagttttgtccttttccaaggatgcaagcatcagagacccccatcccctagtacattcctctgttgagggctcaggaatacaggcctccaaaatgtccccagtcaagaaggcagcagttgagacctagtcccttcctctttcagatccagaagtctgggcaccttctctctcaggaccagagaccaagcccccagcccattctccttcagacccaggagttcactcttcttgctctgcttcccaagggtcccaggggcctggacctttaactcctagctcaaggatccatgaaccaaagcccccaggacctttctttaaggatcatccaagcaggcaccagcaccatgcccactgtggatgcagcacctcaggattagggtctggatctccacgcttgctgtaaggaccaggggattgccattttcctacccatagtctccccttccctgctccacttcagggctcacttgtttgtctcctctaatgagagttagaattcagtcttccccaggacccctggggcagccctgtcacttgtgtgcaactgtgtggacatctatgcgtgtgtctgtgcatacatgcctatgtgtgtgtcttttctgtttgcaactcatgtgtgtgtgtgcgtgtgtgtgtgtgtgtgtgtgtgtgtgaagatgtatattaaaagagcccatggctgggcacagtggctcatgcctgtaatcccagcacattgggaggcctaggtgggcggatcacttgaggtcaggagtttgagaccagcctggccaacatggtgaaaccctgtctacaaacaaatacaaaaattagctgggtgtggtggcatgcacctgtagtcccagctacttgggaggctgaggtggaaggatggcttgagcccaggatgcagaggtagcagtgggctgagatcatgccactgcactccaatgtgggccatagagccagatcttgtctcaagaaaaaaaaaaaaagagcctagagtgctttgcaggtagcaagaggctgagaggtggctcacagttttactcctacagccacctcataggctagggtagaggagggaccttgggacaggtctaagggaccccttccttggtggagagtgataatgccagtagactccctaagacacacttgcctctttgacttttttttattattaaacataaatatttttatcccaatattttgccccaacagtggtaattctcactgtatccccactccttgggtccaagtctttctgagtctttaaggaaagtaaaatcaagatggtggccatcttgggttcctagggagtatatggccatcttggctgcatttccattggccgagcaaagttcccctcagggagagccagggtggggcctggtatgctcttcatcttcatctatcctatgctacctttcctctcaatgcagatggtcatcttgaaatatcttctttcagtggctagaaacaacttccatcccggccccaaactcccaacacccactgccctgtccccatctctcctcaaagggcctacctgccatcttgaatctcttttacaccggggaataggtgggcatattgggtggccatgttgctcccacttggggcatctcctttggctgagctgactgtatacaaatgctcctgacaaatgtaatgatctttccctccccttgtgttcagttttggaggagtaaggtcgccaacttgtcctggctcctcagaaatcagaacaatccattatggcaagttggagatcccaggactcttccattgga

SEQ ID NO: 1559980 - DNA, 4001 bp, Homo sapiens
tgtatttttagtagagacaaggtttcaccatgttggtcagactggtctcgaactcctgacctcaggcaatcagcccacctcggcctccctaagtgctgggattgcaagcatgagccaccgtgcccagcccaagaccatcttttaaaatatggcctggatgggagtcagggaaactgtccttgaagtctgagcaccttgagatctagctgtgtgaccagagggatgttgtcagcctctccaggacttgtttttttttcaatctgttcatcttggaccatctgccagggctccacccaaaaacacaccccagctctcccgtgccctgggaagggttctaaccgcatcttggcagaaagttcactctgtttgatgcggctgatgagttcccgagccttgtcctccagtgtgtttccaaactccttcagcttatccaaggcactggagacgtctggggtcccctgggctggggctgggcctgccaggaagatgggcaggggttcaaaatttgtttttttttttttttttttggagatggagtcttgctctgtagcccaagctggagtgcagtggcatgatctcggcctactgcaaccaccacctcccgggttcaagcagttctcctgcctcagcctcccaagtagctgggattacaggtgtgcaccaccacacccagctatttttgttttgttttgttttgagacggagtcttgctgtgtcagccaggctggagtgcagtggtatgatctcggctcactgcaacctccgcctcccgggttcaagtgattctcctgcctcagcctcccgagtagctgggcctacaggcgcgtgcctccacacctggctaatttttttgtatttttagtagagacgaagtttcaccatgttggccaggctggtttcgaactcctgacctcaagtgatctgcccgcctcggcctcccaaagtgctgggattacaggcatgagccaccctgcccggccaaaaatttgttattggaacccccttaggttgggataccgggatggatagagatccttggggatcatgtggttagaatggggaggaatggccggacgcggtggctcacgcctgtaatcccagcactttgggaggtcgaggcaggcggatcacaaagtcaggagatcgagaccacggtgaaaccctgtctctactgaaaatacaaaaaattagccgggcgcggtggcgggcgcctgtagtcctgctgaggcaggagaatggcgtgaaccagggaggcggagcttgcagtgagccgagatcgcgccactgcactccagcctcggcgacagagcgagactccgtctcaagagaaaaaaaaaaaaaaaaaaaaagaatggggaggaatactggagtgacctggtggggctcaagctgctgggaattgccttactcagcactgacctctcccagagccccccacccagcttacccactttcaaggctgtcgaagcaggacagccaatcccagaggtgtgggcctcaatacgtcatcggttgctagtgctctcctgcgcagatttggcgcctgcgggactgagcctgggagaacctggagacccacccgaccacgatgaggcaaccacgacccagaaggggccccggagctctcagaggtcctctaagccgggaccccaggcctgtagccaccttcactcttccaaatctccaactccgcaattctcccatcccacttttaccttccaagacgatcgacagaaccaccaccaggaccgggagcgacaggaagagcctcatggcgaggccggaggggcactctggaggcagaggcaggggttcaggggatcagtggcaccctcctccctccctacctccctcccacgatcccctcatctccctttttgagtttcttgcagagtgtaggcgggtgtccctcccaggcactcagcaccaacctgaatccttgctggagggcttggttgggaggtcctgtcctgcccgcaggacctttatcaggctggggagggggcggggcaggttgatgttgatctccctcctcctgagccttcccctgaccgcctgcctccctctgtccacccacgtttttctcctctgcccctgtcccgtgagcgttggggtcaggtggggtcccgggcacttcccttagccccaaagcccctccccgttcagcactctcacctctcaatcttcctgactctgtggggtcctcagaccaccttagtccctttccccactcagaatgtagcaggaggagccgcagacaaaattcctcagacgctgagttaaggaaggggtttattcgttcggggaatgggcaagattcctgtctcaagagccgagctccccgagtgagcaatccctgttccttttaagggctcacaactctaagtgggtgcacgtgagagggtcgtgatcgattgaacaagcaggggatgcgtgactgggggctgcatgcaccggtaattagatcggaacaaaacagaatagggattttcacagtgcttttctatacaatgtctgtaatctatagataacctaacggattaggtcaggggtcaatctttaaccaccaggcccagggtgtggcgcgggctgtctgcttgtggatttcatttctgccttttagtttttactttttctttctttggaggcagaaattgggcataagacaatatgaggggtggtctcctcccttaagaagacagccttgtcctgtccctgtggccatcttccctcaggggtctcccagtaataaccctgtgatctcatccccccctcattcacaccgtgtccctagatcacctctttccctcacttcccctctctcagcaagcctcctcagccccaacaacttttcctttatgttgctgggtctcccagttggcccggcgctcctaccctgcgtgccacctccaatttattccagaccagcccttgaagcaccccagaccaccgtgatattctctgggctcttaacttcatggttctcagtctcccttttttgggaggggaacgggtcgccttagctggatgacactgcaaaaacctcacctgcattagccaggcatggtggctcatgcctgtaatcccagcactttgggaagctgaagagggaggatcacttgagcctgggagttcgagaccagcctgggcaatatagggagacctcatctctacaaaaaagttcaaaaattagccgagcgtggtggcgcatgcctgtagtcccagctactcaagaggctgaggtaggaagattgcttgagcccaggagttcgaggctgcagtgagctgtgattgtgccactgcactccagcctggtgggacagagaccccatctcaaaaaattaaaaccctcagctgcaaagctctgcgtgtatgtcccttcttcccttccaccgggcctcaccccctttggctggctacctcccccaaacactctatctgcttttattcaccctctgacgcccctcctggcaccaagcctgcttcccaccatcactacatccgtcccccaaggctggagtccaatgccttccccaccagctgcctttgaccgccagtgaccctggcagctggtggggagggtgtcctccgcctagcctcagactctaggttggctggccttgtgcccccgcaaccacgtgtcagcctggcagtagggggatggttgtgaaaaggacagcatagacaagaccctggcaggattgcaacatccctctggccagctcagagcttccagtccctgtcagccccaggggcccccctacttccccaactaagcccagcaccccccaaacatccacccagatgtctgcttcccagaccccacaagaatagcataacaatgctcctgcttttccaacctcatcctcccctctgctataggggtttctctttaatagatggggaaactgtcgcataaccaagaacatccagtagggctcagcgaggggcaaagatgggggctactggctggttgcagtggctcacgcctgtattcccag

SEQ ID NO: 1559981 - DNA, 4001 bp, Homo sapiens
attcttctgcctcagcctcccaaggagctggaatcacaagcacctgccaccatgcccggctaatattttgtatttttagtagagatggggtttcaccatgctggccaggctggtctcgaacttctgacctcgtgatccgcccaccttggcctcccaaagtgctaggattacaggcttgagccactgtgccccacctgatttttgtatttttagtagagatggggtttcaccatgttggccaggctggtcttgaactcctaacctcaagtgatttgcctgccttggcctcccaaagtgctggaattacaggcatgagccaccatgcccagctgctaatttttattcttttgtagagatgggagacttgttttgttgcccaggctggtctggaactcctgggctcaagcgatcctcccatctcggcctccccagggtgctgggagtacaggtgtgagccactgagcccagcctagaaggctttcttgagcacctaaacagttctgggcccagcagggaacacagcaaagcctctgccctttgctaaggctgagtcagtgcagggaggtgctctgcagacaccattaaggacctacagtagatcaaatgtgttaccttagggctctgccctaagtcagacctcatgtccctgcatctcctcactgagttctcacctgctctatgagagaggcacttttggtgacgaagaacatgcacagggcacaatatcatcatccacacgtaggagatgaggaagtacggcagaaagagggtgagatctgatccccggagaaagaacacaagcaaatggtctacaattctttttttttttccaagacaaggtcttgttctctcgcccaggctggagtgcgatggcgcaattttggctcaccgcaacctctgtcttccgggttcgagcgattctcctgcctcagcctcctgagtaactggaaatacaagcatgcaccaccatgcctgtctaatttttgtatttttagtagagacggggtttcaccatgttggccaggctggtctccaactcctgacatcaagtgatccgtttgccttggcctcccaaagcgtttggattacaagtgtaagccaccacgcccagcctacagttcttttttagttttttaaattttttcattctttttttccgccaagactgagtcttgctctgtcacccaggctagagtacagtggcacgatctgggctcactgcaacctccgcttcctgggttcaagcaattctcctgtctcagcctctggaatagctgggattacaggcatatgctaccacacccggccaatttttgtatttttagtatagatgcggtttcaccatgctggtaaggctggtgtcgaactcctgacctcaagtgatccacccgcctcggcctcccagagtgctgggattacaggcatgagccattgtacctatccctttttctttctcttttttagaaatggggtttctctgtcacccaggctggaacacggtggcaagatcacagctcactgcatcctcaaactcctgggctcaagggatcctccccacctcagccaccctaactctaagcagaagctcaaatagtctacagttctaaattctgtgatttgtggagtgtggtggtgcacctgtagtcccagctactggggaggctgaggcaggaggattgcttgagcccaggagtttgagtctagcctgggctacatagcgagactccatctccctctctctctctctcacacacacacacacacacacacacacacacacacacacacacagtcatggttccaacacgggcttctaatattgtgcctcttaaaattcctgctttatcgatctttgccctctccctgctgacgcccccctgtccccgcaccctgagtccctttcttaccagactctggcaggctgtcctcaccagctccggacgggcacagagaggatttatagtggttgagacccacttccgctccacagccacaacccccatcctttgtctaggccaaagtcctggccaacagaactgcggagggggtgggtggggacagaaagggcaatgacgtcccccaaggtcacgtcacagggaaccttctctcaagtgacagggaaccctcactctgagaattcgcctccgacagaggctgggttgggggctgtggaggggttggaggtgctgggtgcccactgggaatggagtcagagcttgtaggagacaagggcgaagctctcagtgagggccatcatggggacctgctgactccacccacgctcctgccctcaccctcctgaaactgacacgccttgaagtcccccattctccgcaagcccacaatagggtgttattccttgatacccttcccgacctccctactcttccttccccatcaggtgtcacctcttctactcattgattcctgggaggcagtggggtgggtttttttctggccacactggggaaggatccagacagggacacaggtgagactttatttattggagaagtatgaacttttttttttctttttgttttacccccaagagatctcgctgtgttgcccaggctggtctcgaactcctgggctcaagccatcatcctacctcagcctcctgagtagctgggactacaggcacccgccacaaccacacctggcttttatgaacattttaaccctggtccttgtccccacagacaagcctggggcacaggctgtgggtcttcttcaagaggctgtctttggattcgaggaaccaggccttggtgagcggacccaggtccctcaggtggtcgtcatagtaggtctgcatgaagccccggaaggtgctcgggctcctacaggagagaggacatcacagtggaggccccagctctccccaggtgttctctgccccatttatccgctcctctctgtgacctaggagttcctgctctcagctctaaccctccactcctcccagacctaggggtcacagccccactcccaccctttcctcctccctgagactcaggggtccaggccccagcccctcctccctcagacccaggagtcccctcccaccacccagcccagcacaccctcaccagaaccattgccacccgtctctggtcctgttcaccactgtctccagcagctccttcatcctgcccctcaccaggctccagcgactcatctttagctttggtggggggctcagggttccttcctgggcctctggctggcatgctaggtggaaccagagggcaacttgggtaggctgggaccctagaatccccttctccctttccctccatgctcatcctgtgtcgctcccggtggcccaggggcagccccctgccagtcctcttgcctcctgcctttacccttatgtgtcccctgaccgctaacccctctttaaccatcagccatctctttttttttttcttttttctttttttttatgagacagagtcagtctcttgctctgttgcccagggtggagtgcagtgtcatgatctcgtctcattgcaacctccacctcctggattcaggcaattttcctgcctcagcctcccgagtagcagggattacaggcatctgccatcatgcccggctaatttttgtatttttagaagagatggggttttgccatgttggggcctcgaactcctgacctcaagtgatccacccacctcgggctcccaaaatgctgggattacagatgtgagccaccccgtccggctgggccatctcttcaccttgtgtcagtagtccctcctgtcaccctgtctgcctgtggttcccctctaatggcctctctaattgccatcctctgatgcctcccttcaccacctgattttgctgcccaggaactacccccttctcccttcgttctcctgtgacccccaccctgtctgagctacctctgtggacagtggagggagagcaggaggtgactttctgcccccaggggcagacattggcttagccttgctgtcagttcctctttccgg

SEQ ID NO: 1559982 - DNA, 4001 bp, Homo sapiens
accttgtgtcagtagtccctcctgtcaccctgtctgcctgtggttcccctctaatggcctctctaattgccatcctctgatgcctcccttcaccacctgattttgctgcccaggaactacccccttctcccttcgttctcctgtgacccccaccctgtctgagctacctctgtggacagtggagggagagcaggaggtgactttctgcccccaggggcagacattggcttagccttgctgtcagttcctctttccgggccagaccttctacccacgcatctggacaaagcctcgcctacagagaccagccgtcacgcgggggccacatgtagctagctgtgtgccttggccggtgacttatcctgtctccccaggactgtttctccttttgtagaacggggtaataatatctacctcagggttatcgtgagaattaagagttactacatacgatgcacatggaatggtgccttgcacattgtctacatacgtgttaaattttttttttttttcagacggagtctcgctctgtcacccaggttggaatgcagtggcgcgatctcggctcactgcaacctctgcctcccgggttcaagtgattctccggcctcagcctcccgagtagctgggactacaggcgcatgccaccatgcatggctaattttttgtatttttagtagagatgggtttttacccatctgttagccaggatgatctcaaatctcctgaccttgcgatccacccgcctcggcctccgaaagtgctgggattacaggcatgagccaccgtgcctggccctgtattaaaaatttaaatttctactggataatgctgatctagaatatgatcccattttaacataaagtacatggccgggcgtggtggctcatgcctgtaatcccagcactttgggaggccaaggcgggcggatcacctgaggtcaggatttcaagaccagcctgggcaacatggcaaaaccctgtctctaccaaaaatataaaaaaattagccaggcattggccaggcgcagtggctcacgcctataatcctagcactttggaaggccgaggcaggcggatcacgaggtcaggatatggagaccatcctggctaacacggcgaaaccccgtctctagtaaaaatacaaaaaattagccaggcgtggtggtgggctcctgtagtcccagctactcgggaggctgaggcaggagaatggcgtgaacccgggaggcggacgttgcagtgagccaagatcacgccactgcactccagcctgggtaacagagcgagactccgtctcaaaaaaaaaaaattagccaggcatggtggcgtgtgtctgtagtcccaaatactctgaagactgaggcaggagaatcccttgaaacgggtaggcggatgatgcagtgagccaagatcgcaccactgctaccactgcactccagcctgggtgacagagtgagactccgtctcaaaaaaaaaaaaaaaaatgcatatgcaaaacacagacgtacacaccagcacacactcaccccctcacacatgtccacacactcaaatattttgcacacacataccccacagagagacaggtgcacacaaatacacatatgcacacagacatgcacttttttaccacgactgcatactcccacttccacgcacgcacgtgcacacacacagatgatcccagtttgtaccaatgtgacattcacacttcactctcagccaccgacacacacactccccgacacgcacatgcatacgcacgccatgaaacgcacacactccgtactcatgtctcacgtggctacagagccacaggacacacagccacactcacacccaccaggtgtgggccccacatccctccacccacttcttctcacccccaatgcaggccaggaccagcacgcagaggcacagggcaggcagggcctggagcctgtttctgaggagggacatttctgggggttccgtgcctctgtccctctgtgctcaactctgcgggccgggggaggggaggctgcacagagcagggccctcccccggccacctccccgcttggcagagacttcagagagcagggcccaggtgacagtggcaatcagaggtcatgcctctgtgggcctccctccttctcaccctcccacacagtgccctgagagaagacagaggctcttgagcctcctgcactgaggcaggttcaaatcctgtctccacctcccatgacagcctcatttgctggcctcagtttcctcctccataaagtgggaggcacagtacatatttcagtatattacttgaacaaatacaaagaaaggcgcagtggctcacgcctgtaatcccagcactttgggaggccgaggtgggcagatcatatgaggccaggagtttgagaccaacctggccaacatggtgaaaaaccctgtccctactaaaaatacaaaaattagccagaagtagtgatgcgtgcctgtaatcccagctacttgggaggctgaggcaggagaatggcttgaacccgggaagtgaaggctgcagtgagccgcgatcacaccactgcactccagcctgggtgacagagcaagactctgtcttgaaacaaaacaaaacaaaaaatgaagaaagctcttaccgtggagactggcaatataggtgctcaaagatcattgctgttggccaggcgcggtggctcatgcctgtaaccccaacactttgggaggccgaggcaggcggatcacgaggtcaggagattgagaccatcttggctaacacggtgaaaccccatctctactaaaaatatgaaaaattagccaggcgtggtggcaggcgcctgtagtcctagctactcgggaggctgaggcaggagaatggcgtgaacctgggaggtggagcttgcattgagccgagatcgcgccactgcagtccagcctgggcgaaagagcaagactccgtctcagaaaaaaaaaaaagatcattgctgttattattatcttgtgtctaatttctcctagtcactgggctgcagggccaggcttgtggtagggcctcaatagggcccaagggttgatgagaggaaatagcaacacagtctcatgtctccagcctctgtttcttcctaggtgggctcgagcccgatcacttccaagcattccttgagttctcaattccaactctttctcctctgggtgactctggcttcagatggacctgggcttcgaatccctcacttcttcaccgtgtgacctgggcaaatacgttttcttttctggggctcagtttgttcaactgtaacacggggttgatagggagcacctgcctcccagtgtcctcatgcaggacggctgaggcctatgcaggagagctgcaggtgcacatagtaggaggtcatcaacatcaggcccagggccagggcggtggctcccacctgtaatcccagcactttgggaggccgaggcaggcggctcacttgaggtcaggagttcaagaccagcctggccaacgtagtgaaaccccgtctctactaaaaatacaaaaattagccgggtgtggtggagcgagaccttgtctcaaaaacaataacaacaacaaaaaccaacaaaaaacccacatcaggctcggtcccagtgccagaaatagagcatttttctcctgaaggacccagctgcaccccagggcacatggctcaggggactatggactggattcttttttttttttttgagacagagtctggctctgtcgcccaggctggagtgctgtggcgcgatctcggctcactgcaagctccgcctcccaggttcacgccattctcctgcctcagcctcccgagtagctgggactacaggcacccgccaccacgcccagctaattttttgtatttttagtagagacggggtttcaccgtgttagccaggatggtctcgatctcctgacctcgtgatccgcccgcctcggcctcccaaagtgctgggattacaggcttgagccactgcgcctggc

SEQ ID NO: 1559983 - DNA, 4001 bp, Homo sapiens
caagttcaaggtgggtcagggtccttctgaccccgtccaggcatctagtacctaggggcacacagaaggtgctccacaaatgcttctttggagccatggtgggcagggtgaggggggagtcggtttaatcacttggaaagcattatgtatttataaacagggtcttgctctgtcacccaggctggagtgcagcggcctgaacatggttcactgcaaccttgaccttctgggctcaagcgatcctcctgcctcagcctcctgagtagctgagagcacaggtgtgtggcaccatgcctggctaatttttgtatttttagtagagacagggtctcactatgttgcccaggctggtgttgaactcctgggctcaagtgatcctcccaccttggcctcccaaagtgctgggattacaggggtgagccaccgcgcccagcggaaaagcatgtattgagtgtccttgtgtgccccaggcagggctgtgtgggggtgatggagaataaagatcacagctgccccgtgtctggtattcactatctgcctgcaatgcattagaaacctctaactcccagccaggtgcggtggctcacgcctgtaatcccagcactttgggagatcgaaacgggcagatcacctgaggtcaggagttccagaccagcctggccaacatggtgaaaccccgtctctactgaaaatacaaaaaagttagtcgggtgtggtggcatgtgcctgtagtcccagctacttgggaggctgaggcaggagaatggcgtggacctgggaggcggagcttgcagtgagccgagatcccgccactgcactccagcctgggcgacagagcgagacttcatctcaaaaaaacaaaacaacaacaacaaacaacaacaacaaaacaacttctaactcctatctcaaggatgggggaaaccgaggcccagagagcgtcaaatcgctgttcagagccaggaagcagcacagaagcctcagaagagggggcccagggtctgcctgaatggggccaggaggttgaggtgaggatgagagggggaggagcggggggaaccgagcaagccccgcccccatacctgccaggaatgtgaccagcaacgcagcccacagaaccttcatcttcctgcctgtgattggccagtctggggaaggagaaactgtcaatcaaccgccagtgaggactcctcccacccccagcccggccccaacccggcctcaccccaggttagccttccaagccttgttgcattatctgcaacagcctaatcccagcacatttaccaagccgcccccaacccattccctatttaactccctcctggtcttctcttatctccccatccccaggtcggcctccatagaaaattccatcttcctctcccggggttcaaattccatccccccaccccctccccaccgccggttccatctcagtcccagtctcgcattcctcattctcccttcacattctaagctccaacctcacagttaagcgccgtgttccatttatgagctaattcagtcctcattttaaagttctccaatcgacggctagctaccgtgtcgctgcccctggctccccagttatggagatctgaggacactggggacacccagtaggtgctcgataaatgatagtgacaactcgtggagtcctgctatggcttacatcccagtccagctgctctccccaccccaccttctagcgggtcgggtcgtctctgctgcccagcccttcccaggtccagtcccctgctgcttgcctcacccccgctcctcctctccccaagcccgaccccgagtagctctcctgagactacctggaggccaggggttcccagggtcccagctctttctagaggcccctgagctcatccccgtgcccccgactgcgcttctcaccggctcctggggaaggacgtccttcacctccgctggggctgagtaggactcaaggatcccagacttgtccaattatagggctccccctgtcccgccccctcccccagggatagggcgggctgggccagcccccagtcacgaggtgggctgttctccccctgccccaggcacagcagggcagagggaggaaggaggtggggcatagaggtcttttgaccaccccccacagtccccaggaagggaggacacctcgcccagtaatacagacaccctcctccattctgggggccaagcgtggaaggggaatgtggaggctgccgcccagagtcctcctttcctgaccctgtcctttcctgtgcctggatgaatgtaatctggagagggggctggggatctggactcctggatcccagaaagaaagtagggctagggggctggacagaagtgggatgggaggggctgggggcggtagctcacgcctgtaatcccagcactttgggaggccacagtgggcgaatcacttaaggtcaggagtttgagaccagcctggccaacatggtgaaaccccatctctactaaaaatacaaaagttagccaggcgtggtggcgggcgcctgtaatcctagctacttgggaggctgaggcaggagaatcgcttgaacccgggaggcggaggttacagtgagccgagatctcgccactgcactccagcctcagcaagagggagactgtctcaaaaaaagaaaaaaaagaaagtggggctaggcggctggacagaagtgggatgggaggggtgggaacagtatgatgcacctgctaaaagtcgaggctttgcaaatgggacctgggttttaatcacagcttcctctttggttgtgaccttgagcacaggggagccccctccccacatgtgaaatgagattccagcacctccccctggctgccacaggtattgtggtttccaggggcttgaagccgtgcttctgggttaaggttaggattctggagtcaaattgccagggcgtgaatcctggctctgccagttgccagctgtgtgaccttgggcaaatgacttgtcctctctgagcatcaagttcctttgctcatcagactgggaaagcagcggcacgggtatgtttggtgacaagctaacgtgtattgagcatggaggacagccctggcacacagcggtcctatgttagggctagcaatggacaggccacagtgaacgctcagacgctgtcactttcctaagccctgttataaatcccagatgtttcagaggagaaacccgtggttcagcagcaagacgaatggcaaaaccacacagtgagaactgggagagactgggactcattcctggctcctggagcgggtgggatcagaagattctgcgggtcaggggaggctgaactcctggttcgagaaggaacccccagtgccgggccgggcctgtttgctttggctggcaaggggtggctgaggtggggttggtaacctggggttggttctactcagcagcctccttccccagaccctgggggcagacagggtttcagttcctggaggctcgggagtcgtggtgggcatcagctgaccccagccctaggttggcaaaatccagacagcaccaagtcctcagacacaggtgacccaactcccatggctggcctaggcccctcctcccaggcctgcgagtccttgagccccttctccctgacacagcagttcctagtaccctagttgttctgaagctgttccagtagcttgaaccctctcccagctccctgcccccatctctgcactcagagacagtgtcatctctgctgctgcagtctgcagggacaaagtcctctatagccactccggccaggtcaagctgggggcaagtgaccttgagaccctaccctcaggcaagggaaggcccgtagtgtcccccagcagggcagatgttccggatgggaagatagcgaccccaggccacgctgcgcccctctgagccggacttaaggcagcatcaaggatccgctgctttccgtgctccggccctctggcgccccctgcaggcggctgggggaaggtcagggcggcca

SEQ ID NO: 1559984 - DNA, 4001 bp, Homo sapiens
atgaaacctggacctggggaggtatagccgcccaccaggagggtcaagggccaggatggggacactcacctcagttcctgggtgacctgggagctgagcagctcctcctgcacctgctcagacagtgtctgcacccagcgcaggtaatcccaaaagcgacccagtgccagttcccagcgctggccgctctgccactcggtctgctggcgcagctcgggctccggctctgtctccaccgcttgctccaccttggcctggcatcctgtgtggaacaagttcaaggtgggtcagggtccttctgaccccgtccaggcatctagtacctaggggcacacagaaggtgctccacaaatgcttctttggagccatggtgggcagggtgaggggggagtcggtttaatcacttggaaagcattatgtatttataaacagggtcttgctctgtcacccaggctggagtgcagcggcctgaacatggttcactgcaaccttgaccttctgggctcaagcgatcctcctgcctcagcctcctgagtagctgagagcacaggtgtgtggcaccatgcctggctaatttttgtatttttagtagagacagggtctcactatgttgcccaggctggtgttgaactcctgggctcaagtgatcctcccaccttggcctcccaaagtgctgggattacaggggtgagccaccgcgcccagcggaaaagcatgtattgagtgtccttgtgtgccccaggcagggctgtgtgggggtgatggagaataaagatcacagctgccccgtgtctggtattcactatctgcctgcaatgcattagaaacctctaactcccagccaggtgcggtggctcacgcctgtaatcccagcactttgggagatcgaaacgggcagatcacctgaggtcaggagttccagaccagcctggccaacatggtgaaaccccgtctctactgaaaatacaaaaaagttagtcgggtgtggtggcatgtgcctgtagtcccagctacttgggaggctgaggcaggagaatggcgtggacctgggaggcggagcttgcagtgagccgagatcccgccactgcactccagcctgggcgacagagcgagacttcatctcaaaaaaacaaaacaacaacaacaaacaacaacaacaaaacaacttctaactcctatctcaaggatgggggaaaccgaggcccagagagcgtcaaatcgctgttcagagccaggaagcagcacagaagcctcagaagagggggcccagggtctgcctgaatggggccaggaggttgaggtgaggatgagagggggaggagcggggggaaccgagcaagccccgcccccatacctgccaggaatgtgaccagcaacgcagcccacagaaccttcatcttcctgcctgtgattggccagtctggggaaggagaaactgtcaatcaaccgccagtgaggactcctcccacccccagcccggccccaacccggcctcaccccaggttagccttccaagccttgttgcattatctgcaacagcctaatcccagcacatttaccaagccgcccccaacccattccctatttaactccctcctggtcttctcttatctccccatccccaggtcggcctccatagaaaattccatcttcctctcccggggttcaaattccatccccccaccccctccccaccgccggttccatctcagtcccagtctcgcattcctcattctcccttcacattctaagctccaacctcacagttaagcgccgtgttccatttatgagctaattcagtcctcattttaaagttctccaatcgacggctagctaccgtgtcgctgcccctggctccccagttatggagatctgaggacactggggacacccagtaggtgctcgataaatgatagtgacaactcgtggagtcctgctatggcttacatcccagtccagctgctctccccaccccaccttctagcgggtcgggtcgtctctgctgcccagcccttcccaggtccagtcccctgctgcttgcctcacccccgctcctcctctccccaagcccgaccccgagtagctctcctgagactacctggaggccaggggttcccagggtcccagctctttctagaggcccctgagctcatccccgtgcccccgactgcgcttctcaccggctcctggggaaggacgtccttcacctccgctggggctgagtaggactcaaggatcccagacttgtccaattatagggctccccctgtcccgccccctcccccagggatagggcgggctgggccagcccccagtcacgaggtgggctgttctccccctgccccaggcacagcagggcagagggaggaaggaggtggggcatagaggtcttttgaccaccccccacagtccccaggaagggaggacacctcgcccagtaatacagacaccctcctccattctgggggccaagcgtggaaggggaatgtggaggctgccgcccagagtcctcctttcctgaccctgtcctttcctgtgcctggatgaatgtaatctggagagggggctggggatctggactcctggatcccagaaagaaagtagggctagggggctggacagaagtgggatgggaggggctgggggcggtagctcacgcctgtaatcccagcactttgggaggccacagtgggcgaatcacttaaggtcaggagtttgagaccagcctggccaacatggtgaaaccccatctctactaaaaatacaaaagttagccaggcgtggtggcgggcgcctgtaatcctagctacttgggaggctgaggcaggagaatcgcttgaacccgggaggcggaggttacagtgagccgagatctcgccactgcactccagcctcagcaagagggagactgtctcaaaaaaagaaaaaaaagaaagtggggctaggcggctggacagaagtgggatgggaggggtgggaacagtatgatgcacctgctaaaagtcgaggctttgcaaatgggacctgggttttaatcacagcttcctctttggttgtgaccttgagcacaggggagccccctccccacatgtgaaatgagattccagcacctccccctggctgccacaggtattgtggtttccaggggcttgaagccgtgcttctgggttaaggttaggattctggagtcaaattgccagggcgtgaatcctggctctgccagttgccagctgtgtgaccttgggcaaatgacttgtcctctctgagcatcaagttcctttgctcatcagactgggaaagcagcggcacgggtatgtttggtgacaagctaacgtgtattgagcatggaggacagccctggcacacagcggtcctatgttagggctagcaatggacaggccacagtgaacgctcagacgctgtcactttcctaagccctgttataaatcccagatgtttcagaggagaaacccgtggttcagcagcaagacgaatggcaaaaccacacagtgagaactgggagagactgggactcattcctggctcctggagcgggtgggatcagaagattctgcgggtcaggggaggctgaactcctggttcgagaaggaacccccagtgccgggccgggcctgtttgctttggctggcaaggggtggctgaggtggggttggtaacctggggttggttctactcagcagcctccttccccagaccctgggggcagacagggtttcagttcctggaggctcgggagtcgtggtgggcatcagctgaccccagccctaggttggcaaaatccagacagcaccaagtcctcagacacaggtgacccaactcccatggctggcctaggcccctcctcccaggcctgcgagtccttgagccccttctccctgacacagcagttcctagtaccctagttgttctgaagctgttccagtagcttgaaccctctcccagctccctgcccccatctctgcactcagagacagtgtcat

SEQ ID NO: 1559985 - DNA, 4001 bp, Homo sapiens
ggagacagagacagatgcagagagcagatgcagagggcagaggcagagacgaagaaggagctaggaggccgggcaaggtggctcatgcctctaatcccagcactttgggaggccgaggcgggaggatcgcttgagcccagaagttcaagaccagcctgggcaacacagtgagaccccatctctctgtctctatataaaagagctagggaaggacagagacagagccaggacgagtgtgagagactgagtcagaagggaagagagagagacaaagctgagagagagaattccagagagctaaagccaggagtcagaaatgggaagaggaagctagaaccagcagagacccaggccccccaagacttagcgacaggggcagaatgaaacctggacctggggaggtatagccgcccaccaggagggtcaagggccaggatggggacactcacctcagttcctgggtgacctgggagctgagcagctcctcctgcacctgctcagacagtgtctgcacccagcgcaggtaatcccaaaagcgacccagtgccagttcccagcgctggccgctctgccactcggtctgctggcgcagctcgggctccggctctgtctccaccgcttgctccaccttggcctggcatcctgtgtggaacaagttcaaggtgggtcagggtccttctgaccccgtccaggcatctagtacctaggggcacacagaaggtgctccacaaatgcttctttggagccatggtgggcagggtgaggggggagtcggtttaatcacttggaaagcattatgtatttataaacagggtcttgctctgtcacccaggctggagtgcagcggcctgaacatggttcactgcaaccttgaccttctgggctcaagcgatcctcctgcctcagcctcctgagtagctgagagcacaggtgtgtggcaccatgcctggctaatttttgtatttttagtagagacagggtctcactatgttgcccaggctggtgttgaactcctgggctcaagtgatcctcccaccttggcctcccaaagtgctgggattacaggggtgagccaccgcgcccagcggaaaagcatgtattgagtgtccttgtgtgccccaggcagggctgtgtgggggtgatggagaataaagatcacagctgccccgtgtctggtattcactatctgcctgcaatgcattagaaacctctaactcccagccaggtgcggtggctcacgcctgtaatcccagcactttgggagatcgaaacgggcagatcacctgaggtcaggagttccagaccagcctggccaacatggtgaaaccccgtctctactgaaaatacaaaaaagttagtcgggtgtggtggcatgtgcctgtagtcccagctacttgggaggctgaggcaggagaatggcgtggacctgggaggcggagcttgcagtgagccgagatcccgccactgcactccagcctgggcgacagagcgagacttcatctcaaaaaaacaaaacaacaacaacaaacaacaacaacaaaacaacttctaactcctatctcaaggatgggggaaaccgaggcccagagagcgtcaaatcgctgttcagagccaggaagcagcacagaagcctcagaagagggggcccagggtctgcctgaatggggccaggaggttgaggtgaggatgagagggggaggagcggggggaaccgagcaagccccgcccccatacctgccaggaatgtgaccagcaacgcagcccacagaaccttcatcttcctgcctgtgattggccagtctggggaaggagaaactgtcaatcaaccgccagtgaggactcctcccacccccagcccggccccaacccggcctcaccccaggttagccttccaagccttgttgcattatctgcaacagcctaatcccagcacatttaccaagccgcccccaacccattccctatttaactccctcctggtcttctcttatctccccatccccaggtcggcctccatagaaaattccatcttcctctcccggggttcaaattccatccccccaccccctccccaccgccggttccatctcagtcccagtctcgcattcctcattctcccttcacattctaagctccaacctcacagttaagcgccgtgttccatttatgagctaattcagtcctcattttaaagttctccaatcgacggctagctaccgtgtcgctgcccctggctccccagttatggagatctgaggacactggggacacccagtaggtgctcgataaatgatagtgacaactcgtggagtcctgctatggcttacatcccagtccagctgctctccccaccccaccttctagcgggtcgggtcgtctctgctgcccagcccttcccaggtccagtcccctgctgcttgcctcacccccgctcctcctctccccaagcccgaccccgagtagctctcctgagactacctggaggccaggggttcccagggtcccagctctttctagaggcccctgagctcatccccgtgcccccgactgcgcttctcaccggctcctggggaaggacgtccttcacctccgctggggctgagtaggactcaaggatcccagacttgtccaattatagggctccccctgtcccgccccctcccccagggatagggcgggctgggccagcccccagtcacgaggtgggctgttctccccctgccccaggcacagcagggcagagggaggaaggaggtggggcatagaggtcttttgaccaccccccacagtccccaggaagggaggacacctcgcccagtaatacagacaccctcctccattctgggggccaagcgtggaaggggaatgtggaggctgccgcccagagtcctcctttcctgaccctgtcctttcctgtgcctggatgaatgtaatctggagagggggctggggatctggactcctggatcccagaaagaaagtagggctagggggctggacagaagtgggatgggaggggctgggggcggtagctcacgcctgtaatcccagcactttgggaggccacagtgggcgaatcacttaaggtcaggagtttgagaccagcctggccaacatggtgaaaccccatctctactaaaaatacaaaagttagccaggcgtggtggcgggcgcctgtaatcctagctacttgggaggctgaggcaggagaatcgcttgaacccgggaggcggaggttacagtgagccgagatctcgccactgcactccagcctcagcaagagggagactgtctcaaaaaaagaaaaaaaagaaagtggggctaggcggctggacagaagtgggatgggaggggtgggaacagtatgatgcacctgctaaaagtcgaggctttgcaaatgggacctgggttttaatcacagcttcctctttggttgtgaccttgagcacaggggagccccctccccacatgtgaaatgagattccagcacctccccctggctgccacaggtattgtggtttccaggggcttgaagccgtgcttctgggttaaggttaggattctggagtcaaattgccagggcgtgaatcctggctctgccagttgccagctgtgtgaccttgggcaaatgacttgtcctctctgagcatcaagttcctttgctcatcagactgggaaagcagcggcacgggtatgtttggtgacaagctaacgtgtattgagcatggaggacagccctggcacacagcggtcctatgttagggctagcaatggacaggccacagtgaacgctcagacgctgtcactttcctaagccctgttataaatcccagatgtttcagaggagaaacccgtggttcagcagcaagacgaatggcaaaaccacacagtgagaactgggagagactgggactcattcctggctcctggagcgggtgggatcagaagattctgcgggtcaggggaggctgaactcctggttcgagaaggaacccccagtg

SEQ ID NO: 1559986 - DNA, 4001 bp, Homo sapiens
caggtcgggggaggtgagggctgggctgaggacaggactgcttcttcgtgtgtggtctggggtgggggactggagaagcaggggccagacgtgaggcggggcaacaggatggagagcatgctggtcccatctctccctgctgaaaacccttccgtagcccctgcagagtacagtgatctcctaccactgtctagacaatcacaactcccatctcatcagccttcctgcttccagcctctcccctcctgccagcttttccgcaatagcctggatcgttttcagaaaacacaaatctggctctatttctccatagatcctgggccttcaatgactccctgttgtcttcaagacgaagtctgaattctctggtctgataatcgagacttccctgagctgatttctgtttacctctccagtcccatctcttcccattgcccccactctcagagctcttgaacttctaagagtccaaaaaaagcaccctcttctcatttccttctaggcctttgcaaaggctgttccctcagcctggaacactcgccccacctttccctgggtacattcatcctcactcccacccctcaggtcccaactcacatgtgccctcctccaggaagttctccctgacccttcaggctgcacctggcatctcctctggactctctccatcccctgaggttcccccatcccaggttccatgccttgaccagagcttctcccttcacagctctgatcactctgagatggcactggtggtgacaagttcatctctctcattggactatgaccggcctcccagaaggagggccccagactgagctccccagcatagagctgggcattgagttggtgttcagacatgattgttcctgattcttttctgggtccccagtgccagcccagtcgcgcgcagcagggactgggtaaaatctgatgaataaattaaccagctgccagacagattcactgggctgtagcgtctccctgctccatgtccctgcaacccccagtcaccctcagggtctcaccctcagggtctgtccccctccagcccataaggttccccaaggcaggatgggagctgactctctctgtgcctggagcgtggggcctgcacagaggcggtctcagtgaatgtctgctaagtgagggaatgaatggatgaatgagcgggagcagcatggtgggagagggaaatggtgggggagggggatgaggacaaggagatggagcagacccgaggatcaagggaggtacagtgctggcctgttggggtggagtaaggaaggagtggctggagagacgaggcaaaggctcagactgatgcggggcgggggggattgagaggaactgggatagggtgaaaatgagggagaaggagaagaaaagggtcaggctggggatggagcgggtggggggtggggctcgggaatgagaaaggggctgtggggaggaggagggggctccgccggggagggctgagggctggcagaaggatgccgaggaaggtgctgggatgggagctggggaaggacccaggagcctcaggaggcccctgcaggggccacttgggtggcgcgggtcccttcctggactagccccgcctcctcccagcccaggccctaggtccctgtcaccccatccagggcgtggaagacggggatgcgcgcttagggggcggggtcgaggtacgggctgggacccgggatggggccgcaggacgggagggaccacggctgaagcacaggccgcgggatcgggcggggccgggggcggggcgcgcggggcggggctgcgcacggacagactgacatccggacggacaggctgacggccgcgtgggacccttaccaccatggtcgcgtagcctcctcaggccccggccgcgctcgacccctcgctcgccgttctcgtcgccgctgccgccgccatggcgacacaaaggggagggcgcgagccgcgcgcgggcggctgcagaccccgcccctaacggctgcccgtggctccggcgcgcgccccacgggggcggggggcagcgggaacgcggcgctgcttctcattggctccgcccttggccttaggccgatgccccgcccacccggaggcttctcattggtttcaccttgggctccgccccggctctgtgtcctcggtcccgcccctcgaagtttgacagcgccacgcccatgactgcttttcattggctgtcatcgccctcctgagacaagcccccaggttctttatgctttgcttccgacacttccaacaccaagcaatggaccctacctttcgtccactcccagtgtccattcttctgacttttttatttttatttctttaagagacagggtctcactctgtcgcccaggctggagcgcagtcctgcaatcgtggcttactgcagcctcaacctcctgggctcaagcgatacctcccatgtagctgggactacaggcgtgcgctaccacgcctggctaattttttttagacatgggggtctcactatgttacccaggatggtcttgatctctggggctcaagagatactccctcctcagcctcctttcaaagcgctgggatgacaggcgtgagccaccacgccagccagcccctgatagtcttaattggattctcccacggcctcagagcagtgcccagttccttaagcagcttttcaaagtcccagtcccaagtctcaccttttcagtcctgatcccgaccccgctcacataatgccgaggacgctccgcccatggacgtttctcgttgcctcatataccttgcctaggacgtaacccgaggctttctgcgatttggcctcccctgcccactggacattttcttgtttccccttctactgcttattacgggccaatctccagccttgattttttttttctaggaaaatgcttagggggaaatgccagatcatgcttatgccccccataaagccattcccaatggagcctgctaatactgagcatgcccagataacactgtaataacgcccttcacaggagggtctctccttagtcatgccctcaacaaattctcatctcagagggtcttggtctgttcattcattcattcattcattcattcactcaaactctaatcaatttgtacatacatcaacaaccaaaccaggagaaaatataccctgcccacattggagctcaaaagctactgggagaagacaatgaacaaaattaacattaaacaaaatatagaatattaggccaggcgtggtggctcacgcctgtaatcccaacactttgggaggccgaggcgggcagatcacttgaggtcaggagttcgacaccagcatggccagcatggagaaaccccgtctctactaaaaatacaaaaattagccaggtgtggcggcgggcgtgcctgtaatcccagctacctgggaggctgaggcaagacaatgggttgaacccaggtggcagagtttgctgtgagccgagatcgcgccactgcactccagcttaggtgttgaagtgagactctgtctcaaaaaaaaaaaaaaaaaaaaaaaaaaaaagctggggacagtggctcacgcctgtaaccccagcactttgggaggccgaggcgggaggatcacaaggtcaggagttcgagaccagcctggccaatatgctgaaaccccgtctctactaaaaatacaaatattaaaattagccaggtgtggtggcgtgtgcctgtaatcccagctactcaggagcctgagacaggagaattgcttgaacccaggaggcggaggttgcagtcagccgagattttgccactgcactccagcctgggagacagagcaagactctgtctgaaaaaaaaaaaaaatattagaaggtgattcattctatggagaataattaagcaagggctggtgaaagggagtgctgagggagaggtgaatgtgcagttacttatgtactaaatttgctgacctcactctcatcacagggatttcccacacgatattccttctgtct

SEQ ID NO: 1559987 - DNA, 4001 bp, Homo sapiens
tgaattgtaaaggcagagacagccgtggggctgaaatgttggcgtctggaaagagttcacaggaagcctgacattcccctctattggcctcagggaaagctcatacattttaccatctatcacatacttgtcatcatttgtacaaagagctcgaatctcattggccaactctcgggcaaggccgtctttgcccaatataaccaagttgattctatcaatgttagggtcagagagtgaatttttctgattccggtcagacggccggataaaccgagaactaatcaagtgctcaatcttagcgtccacacaagctgggcagctggggcatgtctcctttgttgggtggtacacaaaatgaatgtgtttcagaataagggcatcacgctctgcttggagcttttgtaatgctttaaatcgctgttcctctcccagaacatcctgaataacacccatcttctccttgctgggcttagcatccagctccagttcataaaacaattctgaatattccaaaagcaactcctgaaattcttcctttgctttatctataatttgcttttggtgtttgccataaatatccatgtatacagattcctccagccactggtagaaatcctcattcataataaaactacgggcctcttcccaaggctttccgggagttatgaaaggagaagtctccaggttttctttaaacgcccttcgcatctcaactcttttcctttcgttcctcagcttctctaagtgggcctcgtatagctgctctgcagggacggtatccattaaatcaaagggaatccgttcgttttccatgttgtcaatgtgactggtggcatcccatggggtctcttcaagcacaacaaaccacttcaagaattctggcttggtttctaagagctttttggcttttatgcagcttaggtggtctatttcatctagattaggtataagagcttcaaaagctaatggcagggctgccaggtacagctttctcctacgctcgatatgctcatgcttgaggcggtggatgtgctgtagaaacagcttcttggctttctgagtcccttccaggtagacatagtcctggtattctggagaggcctgcatctttcggctgacactcagccagttctcattgtggtttttcacaatgcgactcaccagccactcatacttgtcttttgctgtagctatctgctgactctgctgcttgagagcttcaaaataaggaatgatttttgtctttccccgacttttatcaatgagttgcactaaggtgctgaaagccaagtccacgtttacattggatctcgctgaggtctccacaacctggaggttctttttgcttaaggcaaaagtatgtgcatctctaatgtaccgctcaacaccttcgtcacacttagtcaggaccaccactatgggcttttttgtttttgcaagctgattgtagagattggagacaaacttgagctggtcatcaaagttcctattcatgcccctgctaacatcaataccaagaagaaaaccatcaaccagcagctttccgtctggcatttgtttctgctcaaagtcctgctccagccccagctggtcagtgcaaaagtacatgagtttttcagctgatgcaagcttggtcgcagcagctctcttgatatagggctgcagggccgtgcttcgatgaggttgaaaagtctgatcatcaataaattcagtctgctccacaatgtgcatcttacattccacacaatcctccagggagcggctaacttctccccagtagagaaagtggtcattattgaccactcgccctccaaagtcactggtgctgaggacggaggtatggtccaagtgaaactcgtcagcactcgggcgcacgaagcggttgcacaaacaagactttccaatcccacactggcccttttccttctcggtcccagataatcccaccacactgatgttgtaggtgggaattcggacatcttgctttcttgccatcatcatcgtcgacacatcctgccacgatcagccacttctgagatcagattagtgtttccaatggaccagacagcttcctacattattagtgggggtgggctggacatgcagcaaaaatgccaggtcccatagtgttgtataccagtatggtcactgttcaccacctctcatcgccaaatagccaacatttcttcctagatgggggaaaaaaaaagaaaacccatcagcatcataattttagaaccaaattttaatcaattaactacagtaaaaattaattttttattcaacaaatatttagtaaacatctcatgtgtcaggccttgtgctgggtgaagatacaagagcaagtaagactcacatctatgtgtccccagagaggtacaatctagtccagtggaggaaaacataagtaaacagtgtgctaagtgctaaaacaagggtgtgagggctccctggaaaaagggctgattccagggttagggcaggatagggacaaaatgagcctggaacatctttttatgcaagaaaaaaaacgatggagcatctcacaaggacacagaagccagcctgaaggggctcccactggccaactctgggacaatttgagcgccacaataattaagtatggtaatgaattataaacccactgcaaaaacaggaacctgggccgggcgtggtagcttacgcctgtaatcccagaactttgggaggccatggtgggcggatcacctgaggtcaggagttcaagaccagtctggccaacatggtgaaaccccgtctgtactaaaaatacaaaaattagctgggtgtggtgacatgtgcctgtaatcccagctacttgggaggctgaggcaggagaatcatttgaacctgggaggcagtggttgtggtgagctgagatctcatcactgcactccagcctgggcaacagagtaagactatctcaaaacagcaacaacaacaaaacatggaagcaacccaaagtatccacctactcatgaatggataagcaaaatgtgatatatacatacaatataatattattcaacctttatttttattttattttttgagacagagtcctgctctgtagcccaggctggagtgcagtggtgcgatcttggctcactgcaacttccgtctcctgggttcaagtgattctccttcctcagcctcccgagtagctgggattacaggcatgcgccaccgtgcccagctaacttttgtatttttagtagagacgaggtttcaccatgttgcccgggctggtttcaaactcctaggctcaggcgatctgcctgccttggcctcttaaagttctgggattacaggcgtaagcgatcacgcctggcctattcagcctttaaagggaaggaaattctgacaacatggctgaatcttgattgtgctaagtgaaataagccagtcacaaaaagacaaatactatatgattccacttatatgcagtacttaagagtagtcaaactcatagagacagaaagtagaacagtggttgtcaggggctggggaaagtgggaatgaaaagttactgcttaatgggtacagagtttcagttttacaagatggaaagtgttacagaaatagttgcataacatgaaagtatttaatatcgctgaactgtatagttaaaaatgattaaaatggcaagttttatgttttgtgtattttaacacagtaaaaaaaagattgaaaaaaaaaagaaatgcaggaaggataaatcctcccaaataaaatattttatcaatgtaaatctataaaatctatcatgtgaaaatgtctccacttttaggaaactgacaccttagtattttgaggggaagggccataatgtacgtaactgatcccactggaaaaattatgtatacagaaagagtaagaacacaaatggggtggtaaattgttaacaacacatgaatctgaaaaaaaaaaatagatgaatctgggtaaagcatataggatattcctttgtgctatttttacaa

SEQ ID NO: 1559988 - DNA, 4001 bp, Homo sapiens
acaaaggctggagaattataggtgaagctgtcagagaatagatggatctataggcaactgacaaggcctggggggtccagcagagggaacactgcgtgcatggggcgctggggggttagggctggtttagaaggtccatgggttggggggccacatgggtgttgagttctatggaggtctcagggtctataatgtgttgagcaggtgactcagggtctccaagaacttctggagccttaaagaacctaaaagagtcgttggaatgtgtaactccccagattctatttgacacacagtgggtctaaaggatccagggatcatacaggatcatgattctatagggacagctgccagtctgtggaacctctggagacttaaaagggactcagaattccataggggtgcgtggtgggtcccgagacccatggtctatagagccccggattctaggggatgccactggtctatgaggaccccacgtctataagaagccagttctccatggggggctggcaggaacctggagggtctgtaagactttatacggaatgaggcgggtctacacgagacccaaatcttacatggacgtggcgggtcttacgcgggccctaaatcctacgggggacgtggcagtgtgcacggccagggatgccggggaggacgtgcagagtcagggtctgacacccgctggggaccgcgtccctcacctgctccaggtggaaagagaagccatcgccgccaccggaaccgaagcctccgcgctcgggctccgcactctccccacccctgccgccgcgtcgctctagccgccctgagtccacctttgcgcccagctccactcctcctgccagccgctctagcccggctcctgccgggctccggccccgacgactctactcctcccgccggccgctctagcgctgtactgcgccacgcaggccagatagggccgctctggcctgtcttggagggccagcgtttccgtatctcgactgcccccgtcactccccgggccccgccccgcgcccggaggtgcagatgggtccaactcctcccgagttcgatcggagatctcctagtcaccccagcgctgagcactcggacggcggactggggctccccgtcctattagtctccccacttaggggacccgctgaatttccaatcctcgtacatcaatcccctccgtctcccacccccagccccttcctttggaaccggaaaagcaatagtcttgagttccagcacaactttccctctgacatgcagtgtaatctgcaaaaagtaatgacttctctgtagacctcagtcttcccatccgtacaatgggagaaggcctccagctctctccctacacctgtctctcacggtataattaatgacctagaaaagagctttccgaaaactctttcaaatgcactctgcaactttcagcttcacagcgaccctcgtcgttgttgttattgttgtttttcatttttaggtggccctaaagcatgcgggggttggaggatggcgctttgcggaaagcacgtgcgagttcaaatcccaactccacactttctcacgatgtgcgttccctgggacgagtcggtttggctccccgggcctcggtttccccacccgtacaatggtagtgatcgtccgttctccactgagcaggtgggaggccttggccccggcctcgcaccgttcgtccccacctatggggcactcgtcaagtgtgagttctcccctctttgctccctttgacagatgggaaaactgaggcccaaggaggggcggccgctggttccgtggggtccgaagggggcccctccgctgccggcagcgccccagcccctccctcctcctccccacttcccccaacagccgaggggaggaggccgggcggggccggggaccgagtacctggtgtccgcgcggaggtgaccggcggggcgcccgaggtcgggctcggcgatcccgggccctgggtcccggctcccgcttcctggctctggcggggcaggaagtcggggcgtttttccggaggcccccgccccgccgcccctccccgcttcctgcccgcgccccgcgcccgcccggcacctccgcttccttccccttctcgccgcttgcccgcccctcctttccccgctgcgcccgggtccctgcgggcaccggcccccgccccggccgcgcccgagctctccccggctttgtccatcggtccgtccgccgggcgcgggctccgcgggactcgcatctcccggctggggtcacctccccggaggtgctggggggcaagccctgctccccgtgcgccctagaccgagccacgacctccccggctttccgcgtctgtggttctcatggtcttgcgcccttccttcgcctctgtgggtgtgctcccgcctgcgtctgcatccccttctctgtccctctgtctttctctactggggtctttccctccttggcctccacctctcctctctgtccctccatcactttctccccgaaagcccttctctaccctctccagctctctctgtatctttctgcatctccgtctcagtctctgtcatttccccagctgttgctgtgcctgggcctcttcgtgcccattttcggttgccccttctcccttctgtctcttcctttccttctcgctctctctctgtccctttctctccacgtccctgtctctctcccggattcccagggtctcatcatctcttccttcccttgctcgtccccttcatgatccctgggtctcagcctctctcctctccctttctcaggaaatccgtgtctctgtgcctctctgtcattgccccgggatctccctgctatccccaggttaggaccacagaccctccaaaatgccccttctgtaagtcaacgcatcgggaaaaggctgcagtctgaattctgtactagccccaatccacaagatagtccctgtgtttccaaggcttaaatacgcataaagtggctcatgcctgtaatcccagcactttgggaggccgaagcatggtggatcacttgaggtcaggagttcgagaccagcccggccaacatggcgaaaccctgtctctactaaaacaaaaattagctgggtgtggtagcacatgcctgtcatcccagctactcgggagcctgaggtacaagaatcgcttgaggtggaggttgaagtgggctgagattgcgccactgcactccagcctgggcgacagagtcagactctgcctcaaaaaaaaaaaaaaaaaaaaaaaaagcggccgggcgtggtggcaggcgcctgtaatcccagcactttgggaggccaaggtaggtggatcacctgaggtcagaggttcaagaccagtctggccaacatggtgaaaccccgcctctactaaaaatacaaaaattagctgggcatggtggcaggcgcctgtaatcccagctacttgggaggctgaggcaggagaatcgcttgaacccaggaggcagaggttgcagtgagcactccaacctgggcaacagagtgagactctgtctcaaaaaaaaaaaaaaaaaaaaaagtgtaagtaatttggtagccacagccatcttgatcttgtccccttcttgcttaaggatatgaccctagggtgaggccctgcaaagagggccaaaccagtccttcagttggtctggggaccttcccaagagacatcttgttctcccaggagggcagcccagactggctacctggtcccaggtgtggggagtgggcagggagtggcttgggctgggactcctgggtctgagggacatgtgggagaggcggttcccgtaagatccacgactcctgccaaggtctgcagttgggaagaatttattatcactaagtggccctgacagatcagggaggagggggtgacactaacgaggctgctacaatcagctcccctagaggcagcgattaagggctcattacccgctggggtgaggggagcctgggaaaggcagcggggcggggggattaggttagg

SEQ ID NO: 1559989 - DNA, 4001 bp, Homo sapiens
aaaaggcaaaggaggggatactcattatctttgcaagtgcttggtgccaggtctggaactgtgcacttgccaagttcttatctccttattccttatcacaataataatgaaatgacagctgacacaaaagagacacttagtatgtgccaggcatggcatcgctggttgacaggtaataactcatttaatcctctcggtgactccaagagatcattattattctcacctccatttaacaaagaaggaaactgaggcacagctcataagaggcagaaccaggactcagacctgggcagttgggctacagagtttacgcatttaaaataaactgcatttggtggacacagtggctcacacctgtaatcccagcactttgggagaccaaggcaggtggatcacttgagctcaggagttcgagaccagcctggctaacatggtgaaacccccatctctacaaaagatagccaggtgtggtggttcatgcctgtagtcatagctacttgggaggctaagatgagaggatcgcctgagcccaggaggcagaggttgcagtgagccaaaattgtgccactgccctccagcctgggcgacagagtgagaccttgtcttaaaataaaataggctaggcacggtggctctcgcctgtaatcccagcactttgggagaccaaggcgggcggatcacgaagtcaagagatcgacaccatcctggccaacatagtgaaaccctgtctctactaaaaataccaaaattagctgggcgtggtggcacgagcctgtagtcccagctactcgggaggctgaggcaggagaatcgcttgaatccgggaggcggaggttgcagtgagctgagatcgcgccactgcactccagcctggtaacagaagtgagacttcgtctcaaaaataaataaataaataaataaaacaaaataaaacagagagcattgcttcagagcatggggagcccccaccctacccttcagaaactaaaatctgaaccaaagctctgagacacatcatgtcttcttatggatgcctggaaaagtcacgggtatgtggtcactatggcctaggcaggagtgcaagttggatacggctgctccacagaggcttgggggttggagatgatggaggcgaggagtgtcgcctgtttaggaggaggggtttgggggagtcccacaaaggctggagaattataggtgaagctgtcagagaatagatggatctataggcaactgacaaggcctggggggtccagcagagggaacactgcgtgcatggggcgctggggggttagggctggtttagaaggtccatgggttggggggccacatgggtgttgagttctatggaggtctcagggtctataatgtgttgagcaggtgactcagggtctccaagaacttctggagccttaaagaacctaaaagagtcgttggaatgtgtaactccccagattctatttgacacacagtgggtctaaaggatccagggatcatacaggatcatgattctatagggacagctgccagtctgtggaacctctggagacttaaaagggactcagaattccataggggtgcgtggtgggtcccgagacccatggtctatagagccccggattctaggggatgccactggtctatgaggaccccacgtctataagaagccagttctccatggggggctggcaggaacctggagggtctgtaagactttatacggaatgaggcgggtctacacgagacccaaatcttacatggacgtggcgggtcttacgcgggccctaaatcctacgggggacgtggcagtgtgcacggccagggatgccggggaggacgtgcagagtcagggtctgacacccgctggggaccgcgtccctcacctgctccaggtggaaagagaagccatcgccgccaccggaaccgaagcctccgcgctcgggctccgcactctccccacccctgccgccgcgtcgctctagccgccctgagtccacctttgcgcccagctccactcctcctgccagccgctctagcccggctcctgccgggctccggccccgacgactctactcctcccgccggccgctctagcgctgtactgcgccacgcaggccagatagggccgctctggcctgtcttggagggccagcgtttccgtatctcgactgcccccgtcactccccgggccccgccccgcgcccggaggtgcagatgggtccaactcctcccgagttcgatcggagatctcctagtcaccccagcgctgagcactcggacggcggactggggctccccgtcctattagtctccccacttaggggacccgctgaatttccaatcctcgtacatcaatcccctccgtctcccacccccagccccttcctttggaaccggaaaagcaatagtcttgagttccagcacaactttccctctgacatgcagtgtaatctgcaaaaagtaatgacttctctgtagacctcagtcttcccatccgtacaatgggagaaggcctccagctctctccctacacctgtctctcacggtataattaatgacctagaaaagagctttccgaaaactctttcaaatgcactctgcaactttcagcttcacagcgaccctcgtcgttgttgttattgttgtttttcatttttaggtggccctaaagcatgcgggggttggaggatggcgctttgcggaaagcacgtgcgagttcaaatcccaactccacactttctcacgatgtgcgttccctgggacgagtcggtttggctccccgggcctcggtttccccacccgtacaatggtagtgatcgtccgttctccactgagcaggtgggaggccttggccccggcctcgcaccgttcgtccccacctatggggcactcgtcaagtgtgagttctcccctctttgctccctttgacagatgggaaaactgaggcccaaggaggggcggccgctggttccgtggggtccgaagggggcccctccgctgccggcagcgccccagcccctccctcctcctccccacttcccccaacagccgaggggaggaggccgggcggggccggggaccgagtacctggtgtccgcgcggaggtgaccggcggggcgcccgaggtcgggctcggcgatcccgggccctgggtcccggctcccgcttcctggctctggcggggcaggaagtcggggcgtttttccggaggcccccgccccgccgcccctccccgcttcctgcccgcgccccgcgcccgcccggcacctccgcttccttccccttctcgccgcttgcccgcccctcctttccccgctgcgcccgggtccctgcgggcaccggcccccgccccggccgcgcccgagctctccccggctttgtccatcggtccgtccgccgggcgcgggctccgcgggactcgcatctcccggctggggtcacctccccggaggtgctggggggcaagccctgctccccgtgcgccctagaccgagccacgacctccccggctttccgcgtctgtggttctcatggtcttgcgcccttccttcgcctctgtgggtgtgctcccgcctgcgtctgcatccccttctctgtccctctgtctttctctactggggtctttccctccttggcctccacctctcctctctgtccctccatcactttctccccgaaagcccttctctaccctctccagctctctctgtatctttctgcatctccgtctcagtctctgtcatttccccagctgttgctgtgcctgggcctcttcgtgcccattttcggttgccccttctcccttctgtctcttcctttccttctcgctctctctctgtccctttctctccacgtccctgtctctctcccggattcccagggtctcatcatctcttccttcccttgctcgtccccttcatgatccctgggtctcagcctctctcctctccctttctcaggaaatccgtgtctctgtgcctctctgtcattgccccggg

SEQ ID NO: 1559990 - DNA, 4001 bp, Homo sapiens
gcagaatcggcttcatccatctctcctgtgattggtctgagtgcaaacaataaaaacaattgttttagaaaagtgaattaaacacacacgacctcatgcaacaaaggcacatcggtgactccatccgattcgatactctctgagaactctccacattttcacagaagcctcaactttgtctacagatcatttttaaaaattgggagatttgccaggtgcagtgtctcacgcctgtaatcccagactttgggaggccaaagccaggaggatcacctgaggtcaggagttcgagaccagctcgcccaacatggcaaaatcccgtctctgctaaaaatacaaaaattagccgggtgtggtggcaggtgcctgtaatcccagctacttgggaggctgaggtaggggaatcacttgaatctgggaggtggaggttgcagtgagctgagattgtgccactgaactccagcctgggcgacagagactctgtctaaagaaaaaaaaaaaaaagtggtggggggcggggggtggggaagattatctgtcaatgtcacatcaggatttcttccatagtaacttcctttaatgtttagttacgttctaacggggtgtggattgcagcttccttgacagaccactggagcccacttggggcccctgggatcctgtctaccaggagttaagtggaaatggtttcatggtcaaggtgggagggcagtccttactcagaggaaaatgataatttactccctttcccacgaactcatggaatagtcaccacaaacatatcagcttctagcatcactttctacccggacaccgctgcaggcattatcaagggaaccactttgaagtcctataaaacgaggtaaggcacagataatgggacgccgcctccacacacccagcaggactttgagcatcgccttgagtaagtcaggagcccggcctaaggagcgagtccaaggatccctcgagggcactaagcaaactggctccaccaggggccgaatacaccccgggacacatcgtttttgcaaaaaaggcgtggatcctggaagcaagcgttaatgggaatttctctgcttagcacgggggctgccgtgtggattcacacagatctaagtcggggtctccctccgaagaggctgtcaacagctccccggggaatgccaccacccacccgagggcacagaggggaccctggcttacccgagttgcgtcccagggccagccgggctcggtgttggctggggaccccctttctgagagaccgtcataccgacattcctggacagggccgggctgccatcggacaggagggtgccccgggggtgctccttgagcgaggctgtgacagaggcaaggacagagttggtgctgagaaagtgggtcgggtagcggaggtccccggcgcggaagccccgctccgactgcggccgcagcacagacaggatcttggaggtcagcagctcgttatccaagaagacgttctcgctccatttcctggggaaagagccgtaaaaagacagctcggggcggccggggagcgcgctgtgcctgtccccgcttttggagtgcgcattccccatgttcgcgcccggggctccgggacccggcgcggcgccaggctgggctgcgccgtttttatgcctcggtgggatccttctagaaaacagagctgcgtcttcccttgctgtattggctgaagcagcgggtctggagggcaggatattggtccccactgtgaccatttactgtggaaattgcagtatttgctgctttgatagaataaaacagaaaaaaaaaacaacccctccaggctctcccttggtctttgcagggtgtaaaaagcaagtgagctgtttgagtttgctgtaaatagtctaagatcatgaaacggtgagcctggcgtgcttcatgccaaaacctcgcacatgatgataattaatctagatcagatgttagggtgactctaagacccagagatggcagggcatggtgtttagccgcccctggtcatcagcactcgaacagaattctagcatcgaagtggacgcgaggctccgattctgttccatatggtgattataaaccaacccaacatcaacaggggctgcaaaccgctgtctacacccatctgttcattaatttaagggttcagatcataggatacgtgtgcccgctgacaagctcacctactcatggaaagatgcaactttttaaattaattattattatttttagagacagtctcactctagctcaggctggagtgcagtggccgaccatagctcactgcagccttaaactcctaggttcaagcaatccttctgcctcagtctcctgagtagctgggactacaggtgtgctgtataatttaaaaatattttcttgtagaggttgggggggggtctcactatgttgctcaggctggtcttgaactcctgacttcaagcggtcctcctgctttgggcctcccaagatgcaacacttaataaagctcaactatggccgggtgcggtggctcacgcctgtaatctcagcactttgggaggccgaggtgggttgatcacaaggtcaggagttcaagaccagcctggccaggaaacccccgtctctacttaaaaaaaataaaaaatacaaaatacaaaaattagaagggcgtggtggtggatgcctgtaatctcagctactcgggaggctgaggcacggaatcgcttgaacccgggagtcggaggttgcagtgagcggagattgcgccactgcactccagcctgggcgacagagtgagactccgcctaaaaaataaacaaataataaataaagctcaaccatcattcattaggttcagttttcccctcctatttgacaagcatagttgagatgggctacttggctagtttactcttacattttataaaattgtatcttaaagctttgcccaggtaaggacaaagagcagcattaaaaagaaatctggcggccggacacggtggctcatgcctgtaatcccagcactttgggaggccaaggtgggtggatcacctgagatggggagttcaagactagcctagccaacatggagaaaccccatctctactaaaaatacaaaattagccaggcatggtggcacatgcctgtaaaaccagctactagggaggctgaggcaggagaatcgtttgaaccccggaggtggaggttgtggtgagccgagaccgtgccactgcactccagcctgggcaacaagagtgaaactctgtctcaaaaataaaaaaaaaaaaaagaaatctgggccagacatggtggctcacgcctgtaatcctagcagtttgggaggtagaggtggaaggatcgcttgaggccaggagttcaaaaccagcctgggaaacatagcaagaccccgtctctacacaaaataaaaaaatagctgagcacaagtggcgcacgcctgtagtctcagctactcgggaggctgaggcagtaggattgcttgagcccaggagttcaaggctgcagtgagctatgattgtgccactgcactccagcctgggtgacagagcgggaccttctcgaaaagaagaggggaggagaagggaggagaggggaagggaggggaggggaggggagaagagaagagagaagagaggagagaagaggagaggggaagggaagggaggggaggggaggggaggggaggagagaggagaggagaggagcttagagaagagaaatagaaatctgatttgtcagatcaggtgcagtggctcatgcctgtaatcccagcactttggaaggccgacgcgggtggatcacctgaggtcaggattttgagaccagcctggccaacatgatgaaaccccatctctactaaaaatacaaaattagctgggcatggtggcgggcacctgtaatcccagctactcgggaggctgaggcaggagaatcgcttgaacccgggaggcagaggttgccgtgagctgacatcatgccaccgcactccagcc

SEQ ID NO: 1559991 - DNA, 4001 bp, Homo sapiens
ttttttttttttttttcgcaaaaaggcttgctgacctacagaaataggaaactactgataaagcgtaaaccctgactcggtccaaacaacatccgagatgctcaaattttccaaactctttataatttggaatgttaacctaaacatccaagcctgggagcattcgcatatgcaaagggtgtataacactgatggaaagtttgccatatgccagacacttctgtgatgcaccttacacagattacttcatagaaaccccaaccaacccttattcccattttaaagatgggaagacggaaacttagtgaagttacacggctaacaggtggtggaactgggaccagaacccagctcggatctgacctcaagcctgtgctcctgacacttctttttttttttttttagacagtcttgctctgtcgccaggctggagtgcagtggcccgatcgcggctcactgcaacttctgcctcccgagttcaagtgattcccctgcctcagcctccagagtagctggaactacaggcgcccgctaccatgcccggctaatttttgtattttagtagagatggggtttcaccatgttggccaggatggtctcgatctcctgacctcgtgatccacccaccttggcctcccaaagtgctgggattacaggcttgagccaccgcgcccagcctctcctgacacctcttacagctggaggattaatcattcactcagacacctgcaaaactcatcccttggccactgggctgtctatactgtcctgaactctctctctggtcaatgggaagagaatggggcccttcaaagctactggctggagcttcatctccgcgaaaacaaggcaaaggggaaaaggtgtgttggccgcttcgcttccgtggtaaaactttaagaatgttttttaatcctgtggtccaggctttaatctcaacagagcaagagataaggggcagatagccacagcaaaacactcaagtgctagtagaattaacgcaggaaaagaaaaccaaatactgcactttcccacttgtaagtggagctaaaccttgggtactcatggacaccaagaagacaacagaaactgggctctactagagcgggaagggaaggaggaggtcaagggttgaaactatctattgagtactatgctcagtacctgggtgacgagatcagtcacaccccaaacctcagcatcacgcaatatatccaggtaacaaacctgtacatgtaccccctcaatctcaaataaaagttgaaatttaaaaacgtaaaacaaaacgaaacatgtaaggaccaggggaaagcttctcgttcccgtccgcaatgaaagcaccaactgagttcttatacaagaaactaaaacccatggcacagatagttctcacggttttgcacccaaacgctccctgccagggagggctgtctgctccggggtgtgagggttctcccgggaggcctgaaatacgacggtgctgggtattgtggtgggttccattccatccctggtcctgccccgggcgctcctgaacgaggagcagaggctggggcccaagtgacccctcctctcctctcctggaggagagtaagccgtagcaccccaggactggctggggctcggacggagcgggcgggcatcgtctgcacctctgcaccctgcaatcgccgcctagagcctccatgcattgaaggagcagcctgcaccccagcacccgttcgcctgcctggagaagtcccccaggagccggcgggaggcccgaggcagccccgggggtcccgcgccccaggccaccccctgaagagaccgagggccccctcctgagccccgttttcctcgggaccgccccgccgccgtcctcacctcggcccgatcgcccgcaggccgctctccgccagctcctctgccactctcgcagccgcctccgatgcctccgtccggcccccccagatccacagtagctagcagctgggagccggaagcgggaagccgcgcgaggagagcagcgcatgcgcgatcccgcctcggaggcggggcagagggcgtgacccggaaggaggcgtgccctcgagggcggggcgctcccggggacctggggctgctgctccccgagccgtggtgagggggcgtcggctcggccttgagaggggcgcgggcaccgaagtgggagggtgctcgcggcgagggtgagggcgacttttgaggggcgggtcagcggggttggggggctttttgaaggagagcaatgcgagcctggctgtcagtagggccgggggctctgaggggacagctgggttgcggggatccagagggagagcagcagggttaggtgggcgttttgtggggttaacggaagcctgggtgattagcgcggctggggagggagtcctgaggaggacagcggtttggagaatctcaaggggggtacagcacagttagggggaccctgagggaggacagcggggttgggggaccccaagggaggacagcggggttggggggaccccgagggaggacagcggagttgggggaccccgagggaggatagcggggttaaggggaccccaagggaggacagtggagctgggggtgttttggaagaatcaacggatgcctggaggggttgtcagtgggctcctacgggctcgttaggattggaagtacctaaggggggcactcccagtggtggggagtcctagcggggagagtccaagaaatggagagggcagggtctgtcacctgagaaaaaagaagcagcatcagggagtggtggggggatcacttcatcccaggagttcaggaccaccagtctgggcaacatagcaagaccccatctctacaaaacattttttaaaatgagcagggcatggaggcgcctgcctgtggtcccaactcctccagaggctgaggtgggaggatgacttgagcctgggaggtccaggctgcggtgagctatgatcatgcctccagaggctgaggtgggaggatgacttgagcctgggaggtccaggctgcagtgagctataatcatgccactgcactccagcctggacaacagagcaagactctgtctcaaaataacaacaacaaaaaaagaggcagcatagacttcagaaaggtgggtctgggaaaaatgaatcatatacctctccagtggtctcagacaccccaacatagataccatcagatcccctaaacacaggcacccaggcaggtgccatcagatacccaaaacaggcttccaggtaacccccaaatatgtcagacactccacataggtccagcagatacccccaaacacatactagataaccccaatacagatgctgtcagataccctcaaacaggtgctcagagtctgaaacacataccataccctcccctatccacttccacacaggtgctatttggcagatgtggataggccagatgcttcccccagcaccagcaacctctcaattgccatcagacaccccagtcttgaggttgcctgtctaatccaagtcctgccacaggggaggcagttgaacagtaaccaggagtcgagcagaacagctctcaccaaggttggctggtcagccaggcctagaagatctccccatggccaggcaagacggctcatgcctgtaatcctaacactttgggagtctgaggagggaggatcacttgagtccaggagctttgagatcagcctgggaaacctcgcatgacccagtctctattttagaaaaaaagatttccccaaacccaatcacttcaaaacatgcacaatatgttgttgagagtccccagttcagaagctggagggttgcgtccccaggtggactagccttcagttcaagtccaaccttcatggtccagaggaagggagcatgttcagggaattggatgtcccagaaatgcaagacgtaattcaccaggcaccctactgcagctgaggtcagaaactctaacacgggagtttatgagggctcaatggttgggcagctgtgtagctg

SEQ ID NO: 1559992 - DNA, 4001 bp, Homo sapiens
cacccaggtcagtgttgcacagcagacacccccaagcctccccagtcaccggacaagagagtcctgtggcccctctgccctagacaccctttacccagacccctgagtctttcggccccatgggtgaaaaggcagtggggggcaggtgggtggcccctgggagaaagcgaggagggcatgttccaaaatagcctctgttccatctgttgtggggacagaggtcccaggtcacaaagacctcagggccatagcgctgggttgtgaccaggagagcctggcggtccggaggccaccagggcggcacccagccccccatccccaggctggaggtcaccccccacccacccaacccaagaaagtgctgagggggcatttctgactcagggtctggtcgggtctgtcgcccctcccccacctgggacaacttcaagacaaggccccccccacggaagagctccaagcaaagccccccctctttgggggcacagaaggaagaggccaaaggaagccactccccccaccagcccgctccgagccctgctgggtttaatgacccttccgggtcgccgggtgggggaggggagcaggacagacctccacgttggggccggtggagggggcaggtggggatcccagattcccccctaggtcagggctgggtgcccccccatcgccgccataaccctaaactagctacgcccacccccttcagacccctccccccaagagccctttgtcctcgacccccacccccattttatgacagccccaagggagaggctgggacggggcgctgggtggtcgttggaccaggcaggggtggggggcggagggatcctgggccacaccctcctccccccaggcctccggagagaggtcacccgctcggcgcgggccttgcaaaacatggttatttaaagagttgtgcaaggccccgggcccgcgggtggcgaaaggggcccctcactccacgaagggaagaggagggggaggggcggggcagaaagctggggagggggctaagaaagtcctgggttgggggggcctggaggaagtgagaaaaaaactcaagaaggagaagaaataagaagacagaaaccctggtccggatttcaaaggcttcttggaaagcggccgatttgcatgggggggggaacccctccagcccgagcgcctaaaaacggaagataattgaacccgccgcccggggccggcgccgagcgttggagttgacaaacgcgcgctcccagcgcttcctgcgcccgcttttgtgtctggggggccctgaaacgggtcagggggctcttcctgggtatccccgccgaggaaccgggcgcccgggcccaacccaccccggcgcccgggggccgcggtgtctcccccgggggcccctctctgcgctggggcggacactttataaataaaccagcccggctggggaggctcgccgggaactaccctccctcctctctgggctcccgaataaatccctgatttcggggagaaagaataaaaatgaaataaaatatcggggtgcagccccccgcgcgcgcgcagagaccatttccttccgctggggaggggggggcgcgcactcgcgacccccgatcgcccctgctcgcccctgagcgattgatccagtggggagtgaagtctccaagcggggtgcagagaaaactccccgaaccccagcccgccagggccgccttcccagtccgggacccccaccaacatctccgcccaactttggggacccccttctttggcttccaggacgcactgcgcccaccccggcaccggaacccgcgctgggaacggccagcgcgctccccagccttaccgcgcagggcggctcgtagtggggcgcgcgccccgcgcctggggtcggcctgcccgggcccgcctggcttccagccgccggtgcgcgccgctggctcccggcccccgacccacggggctgtgccgcgcgccgactcaccgagccgccagccgcgtccgcgtctacacccctccgcccgattggtaagaggcgccccgcgcgcggccggcccccgccccgcccctcccccacccccagacaaatcaccaggggacgagtcgctctcggatgcaaatacctggccggtgattcagcgccgcggcccgggcgcgggagggcctcgccagggctccccacttttccccgcacgccccctcgcccccctcccgcggtctgacgacgcgcaaccagcccgggggcgctggggagccgggcagagtggacggaaattttcaggtcgcggcccctttaaaggataataaataataaacgggaaggggaacagcgccgcgggaggccccgcccccggcctagggacggtgggcaaagtgcgcgacgcggccccaagcgcagagggtgccgggggcaggggctggggcgggagcgccccgggggaagaagaggggactgactggggctccgcctgggcgggctggccggaggcatcggagccagatccgggaccaagtctcttcccttcttacggagcacctacgctgggcctcgtggactcggagtttcaccttcgccccttagacggagagaccctgagagagtgacttcactctccggagccgccgtttccaagtctgagaaatgggcttgaaagacccggtgcagagctgggcgggcggcgtcggagggagggaaccagggtcccgccggcctccctctggggagggacgggctgcagacgggggctcggcgcgggcgtggggaggtgcgcgctgggacccggagcccctttgtgaaaccaggacgaccctgcccggcccggctgtcaccagcgtcgggagctcggctgcccaccacccccccgtgaaggtggtgatgacttacacggtctgagcggtcgcttgcccaaccacgtgccccgcgcctccctccagggaggtccctgcacgtctccagccctcactcctctctgtagttggcaaccttcttgtcgccactgcgcagagcaggaaactgaggcaccgagcggggtgcaaggaaggcggtcgggagggggacgcgtgctctgcagggagctgtgtgcgcgggaagcgaccccagggggctaagcgcagaggcccaggctccagcccggacgtgagccccaggggagcctggagggcgggcaggggccaccccgggggaccctcacttgtggagggtctctggcgggctcgggtccccggtcctgagtgttgggggcggggttgtagtcgtctccctcccctttccctagactagcacacggcattgcaactttctctctgtccttccacctagttgcacctcctccctccacaaaactgcaaccggggccggcgcggtggctcacgcctgtcatcttaacaccttgggaggcggaggtgggcggatcatcagaggtcaggagttcgagaccagcctggccaacaaggtgaaaccccatctgtactaaaaatacagaaatcagccgggcatggtggcgcgcgcctgtagtcccagctacttgggaggctgaggtaggagaatcgcttgaatccgggaggtggaagtcgcagtgagccgagatcgcgccactgcactccagcctgggtgacacagtgagactccacctcaaaaacaaaacaaaacaaaaaactgccggcaggagagctgcccccgacaacaaggcctgaatccagccttccagccccagggccacgtgtaacctaatggcggcaggtgtctgagaggcctccaccataaggctatattaaacaccaaacccagctgccacccctatctccgatggagaggcctgagacacctgccccaggttgggggtgctttggagagacgctccctgcagcgggataaaggggtgtgggagtacccccttctcgggccaggacccagctcaggtctgaaggtgcaggaagtccctcccacctacgatggagcacctggaggccagcagacccgaaaggcacctggagggcaggtgcatggg

SEQ ID NO: 1559993 - DNA, 4001 bp, Homo sapiens
cccctgacctgagtcctccaaggtcccctagatctggtacagggctgagttggaggaggaaagtacagatttggaacacataagatggtgcctggagatggccaagtaagaattacctggagaacagcctaggctaaaagggggaagcagcattaccagtccctattatccatcagggcatgctgagggtaaaacagaagatgagtaaggcccctaactggcagccagtttccttctctcagccaggaatctgctcatcaagaaaactgtgctgtccaggtgcggtggctcaggcctataatcccagcgctttgggagtctgaggcgggtagatcacttgaggtcaggagtttgagaacagcctggccaacatagcaaaatcctgtctctactgaaaatacaaaaaattagccagggccgggcacggtggctcacgcctgtaatcccagcactttgggaggccgaagcgggcggatcatgaggtcaggagatcaagaccatcctggctaacacggtgaaaccccgtctctactaaaaaaatacaaaaaaactagccgggcgtggtggcgggtgcctgtatttccagctactcgggaggctgaggcaggagaatggcctgaacccaggagacggagcttgcagtgagctgagattgcgccactgcactccagcctgggtgacagaacgagactccgtctcaaaaaaaaaaaaaaaggccaggcaagatagtgcacaccggtaatcccagctactcaggaggctgaggcaggagatcgcttgaactccttttgactccgtttcaaaaaaaaaaaaaatacaaaatttagccaggtgcggtgttgcgcacctgtagtcccagctactcgggaggctgaggcaggggaagcccttgaacccgggaggtggaggttgcagtgagtcaagatcatgccactacactctagcctgggcgacagagaaagactccgtctcaaaagaaaattaaacgtgtgccatgacatgctggggactctaaaagactccatccacatgtccctctaccagccacacccactctggttcaaacaccagcctcccctaagggcggcgtcacctgccactcccagagcctagactccacctcactcacgtgctcaaagcccggtagtggcttcccaaccctctcagaacaaaacccagcctccttatccgcaccttctctatctaagccttccaagttcctcttccccgcctttctcatccttcccagcactcaagagacagccttcaaaaccacttctagataaagagcagccctgctttcccgtcccatcactctgttattatttgcacaccattacctgtatctagagcaacatcgttcactcatttatttgtaccctgtagcctccttgtccccactgcctaggacggggcccgacacgcagcaggcactcagtgcacaggtgctgaatgaataaataaaatgaatgaaaataaagcgaatgccagggaagccgaggattttgtccccaggcggcttctgtaaaattctttcattttttttttccccccaaaccacgtacccgagggtcgcgccagcccgaccctgcggcacccccactccccactccgcgcgggacaggcctcggcagccgcagcgtctcacccggtcttcgcggccacgtggggaaaggtggggcgcgcggttgtcacccagggagccgcctctagccccttccggccgccgtacgcgcgcaggcgctgtggcgcccctaggcttggcctcccagagactcgcggacgctcacgataaccaaggacgaccgcgaaccaaggtaaagccaacgaggccacctcgtgcgcgacggaggcgtctttgccgccccttccgggacgctcacggtggtcgccgcccccagcagggaaatgttttgcctccagagcgtccgcccagaagaagcggacagcgcgcttgcgcaagagagccgggccgcggcggcccgcgcctgcgcaccaggactcggcggcggcttgcgcctgcgcggcgcggcgctgcggagaccgttggttcatttgcatgtccccgcctcgcgcggcggcggcggcgggtgaggagcctgaggcggcggcgggggtggctccgcgcgcggtggtctcggggtgaggcccgggccctggcgtcgtcggtgggtggctcccggggtgggaagctcgggctcggccttgggggcccgccccgggctccgtgatggcgtcgcaggctcggccctctggctgcggcggcggccgcgtccccgccgggttggcctgggtggccggctgcggcctcccgggcccggcgcccccatttcctcgcccgcagaggccgggagacggcgggccgcgtccacaaaggctcattggttcagtcgttcattcattcctcccgaactcggagcggcccccgctcgggaggagataacggcgcccagcgctgcatcgggcccttgccctctttagaaccggttcagcccccacaccagcccctttactggctgcccattccataggtggggaaacggaagcacagaaagcttagaatcgtgtgatttgaacctgggtcacctgacccgggaaccctgccctttgccagcagagaacaagggggcgccccgggaaaagggctgaaggatgggactgggggaggcgggtgggggaggcggtgatcgtgatgggaaatggaccctacgggttgtctcttgaagttggaggttttgcgaagcgggatatcttgatggttaaggatgcagcccctggaccccaaaatgttgcttaatctttttactcattcttcggggctttggatgcacgaataccctttttgccaggttcaaatctgggctgtctggtcttgaatgggtcgttgagtctgtctccctttgcctcctcaccctaatgtcattcataacaggacccgcctcttcagtgggtggttgggagatcgcgcaaggacccagcgcagaatgaactgtcactagttcattgtcattggttgggggtcccgccactcactgtcaagaggcttcttttagaagggaaggaagttctcagagcctctgtgccctgctgagtctgtgaatgggaaaagagtgatcctgggccaggcgcagtggctcacggcctggaatcccagcactttgggaggccgaagcgggcgaatcacttgaggtcaggaattcaagaccagcctggccaacatggtgaaactccatctctacctaaaatataaaaattagtcggatgcggtggcggactcctgtaatcccagctactcaggaggctgaggcaggagaattgcttgagtccaggaggcggaggttgcagttagccgagatcatgccactgcactccagcctgggcaacagggagagtctcaaaaaaaggaagaaaaaaaaaaaaaagattgatctcttctttcctaaccacgatttgcgagggttgtggtcccacccttcctactctgttatgctcagttatgtgtgttggttgacaccttcctccagcagatagaactgctttcacagagctgcttttaatggattccaaggagatgggcccagagaaggtttgtcttgctccttttcagccagcacacacctgtgaacttcgtgagggcagagacccccttaaaagagtccagacaaggtgggcagattgcttgaggtcaggagttcgagaccagcctggccaacctagcaaaaccctgtctctacttaaaaaaaaaaaaaaaaaagataaataaaaagggtccagcttgcctctgaagtaccatgcgaggattatggattactgcctccttacttcgaggattaagtgaaatagagcaggttctgtgagcacgcattttttttttctttgagacagtctcgctctgtcccccagtctggagggcagtggcatgatctcggctcactgcaacctctgtctccctggttcaagcaattcccatgcctcagcctcctgagtatttgggattacag

SEQ ID NO: 1559994 - DNA, 4001 bp, Homo sapiens
gttttttgtttatttgtttttgtttttgtttttgagacggagtttcgctctgttgcccaggctggagtgtagtggtgccatctcagctcactgcaatctccgcctgccgggttcaagcaattctgcctcagcctcccgagttgctgggatttcaggcgcccaccagcacgcccagctaatttttgtatttttagtggagacaaagtttcaccatgttggccaggctggtctcgaactcctgacctcaggtgatctgcccgcctcagcctcccaaagtgctgggattacaggcgtgagccaccgcacccggctgcctctccagtgttttaaggaagtcgccgttgagtgtctgggccggccttcgggtgaaagcggtcccaagagttctccgagtcgccggggaagggaagtgcctcctgggccccttcctgccctgccccaccgcacttgcttctgtttccaccgctggggagggaagggtcccccgcacctgtggctcttgtgtgcccaaaacttctattgcccgcagcgctgggaaaaaagtggggctgtcgagaatctgagctgcctccctcccggcccattttacagacgggtatagtgaggtctggcttggcccggaggaatagccagggcggcccagagaggatgatgccctcccgcagccacacagtagggtgtgagggtatggactgcctccttctgtgacccctggctcgctggtgaccagctgcgtggcctaggggcgcttggggtgcgagaaggactgaggttcggggaagagtagggacctgcccaagacccagactcccaggagaatgtgaccccacttcatctcttcccctctgggatgcatttccacctcctcaccgggaaataccaccagacccccaaccctaccccagggaagaactcagcgctgcagaccctgtggggtaaactgaggtggggccctgggtaacacgagttgggggccttctctgagaatcagggactccaggcctgggatcaacggggacactggggtccaccagggagatctcccactctacttcccgcgggtttcctggactctaataggagggtccccctgctttgaaaggggtctccccaccgcacagtctaagttgagggagtctggctccagagaagggaacacccagaccctgggtagacgttcccggttagtgggggtcctgaccagggcggggtgggtgtccaggctggagtgcagtggtgcgatctcagcccattacaacctctacctcccaggctcaagcgatcttcccacttcagcctgtagctgggactccaggcgcgcgccactaagcctggctaatttttgtagtttttggagacatggggtttcaccatgtcgcccaggctagtcttgaactcctgacctgtgggagggtcaggaccccgggaagggggtttccccctccttgaaaaggatcacccgaccgcataggttctaagttgagaggcttccggccctgaagagggtcgcggccgagggggtcccggctgctgcgggggcggcgcgacgagtgtctcacctcggagcagcagctgccgacgccgcaggtaggtctccgcggccgcgtagtcgctggatacggcgttgacgcccacgctgcgaccctccaaccagtgggtggccgccccgccgcgcgccttcacctcgagcgctcgcacccgcagcggcgccgccgcctccagcagcacccggccgcacagccgctccccgccgcggtaggcgccgcccgggccccgcgccagctccagcgcgaagctgcgcacgcccccagagcgcatggcgcgcggctggggacacggtttggacacgcggagagaaggcacacggcccgggcgcgcctgcagatccccggggtttccgcgttcccccgtcgcgtcccccaagcttcctccgggcccccccggcgaacttgggccggcgccggtggcccagggcgggcgcgtcgtcggcgaacttcctggtcctctgcatccgcccccgtgacgcacgcgggccgccggggactggccgcccgcgtgcccgcactgttgactttgccatcctcggagatgggcgggccctgtttttgtagggtcggcgctgttgaatcagaagcaggcaggggcggaggtggctggggaggcaccgaggcggccgcagatctcagccctatggtctcattcgcccctcactacccctgccccccccgccgcccagaacccggcaccgcctcagtctccccgtcattgtcacttcatggctgtccctcaaacaaaatccacctcgagtagctctcttcgcctccgcactgggccgttccgctaccagatccgttctcccacccatcccgcccacgcccaaatgccacttcctcagagtccccttgccacctctggccttgtttacttttctctgttttttctttctttccttccttccttccttccctccttcctctctttctttttttctctttctttcttgccttgtttacttttctctttctctctctctttttttaagacagagtctcgctctgtcgcccaggccggggcacagtagcgtgatcctggctcactgcaatctccacctccctggttctagcaattctcctgcctcagtctcctgagtacctgggacgacaggagtcgtccacgcccagctaatttttgtatttttagtagagatagggtttcaccatgttggccggctggtctccaactcctgacctcaggtgatcctcccacctcagcctcccgaagtactgggattacaggcgtgagccaccacgcccggcctgttcataactttatggctttggtgtttttttttttttttttttaagtactatgggtttactgtgcctctgccatcagacctgggagctaccactggcacagaaggtacacccacggatgttccttaaccaaaccctgggttctcaccctgaaggacagcccctttccttctcaggccttagtttccccagccagacaacagggtagaaaggatgagtcctgccaaagactccagtgtgatccctcaggcgggaaggagcatttattgagcacctaccagttgcctggccctttttagggagttctggttaaatagactgtcaccccattttacagatgaaacaaccaaggccccagaggggcagccactgctcagagtcacccagcagtggcagagtcaggactcgaacccgggtctgaccagcacctcctcatacccttctcgtgcgtgggcccaagctggtcattcatgcaccagccacggcctagttatctcgttgagccaggcgatggatggccttatcagaggctgccaggacctggggctcctcggctatgcacagcgtcgtctccccaggagccaggcctcctcgccccacccagggctcagcatctgccaagtaaatgcctgttgctcccagcacccaagcccatggcctccagggacctttctgattctacttgtgtctggaaccctcccctgtagcccacccctgaagggtctctctgacccctggatgtcaccaaataacccctcctcctgacgtccccatggctcctccatggagtcccttccaccaagtccaggttttttctcactgcaacctccacctcctgggttcaagcgattatcctgcctcagcctcccaagtagctgggattacaggcgtgcaccaccacacccagctaatttttatatttttagtagagacagggtttcaccatgttgcccaggctggtcttgaactcctgacctcaggtgatccgcccgctttaccctcccaaagtgctgggattacaggtgtgagccactgtgcccagccagtccggttctttactttggcctaggggatttccagtttgaatgcaccatccttcctcgcagtgtggtcccaggtaggtagattcacctctctgggcctcagtttcccccccatcccaccatggtcaagttctgatgagga

SEQ ID NO: 1559995 - DNA, 4001 bp, Homo sapiens
gcccaggcagcctccccaacccccacctccctcctatgcctggggagactgaggcctcagcttcccccagtctgagggaatacagggtgaatgtaggcactgtcccccagggccagcaggatgccctaccttgagtgcgtagtccacgtgtagaacgcggcagtgcaggatggaaggacccactggggggatccgcagtgcccggccctgccacagcgcccgctgcccggggcccaccggctcgcccgcgaggctggccaccactgcccgtttctgctttcgggcgcctcgggccatgaacgtctgtgtctgcaccacggctgcccgaggcagcacaggacgtgtggagccgttgtcgatctcggcaaagacagggatgacctctcctgcagcaaggagcagtggggcctcagtttcccctcctgcaaccccaacaccagcccccgtcccaacccagtccggtccgcctgctacctggggtgtagcccttgcggtcgatcttggccgaaagggagactaggccacggttacagtaccaggatcgggcaaccttttcccgagcccccgcttgaggtgcctgtcggtgtagaggaaagtgacatggatgagtcactttgtgcaaaccacagtcgctgtggagcttccaaaccacccccagctgagggaggactttgggcagggcttggtttctttttaacaatccaggaactatccgttaaatagagccaggaacacaacccatcttataaagccagaaatgaaatgtataagccaagtgtttggtgtgtaattcacacttggtaagccctagctctggtctatttcacagaagaggcatctgaggctcagagagggcttcaagacacttgcccagagtcacacggcaaatgggtgcagatcccagtggattccacacgcattcccacacctgcctccctccctgccagggcccacctatgacctccatcttattggttggtgtcgcccagcagccaggcaggccccttcctacaatactcccaacctacctccccaagggtggccactcaccagcagggctggcgtgttgatgtccacaggctcgatgacagtgaacaccttccttgcccggcgtgctgggacccagggccggtgcagggtggccttgatacagtagcggacactaccgtgtttgccctcgaaggatgtcaccagggtcctagggtggagggacgggacttcaggggacaagatacagagacaagcaggcagggagaaggagacacagacactccgggggcctcccagggggagagtcttggggctcagaggtgcccagatatccagtattggaggtaccaatctggaaggggctgcaggcttagggcaaccctgcaccccagaggacttacgggggcagctggaagctgaacaggaactcatggcgcccaggaggcagcgtcgtggtctccccggtatctgcaggtaggagaaaaaggaggcgactgagcggttgcgctggggtcccagggctgacggaggtaccgccgtccaggtggtgggaggcacacaactggtgttggagcaggggtcctccatccgtacctggcgccaggagcgtggcgcggtggctcacgacctccacgcgttcactgtagctctgcgtgtaagccgtgctcgagcccgcgctgcgcgactcggtccagtgcacgtgggcgcggccccgcgcgcgcagcctcagggcacccacacgcgcggcgcttgacagctccagcagcacccggcccgccacggcctggccgccgctaaacacgggctcgacgcccgcggtcgcgccgtccaactgcaccgagaacgctttcaccttgtcgaatagcatcgcgtccggggtgcgaacccacgacaggcggaacctggcctcgaactcgcgaaccggcagctcaagatgccgacgctgcagcctcagaacgcaaaatcgccgtcaacgcgcaggcgcgctcaccaaccggagcagaaaatccccgcgccgtgcgtcggcgccgcttttatacggcagggcgggggggggtggggtcaccgtctcttccccgccccgggaagggactccaccaatagcgcgacaaggggcgtggctctgcccaggcgtggagcaaaataacaaacgcccctgctcaccgccggctgcccccttccctcgcggaccccggggagaaactgaagcccttaggctgccagagctggtctctcgcggaccccgggggtaaagaggaaaaaaagaggtgcagaggcagggcccaggcctgaggtcacctagcagagccttcagcctctcggcttaatcactcaccagccgcccctcgttgacgtgactcgaggcatgtccagcccgatttggggcgggggactctcgccccagttgagggccagagagcctatgactgttccaggcctgtttcccccgctatgcaaagggagaagtggaggaggtgggtgggaccgccctccacactggtgcctgctgcacccctttcctgattcaagtcccgcttagctggtggctctgggcaaatgacaacctcttggagcctcagtttccacctctgtagagccgggagaaagtaaaaatcagtcctgacctcagaaggttgtgcatggatcatcgtgcagccccagctggactcctccaagagcctcgctcccgggtcatcaacctgctcttgacataccgtcactcggtcgcgcctcggcgcattcgcccaggagcggtacctacgaaatgatgttcccttcccaattttcagcctctggcaaaccctaccttccccgcagcccttgtgcctgctccagtcatcctcagcccccgtcccgccacagagctgaatgcaggggacgctcgggcacccccaggtccacagctgcggtgtggccacgggacggcgtgacctctctctgggcttcagtttccccaaagaaaagtcgcatggagtttctccagcgggagttgcctctgcgtcgtctgcgggacgctggcgccctctcgtggcagcgtaatgcgctgccgctgaacccatcccctgccgtgactgtccgcctctgagcctggctcaggagacttccaccacctcagtgaggtgtgtgggtggagggggcggtcataaacaaacacggtcaccctcagcccgtgatggggatcggaacaggaacgacggagttggaggcacagtgatcagcctggaaggctgcctgggaggatgggtctttggagttgaaaggaaggtctgggaccttaggccaggtttcaatggatactagaggggagacagtaggccgttaagtccgggaggagaagcgggattaggtaaccctgaagggactactgagccagcgcctccctcaattcatttcgcagacggaccccaaaggcccagagatgggtggggctctgcccgaggtcacacagcacctccactggcctcgcccctccagtgtcactgttttttccttaaatgtataacaatttaacaatttttaagctccctctccctctccctctccccttggtctccctctccctctctttccacggtctccctctcatgccgagcagaagctggactgtgctgctgccatctcggctcactgcaacctccctgcctgattctcctgtctcagcctgccgagtgcctgcgattgcaggcgcgcgccgccacgcctgactggtttttttggtggagaaggggtttcgctgtgttggcccggctggtctccagctcctaacctcgagtgatccaccagcctcagcctcccgaggtgccgggattgcagacagagtctcgttaactcagtgctcaatggtgcccaggctggagtgcagtggcgtgatctcggctcgctacaacctccacctcccagccgcctgccttggcctcccaaagtgccgagattgcagcctctgcccggccgccaccccgtctgggaagtgaggagcgtctctgcctgaccgcccatcgtctgggatgtga

SEQ ID NO: 1559996 - DNA, 4001 bp, Homo sapiens
aattagctgggagtggtggcacacgcctgtagtgccagctactcgggaggctgaggcgggacaatcggttgaacccaggaggtggaggttgcagtgagccaagattacgccactgcactccagcctgggcaacgagtgagattcagtctcaaaaaaaaaaaaaattgctagttctttttttaagagacagtcgtttgaacccaggaggttgcggtgagccgagattgcgccattgcactccagcctgggcagcaagagcaaaactccgtctcaaaaaaacgaaaacaaaaaataaacaaaaattagccaagcatggtgccatgtgcctgtggtctcagctactcaggaggctgaggtgagaggatcgcttatgccagagaggctggggctgcagtgagttttgatcacaccactggcctctagcctgggcaacagagcgaggccctgtctcaaaaataaatacataagccaggcctggtggctcatgcctgtaatcccagtactttgggaggccgaggtgggcgaatcacgaggtcaggagttcgagaccagcctggccaacgtggtgaaaccctgcctctactaaaaataccaaaaattgctgggcatggtggcgggtgcctgtaatcccagccactcaggaggctgaggcaggagaatcgtttgaacccgggaggcggagcttgcagcgagccgagatggtgccacttcactccagcctgggaagcagggcgagactgtgtctcaaaaaatagataaataaataaataagatacaaataaataaatacagaaataaattaaattaaattacactttgttcagccaagtgttggccacgtgttctgcttgactgcttaatacctgggaatatccccacaaacacattttgcaatggacatataatttccccgacaactcagcagactctctgacatttgttcagatttcagatctgacctggtggaactggggactagttattccttctctggaaggtctcccttgctcttctacctccactatctttctttttttgagagggaatctcgctccgtcacccaggctggcgtgctgtggtgcgatctcagcttactggaacctccccttcacgagttcaagtgattctcttgcttcagcctcccaagtagctgagattacaggcacgtgccagcacgcccagctaattttttggtattttttggtagagatggggtttcgctatattggccaggctggtctcaaactcctgacctcaagtgatccacctgcctcggcctctcaaagtgctggaattacaggtatgaaccactgtgcctggcccacctccactgtctctccccatgaatgcaggactgcctactttgtctcctggggttttgctgtcagagtgaaacttatctgtaaaagaataagacttctcagaggcctctcaaaggcagttgttggattgagcattttccaaggagactactttgaaccttcattttgaatatcggggttccgatcagctccttatgtcttgttatttttgcgttttgtgtatctgatggtcattgttcttcatggcctccctcctagggagaaatcaggccactccctatttctgatagccctagagttttgttgattgactctcggatgtgtttattttccagacccaggttcctgtcatggctaggggtggctgttggcctcgtccttaccctccactgggaatgtctttgtcttatgcacgtagtctgccttgttgttgcaaataacatttctgctataatcacaggatgccccggcttcttcactccattcgacgtaaccccttcccacgagctccaccttcactatggggtccaccagggtgctgttcagggttaagatcacctgcccttttatgctggagccagccaggtagattctatcctcgggcagcactaattcgatcgacttcaccacagacatggggggttggggggtagagagacattcctctctgtcccccatgtccctgaaattcccggttcgttggccctagtgaggtaatccatctatgacatcactcagctcagagttccgggaagtggggaccccagtggccaggaggggaggcaaaactgttgtttagggtgggtggttgattgggaaacctgtagtcctcactggttctttttttttttttttgagatggagtcttaccctgtagcccaggctggagtgcaggggtgccatcttggctcactgcaacctccgcctcatgggttcaagcaattctcctgcctcagcctcctgagtagctgggaccacgggtgcatgccagcatgcccagctaattttttggtagagacagagtttcactgtgttggccaggatggtctcgatctcctgacctcgtgatccacccacctcagcctcccaaagtgctgggattgcaggcgtgagccactgcacctgggctttttctttttttgagacaaagtctcattctgtcacccaggctggagtgtagtggcgcgatctcggctcactgccacatctgcctcccgggttcaagcaattctcctgcttcagcctcctgagtagctggaattacaggcatgcaccatcaccatgctttgctaatttttttttggtatttttatttattttatttttattttttgtgatggtctcactctgtcagccagactggagtgcaatggtgtgatctcggctcactgcaacctctgcctcctgggttccagcgattctcccacctcagccccccaagtacctgagattacaggcaagtgccactgcaactagctaatttttgtatttttagtagagacggggtttcaccatgttggccaggctggtctcgaacttgtggcctcacatgattcgcctgccttggcctcccaaagtgctgggattacagttgtgagccactgtgcccaggtgcatacacactcattttcatcttaaagactctacatttatattggtctatattggaaaaaacatagagatatggccaggacctgaaatctggtgcgcactgaagttgatcagggcagtgtgtgcttaatctgaacatcgacaccatcaggaagcagcaactccctgcatgattgacatttctctttttttttgaggtggaatctcactctgttgcccaggctggagtgcagtggcgtgatctcggctcactgcaacctctgccccctgggttcaagcgattctcctgcctcagcctcccaagtagctgggattacgggcatgggggttacaggcacctgcccccgtgcccggctaatttttgttctttttgtttttgtttttgttttttttttgagattggagtctcactttgtcacccaggctggagtgcagtggtgcgatctcggctcactgcaagctccgcctcccgtgttcatgccattctcctgcctcagcttcccgagtagctgggactacaggcgtccgccacaaatgcctggctaattttttgtatttttagtagagacggggtttcatcatgttagccaggatggtctcaatctcctgacctcgtgatccgcccaccttggcctcccaaagtgctgggattacaggcgtgagccaccgcacccagccaatttttgttatttttagtagagacagggtttcaccatcttggccaggctgatcttgaactcctgacctcatgatccacccgcctcacttggcctcccaaagtgctgggattacaggcatgagctaccacgcctggctgacatttctctttatgcctgcatctcccccattggatgggaagtccctccagggtgagaccttgtctaagtgaactttgtgcccatcaatgtctgcgtgacccaggcaggatctggctcagccaggagtgggtgtggggggtggaatcaataaaagtttgttgaatgacttaatgacctctgagaatgtatcattttgcaaaagggaaactgaagccctttgcactctaacaattattcctggcacctgatt

SEQ ID NO: 1559997 - DNA, 4001 bp, Homo sapiens
ggtgaccttagattttggatttgtacaggccttgacttgaaaggtcttttgcgttttgtggctcctgtcttctcatctgtgagatgagagccatgcccacctttaagtcacacagattaataagtacatctacggaagcaccttggaaaagatgtacaggaggctgtgacctccaagctccagccgactgtttgaagctggagcccgtcacagctcagcccaatccacccaccccccagactaggtcagaccatcaaaagcaacgggagcttggcactgattatccagctatattaaaaaaaaaaaagaagaagacggggcacggtggctcacgcctgtaatcccagcactttgggaggccaaggcgggtggatcacttgaggtcaggagttcgagaccaacctggctaacatggtgaaacgctgcctccactaaaaatactaaaattagctgggcgtggtgacaggcgcctgtagtcccagctactcgggaggctgaggcagaagaatcgcttgaactcgggaggtggaggttgcagtgagccgagatcgtgccattgcactccagcctgggcaacagagtgagactgtctcaaaaaaaaaaaaaaaaaaaagaagaggaagaagaagaaagaaaaagtgacagaaaaattgctgcagtaactcagctggaaacgggtgggcaaacctggagaactagctaatgcctgcctggctatgccacccctcggatctcagtgtgtttatccaagcccacagagaaaggtggggaaggggagctggggagacaaagttcccctcaaagacggtagcatcctttcccagggagagctcaagcataggggggttgggccccaacgaaggagagaaaccaggttccagggtatgtgcattggggcagaaaagcggcagcaactggtgggcgtggggttattgaaatattggcaggttggggaggggactggtgggacacaaatgggaagatggggttgagagaggtcctgaaaaggggttgaggggttttcacaggaaaaaaaggttactggaggggagggtcttcacggcaaggagagaggagcttgggtgagaggtctccatagggaaaataggagatggctgggatttcccccggggaaaatgggaaggggctggatattgggggtctccagagggaaaatgggaggtgtgagtatctcactacaggaaagagggaataagtgggcaaaaatgggtgggtggttgaagcgggggtcttgccacagggaaaccacggtggctgaagatctccgtgggttaagaaatggaggccgagaaggtctccccatgaaaacgggtacctaggaagagctccagagaaaaaagatggatgaggttccccacgcgggaaatggggcttggagggggttaatctctatggggaggtcggggcgggcagtgggggaagaggccactgggaggtccgagttagctggcggggggtctccacccgggaggtcaaggcgggcagtgggggaggaggtcacggggaggtccgtgttggctggtggcggggggtctccaccgggagatccggttgactggcgggctgggggagatcggggttggcggaagggggacgaggggtttcatgggggagatcaagttggccatgggagcggttctctgaggggaggccggggtcggcccgggggtgggggtccccgcacaggcccagcctcaccgtccgccagggcttcactgcactcgaagctgatctcgaaccggaaggggctgtggaaagggctcgggttctccaggaccgccacgttcagcaccgacaccttggccatcgcctcgcctcgccgcgccgcagcaggggcaggggctgtggctgtggcggaggccgcgcctgggtccggtggggtcagtggggtagggctgaccaggtccactcccgcctcttctctccgagaactgaagtgcgcacctagtccgcgcgccgccttcaaatagccggcctccgccctctggccaatcaccgccaacgctccctggcggcgcgcgcaccccctcagccagtcctggagcgccgatcggcgcgcgcccagactcctcggaccaatcagcggagctccctctccgcagcgtgtgaggagggcgaaactatctccaagcttcttagcgtgtccgctggaaaccaatccccagcgtctccgacttggatgtcaacggcgggaatggacggagtcacagcgccggcctccttctggccaatcctgagggttcccgcaccggcgtggcccgcccctcgcctcgcttttccgggagatgcatcccgcagcgcgcagcgccgccacccgccgagcggtggcgcgcggcgctcgctaaagaaggcgggaagggcggtgctcgcacccgaagtgattggcaggagggagtggggcggagataaagagggttttctgagagtttattggctggattggtaatggtggcgggagcagaaggaggctcagctggggattcgctggagagaagcggaagtcgagcgccaccgcggtgttggcgagtgtgaagagagaggaggagcgtttgcggcctcagcgtctgtcaacaggtgagcgtttcctggagcttttctgagtggctcctgacccttgaggtccagcggcgcgggagtccgttgtgaacgttgcgaacgttcggagtggcggtcacgaggcgcgctcagacctcgggaatccggccgggttcggatcccgctttcgcccccgaggggttcggatcccgctctcgcccccgaggggttcggatcccgctctcgcccccgaggggttcggatcccgctctcgcccccgaggggtttggatccctctctcgcccccttgagggctcttgggaggtttcaagcggacggtactgaaaatgggagttccagttcgggggcagaccagtgttcagagtccgggctctgctactcagcgcccgaggcagcgcctccccattcaacgggggccgtggcaattccctgacatgattcatgaccacataatacatccggaaacttctctccaccgcctcccgtctgggccgtcgcccccggcctgggagactccaggtctcagagtctctgcccccacgggcgatcagtgctgcccagtggaaaaataatgccagccgcgcaccaaaattaggtgtaaaattaacattttttggaagccacttttttttttttgagatggaatctcgcgctgtcactcaggctggagtgcaatggcgcgatctcggctcactgcaacctctacctcccgggttcaagcgattctcctgcctcagcctcctgagtagctgggattacaggtgcccaccaccacaaccagctaattttttttctgtattttcagtagagacggggtttcaccatgttggccaggctggtctcgaactcctgacctcaagtgatccgcccgcctcggccttccagagtgctgggattacaggcgtgagccactgtgcccggccatatctttttttattattatttgtaattttagaggctggtcatggaggatttcttgaggccaggagttcaagatcagcctgggcaacataacaagacctcatatctacaaaaaataaaagaataagccaggtgtggtagtgcatacctgtagtgtctgctactcctgaagctgaggcaggaggatctcttgagcccagaatgctccagccactgcactccagcctgagtgtcagagtgagaccctgtctctaaaaattaaaattaaattttaaaaaagaaagttcagtttagctgtcttgatagccgcagttgagtgctcctgagcccgtgtgacaagtggctcctgtattactggacagcgaaggtcagaaacacatttgaccaggtcacttctccggatgagagcattgtctttgaaactctatgctttgtctcctgttaaccacccagctccaacttcaaaccaggctaagtaaccctctttttgttaaaattctgac

SEQ ID NO: 1559998 - DNA, 4001 bp, Homo sapiens
actggtttacttccaaaatacatccctggtgcgatgtggtggctcatgcctgtaatcccagcactgtgggaggccgaggcagtcagatcacttgaggtcaggagtttgagaccagcctggccaatatggtgaaaacctgtctcctaaaaaaaacaaaattaacaggcagtggtggcgcaagcctgtagtgccagctactcgggaggctgaggcaggagcattgcttgaacctgggaggcggaggttgcagtcagcctagatcgggttactgcactccagcctgggagacagaggagtcttgagtgtctaaaaaaaaaaaaaacctcaagtctgactacttctcccccaacattctgcctccaccagagtccaggatgttgtcatctctcaactggttacacccccaatctccttgttagtttccctgcttctaccctgactgacaattaaatctccacctggccgtcaaagggtacttttcaaacatgaatttggccacgacattgccctgcttaaaacaaacagcttcccgttaataacctggagtcaatgccaaacttcttagtggcccataaggtcccacaccatgtggctctgattggtctctccaacttctccttcccctaccctggctcactaagcttcaggcactctggtgtgcttcctgctctgcaattcctcattggttcccttgtgagtatgttgaggaaggagtgaaacacgagagacacaggatatagagtggataggacacggtggctgctggtgtgtgcgcacaagaaaggctggaagaggcttttcccagaagtgggggctaagccctgttccactcaccatagcaaagaggttgtcatagcctttgaccttggtaggcacctttgagaacttctggtcaaaagcatctgagatgttgtgtgctgggtctgtggagatgatcagaacactctcacgccccttggagagctggactgccaggctgcagctgagtaatggaaaagtcaaaagataggggatgaggggatgggctctgttccctgggtctgcaaggggagtggtaggttccctggagcaggtgacccgaatcagcaggggccttgagaggagagtatgggttatggtgggattgagcctcagtccctacaaaggaaccctctctgatttatctcctgacccctctatgtggactagagaggtaaggttcagctgactgagtctgtctggcctagtgcctgcttcttttttgctgggcacagtggcatggcccagcggtccagccagcatagcttgactccgtgcccccttccttaataagctaaggggtctcctgcattccctagtaagcacaggatggttcagtctgcttgtccaggataatctgtccaacggacacctcctgcctgtagctgcctgggacagtctcatcacgtgctctctccctcgctttccaccctcactctcgccttgggcataaaacaccaaggttcaccaaactaggattgcttgttctggtgccgccctcacccacaactctggattcactcaggtacggtccagctgatggggatatctaagtgcttccccgtcccccgggcgctgagttcactgtggttcggcacttgagccccaacacggatggtccaactcagagggtgctagggctgcattgaggtctttctcatttgctccaggtaacttccagagagtgaaacccaaagacccccgccagcccccatgccccggtcgtggtggaaaagccggtccttggcctccccttcgcccagtggtatatcctacacgcctcctggcccccgccgcagcctccttacctgcaggtggtcttgcccacaccacccttgcccccgacgaagatccacttcaggctgcgctgctcgatgatgttgctaagtgtaggctccagcggctccacatcaggagcatcttcgaactcctctgcctcaaccccccacccggccacccctgccgccattttggaactggctcacgtgatccagcggagcgcaccatacgaagaacctacaggggaaattctctatcacattcctagcgaagctaggagcatgagttaatttcctcattacttgccttttaggagaaatataaattatattttcactattctttgcttccagggttcactttgtcaacctctggtctataattttccaagggttccccctacctaatgaacacatcggtacggtctaggctactccctttcactgattgggccctaggtcttgcagctctcctttcattggctatgtcttttcttacttacaccaatcactcttatgttccggtagcgccaacctcaccttagcaaccagccaaacacccagtccatgccctttcggtgaagttagattcccggtcctccttggcctgactccataggctcaactttatgtccatcattttccctctattcttcacggtaggtcccaacctcacctcaggtccgccccctctgttattcaataggctgtgagcctcttggctcttgccgcaaaccaatcatagacgaattgactcggttggcgataggtccccgggctgatagtggcttagagtgggcgagtccacagagtcttgtcctgtacgccctgatctcccatgcctagcagacaccattcctgcaattgcgctccgtttcgtagaaggaattcctaaaagtctccttgtatttcaagagaagactccagtataccatatttcatgtttgaacctctgtcttagagcaggaacagaagctgggttccaggcccttgatggagaccccagcccatgacactcttaactttagagggagactacagactagaaataaccccgacttcatctgaatactacagctcataaaataagctgattctcgggccgggcgcggtggctcacgcctgtaatcctaccactttgggaggttgaggcgggtggatcacctgaggtcaagagttcgggaccagcctggccaagatggtgaaaacctgtctctactaaaaatacaaaaattagccgggcgtggtggcacgcgcctgtaatcccagctacttaggaggctgaagcaggagaatcgcttgaacccggagggcagaggttgcagcgagccgagattgcgccacttcactccactccagcctgggtgaaagagtgaaactccgtctctaaataaataaataaaataggctgggcgcgttggctcacgcctgtaatcccagcactttgggaggccgaggcaggcagatcacgaggtcaggaatcgagaccaggttgaggcagaagaatcgcttgaactcgggaggcggaggttgcagtgagccgagatcacgccactgcactccagcctgggcgacagagagagactccgtctcaaaaaataaaataaaacaaaataaaataaagtaataataacaataataaaataaaaaagtaagctgattctcagacggggacttcagctccacagagccagctatgtccccaacaaatgtgagctttatcccagagatggttacccaacccaaagatacccctatttctacttggggggcccagactagacatgctctctattccccagttagggattcaagttcccaggtgtcagctgagcacacagccccagatgaggtccttccactcatagagattattcttggtgtcgtcagacggggattctagccctggaaagcgaatctgttcctagccccaagtgaaaccaactccagagagcaagctacagccccagtctcagacgacagtctcattctccgggagcccctgtatggggaactccagcctgagtactgctgaattttgaaaacccgagaggcagggctcggtggctcacgcctgtaatcccagcactttgggaggctgaggtaagaggactgctggagcctaggagtttgagaacagcctgggcaacatgacaaaaccccgtctccacaaatataaataaataaataaatgaataaataaaa

SEQ ID NO: 1559999 - DNA, 4001 bp, Homo sapiens
gatgtcctcagcgccccacagggcccctcgggccacaaacacggcgtggtcccagtgctgtgaggcctccaagagctgccgctctgtggtctggtcacttagagctgagggggaccccacctggggtggatgaaggaggggagggttgaggtcagggaaggatatccacttcagggtggggtgagaccaagacagaaggggcagggctctgcgtaaatggttggggtggggcttaccaggagattggcatggcgcaggatttgtgccccagattcatggattattttgggatgggccacttccacaaccagatcagggcgcctgggagaggggaaagagggcggagggtcttggagaggtattaggcctcttctccccaaggttccctccgagtctactgagggctgcccttcttctccctgacctgggaggcgaaatgagatgaatgggttcgtcctgtttcacatttgcttgaaccaaggcccagagagggtcagggaacccctgagatcacacagtggctaagagagccaggacaggagcttcagggagctccactctcccatggcaaggtcactgacctttccccaagggcagcaaggttctggagctgcagggaagggggcacgctccctgccattcgtcctgggtcacgattccagacaaaaacaagttctaggccaagttctggtccctgagccaagaggcgggagacgagggactgtcctggggagagggaaaggagagggctagagatccagagagagggggacagagacccagagagagaggaggtggggacagagacccagagagagaggaggtggggacagactcagattgcggggtagggagacagagatgggggcagggcagagacacagtggggtggacagaggcccagagagaagggagacagagacggagaggacagagacctggggtgggggtgcagtgggcagacccagagacacagccaggggcagatagagagagaaaaaagtgtttgtggagggcagagagtcttgggagctttaggaaggggtttggggaaggaggccaaggatggtcagggactcaccgaggcggccatagcccaccacgcccaccctccacgggcccctgtcggccatggccctgagtgcggtgtctggggcctggctccctgggctgctcgctgcccgctgcacaaggcctgggcagccgctgctctttggacatctgacccttgagcctctgggctcagtcttcccccttccccgcaggcccagcgtgggggcgtgggcctgcgggagtggaggcgggagaacccttccctgtgctctgtccactttcccgggtccagcacagtgagcatggtgaccgggggttctgggaaccctgcgtgcccccctttcccctgcagcacaccctctttctccctgctgatgtggaaagtttcctctgcagtcccctgccccctctctggccggccaggttgtcatggaaactgcatcttgctttgggttgggagaagagatggtgacagggactctgggctctgtctgtcccctcgtgctcacctctcctccttgtcctcaggcggctaaggtctgagggaggcttcagcctggccgtggccctagccctcccagaggcagcgggagccctggttgtggcttctcctcaatgtgcccttgcctcagcgggtccaacctccctagccccgctgcgcagcacgggtccccttcccacagcctccgcccctgtccacagcctccctccgctctgatcatccttcagttcaccttgacttgctacctttcactctgtcccccatcgtgccaccagctgcctccagtgtgacgttctcgctcccacgtccgtccctcccgttccccagctcgcgtcagcccaggagaagccttcgaggcctggagaggccaagtgcccccaacatgagccccagcctctgtgccttgagggtgcctggcatcggaaatggcgcaggctgcggcagcgcaggctccctgcccccagccaccacctggtacccgctgcagtgtttccatggcaaccaggattggcgctggaaggaggctggagagaaagagagcgtgaacgggagcatggggtggggggggcgggcactgggtggcgagagccccaagttgacgggaggagagaggagacagacgcgggcagacagagaggggccaagaccccgacgtggcacccaaaggctgccgctgctgataagggaggaattggcttccagagccaggagcccccggtgtgggagagatgagatgcctgggtgtagacagagccaggaagggggcaggggccaggcacctcacggaagtggggggcctcccgccatctctaccttctgactcctgctggggcctgagtgtccccatagtgcccatagctgccgtgtacggggtacagcctgggccactacgaggggagaagggggctgggcgcaggcctgtgtgtcctcagggctgtgtccccgaagccacctcagcgtgggaaagcactggaaggccctgcatggctccgtccctccctctgcctcccccagcagcgtgagatggcagccctggccagccccagccctccagggcctgcaactcgggcaccttgaccccccaagagacatcaccaccccctcccccaacccacccaacagctgcccactgtgccagcaaccccccagccaggcccgctcagggtttgctccctgccctcccagggctctgctcctgcccttctgagtggcactgtggtgcccctgccgccccaggcccacccgatccggccctccagcctcccactgaaccggccagaaatacagctgctgtgccccagaggccgcaggcccagcctcccgcttggcctccctccccttcggcaccccgtcctctggagcagccttgagggggtctgcagtggagagacacactctggattgggccctgttgtgggttgaattgtcacccagaaagggaagcgcagaagtcctgacctccagggcctcagaatgggaccttatttgggaattgggtttttgccaaggatggagctgaggttatactggaggtggaggctcctggtccagtctgacctctgtccttgtaagaggggaggttaggcaggctgcagtggcccacacctatagtcccgacactttgggaggctgaggcaggtggatcacttgaggtcagaagttcgagaccagcctggccaacatggtgaaaccccgtctctactaaaaatacaaaaattagctgggtgtggtggtagtcgcgtgtaatcctagctactcagggggctgagggaggagattcgcttgaacctgggaggcagaggcttcagtgagctgaaattgtgccactgcactccagcctggacaacagagcaagactctgtctcaaaaacaaagaaacaaacaaagaaaacggtcaggcgcggtggctcatgcctgtaatccgagcactttgagaggctgaggtgagtggatcacctgaggttaggagttcgaaaccagcctggccaatgtggtgaaaccccatctctactaaaaatacaaaaattagccaggcctggtggcgcatgcctgtgatcccagttacttgggaggctgaggcaggagaatcacttgaagctgggaagcagaggttgcagtgagctgagatcacaccattgcactccagcctgggcgacaagaataaaactccatctcaattaaaaaataaataaataaaagagggggagttggacacagacggacgcacacagagggaagagatgagaggctacaggggcaggcactggaagactggggtgatgtgatacagccaccagccaggacagcctggggacaccagaagctggcgaggcaggaagctcccctgaggtatccccaggtttcagagagagcgtggccctccctccagcctccagaactgtgggacgatagatttcctttgttataagtctccacctgggtttgg

SEQ ID NO: 1560000 - DNA, 4001 bp, Homo sapiens
ccggagagagcgggacagagccctgggggtggacagagacagagagagtctcgatcagaggcgggcacaaatggagacatctacagtgccaggattcaaagtcatggagagaggttaaggaaataaaggtcagaaagaaagaaaggtcaacaaatacagaaccagaactgcagaactagtgagagcccgggacccccaagctctgcagaacacaggagcccagggccgggggagaggggcctggccgcacccaggaggctctgccagaaggccgtgacggtggcggagccggtgaccgcgcctggctcggcagggttctctctgcgggtgtgcacagcaaagcttcggcccgtggggccccggggtccgctcagctctacatccaccacgtgcatgtccgtgaggctgggacaagaggggcagtcagtctggagagcctggactcagcccaacaccctgcttagctctgctcacctggtatcagccacgagcaccccaatcaccccatcgaagcccaggctgggggcagccagggcagccgccgccatggtgttggaatttcgcggggcaaaggggcagagcccacggacagggccttcgtagagcacagtgcaaggcccagggctgtgggctgcagccaggggtccctcaagccggaagccatcggggtgtgtggccatggtgacacgaaggctctggaagcaagagcccgggttagggggagtggggtctttgcaggcctcccctggttcctggggagcccagcaggcctcacccggaggcccccagctgcatccaatctcctgatgtcctcagcgccccacagggcccctcgggccacaaacacggcgtggtcccagtgctgtgaggcctccaagagctgccgctctgtggtctggtcacttagagctgagggggaccccacctggggtggatgaaggaggggagggttgaggtcagggaaggatatccacttcagggtggggtgagaccaagacagaaggggcagggctctgcgtaaatggttggggtggggcttaccaggagattggcatggcgcaggatttgtgccccagattcatggattattttgggatgggccacttccacaaccagatcagggcgcctgggagaggggaaagagggcggagggtcttggagaggtattaggcctcttctccccaaggttccctccgagtctactgagggctgcccttcttctccctgacctgggaggcgaaatgagatgaatgggttcgtcctgtttcacatttgcttgaaccaaggcccagagagggtcagggaacccctgagatcacacagtggctaagagagccaggacaggagcttcagggagctccactctcccatggcaaggtcactgacctttccccaagggcagcaaggttctggagctgcagggaagggggcacgctccctgccattcgtcctgggtcacgattccagacaaaaacaagttctaggccaagttctggtccctgagccaagaggcgggagacgagggactgtcctggggagagggaaaggagagggctagagatccagagagagggggacagagacccagagagagaggaggtggggacagagacccagagagagaggaggtggggacagactcagattgcggggtagggagacagagatgggggcagggcagagacacagtggggtggacagaggcccagagagaagggagacagagacggagaggacagagacctggggtgggggtgcagtgggcagacccagagacacagccaggggcagatagagagagaaaaaagtgtttgtggagggcagagagtcttgggagctttaggaaggggtttggggaaggaggccaaggatggtcagggactcaccgaggcggccatagcccaccacgcccaccctccacgggcccctgtcggccatggccctgagtgcggtgtctggggcctggctccctgggctgctcgctgcccgctgcacaaggcctgggcagccgctgctctttggacatctgacccttgagcctctgggctcagtcttcccccttccccgcaggcccagcgtgggggcgtgggcctgcgggagtggaggcgggagaacccttccctgtgctctgtccactttcccgggtccagcacagtgagcatggtgaccgggggttctgggaaccctgcgtgcccccctttcccctgcagcacaccctctttctccctgctgatgtggaaagtttcctctgcagtcccctgccccctctctggccggccaggttgtcatggaaactgcatcttgctttgggttgggagaagagatggtgacagggactctgggctctgtctgtcccctcgtgctcacctctcctccttgtcctcaggcggctaaggtctgagggaggcttcagcctggccgtggccctagccctcccagaggcagcgggagccctggttgtggcttctcctcaatgtgcccttgcctcagcgggtccaacctccctagccccgctgcgcagcacgggtccccttcccacagcctccgcccctgtccacagcctccctccgctctgatcatccttcagttcaccttgacttgctacctttcactctgtcccccatcgtgccaccagctgcctccagtgtgacgttctcgctcccacgtccgtccctcccgttccccagctcgcgtcagcccaggagaagccttcgaggcctggagaggccaagtgcccccaacatgagccccagcctctgtgccttgagggtgcctggcatcggaaatggcgcaggctgcggcagcgcaggctccctgcccccagccaccacctggtacccgctgcagtgtttccatggcaaccaggattggcgctggaaggaggctggagagaaagagagcgtgaacgggagcatggggtggggggggcgggcactgggtggcgagagccccaagttgacgggaggagagaggagacagacgcgggcagacagagaggggccaagaccccgacgtggcacccaaaggctgccgctgctgataagggaggaattggcttccagagccaggagcccccggtgtgggagagatgagatgcctgggtgtagacagagccaggaagggggcaggggccaggcacctcacggaagtggggggcctcccgccatctctaccttctgactcctgctggggcctgagtgtccccatagtgcccatagctgccgtgtacggggtacagcctgggccactacgaggggagaagggggctgggcgcaggcctgtgtgtcctcagggctgtgtccccgaagccacctcagcgtgggaaagcactggaaggccctgcatggctccgtccctccctctgcctcccccagcagcgtgagatggcagccctggccagccccagccctccagggcctgcaactcgggcaccttgaccccccaagagacatcaccaccccctcccccaacccacccaacagctgcccactgtgccagcaaccccccagccaggcccgctcagggtttgctccctgccctcccagggctctgctcctgcccttctgagtggcactgtggtgcccctgccgccccaggcccacccgatccggccctccagcctcccactgaaccggccagaaatacagctgctgtgccccagaggccgcaggcccagcctcccgcttggcctccctccccttcggcaccccgtcctctggagcagccttgagggggtctgcagtggagagacacactctggattgggccctgttgtgggttgaattgtcacccagaaagggaagcgcagaagtcctgacctccagggcctcagaatgggaccttatttgggaattgggtttttgccaaggatggagctgaggttatactggaggtggaggctcctggtccagtctgacctctgtccttgtaagaggggaggttaggcaggctgcagtggcccacacctatagtcccgacactttgggaggctgaggcaggtg

SEQ ID NO: 1560001 - DNA, 4001 bp, Homo sapiens
gtggctcacacctgtaatccccagcactttgggaggctgagataggaggatcgcttgagcctggaaggtcaagaccagcctgggcaacatagcaagtccccatctcttaaaaaaaaaaaaatacaaaaattaaccaaacatggtgatgggtgcctggtgcctgaagtcccagctattcaggaggctgaagttggaggatcgcttgagaccaggaggtcgagactgcagtgagctatgatcatgccactgctttccagcctgagcaacagagaccctacttcaaaaaataaaataaaagataaagcatctggctgggggcagtggctcacacgtgtaatcccagcactttgcgaggatcgcctgagcacaggaggttaagaccagcccgggcaagatagcaagaccctgtctcaaaaaaaccaaatacatgaagcatctaaggcccccaactctcatggcatccaggctgcctctctgtggagtaggttacctgcagccccccagcatagatatcgggtttgcatcggggacaggggactgtggcttagcaaggaaggacccagaggcagcctcagccagatgaggaagtggggggaggggacggctaaaactagaccctcccccgtacagggtgagcgtttctcactcgattctctgtcctcaatgtcgtcattcatgcttggaggagggacagtaacacgcagcatggaaaaaaaaaaaatccctcctggatgctatggggtcggggggggggcggtggcagcagccagccaggcccttcccgcgagggtaagttctcctcggcagtagaaacgcatttgctctccggaggaaggggtcttcgcctctcccttccttatactgagctgggtgtgacctcagcccccaggaacactcccaccagccccgcccccgacccccaccccctgccagctgcagccacaggcgttgactccacagtcttctaaggatggggtggggtgggtcctcagtgggccccggacactcctgcactcagatcctggcttcgcatttggggacggccaaaagaagacagtgacatcaaggaacgggagtgaagcgctcatttgagccctgatgtctgattattaacaaatcacatacgagttccaataaggaggaggcatctgtgtcttaaaccataaaccacccccttcctccccaccccacaggacagcctttatcgacacacttagattttttttttttttttttcccgaaatcgtcggctggtggccttcctagcgttataaataggaaatacatagggctaggatgggtctatttcagcgtcccagagagaagctgaggttttcatccgcccgagctctcagcgtgtcctgaaaatggtgcacttagaggggaacggtgcgcgcggaaggtaaactgtgttgctgggcgcagctcagggaacggttttccctggtaccgggaacagggatgtgagggccttcacggagtcacaagaccgtggctctctgctcccacccgccccatctgctggaaagggatttagaggcggcaaaggctgccggataaaccttccagggagacggtttatcctgggagaaggggagatgcgcgcactcacctctgcagctgagacagcctctcctccttactggcaaacaaaggcgagccctgcccgggtgcagctgggcatcgctcacgctccccgggccttcagagcctaggaggaagaggatgctcgcaggggcggattctgcatccgaggaaggtcacccagggcgacgtggccagcgcccgccagctcttttgtgcaggggtgggtggggtgcagggttagcggtgggctccccagcgcggggctgcggctgcgccccctctcatcgccgcccgcctgcgcgccctgcctccgaggtagctgcttcttcccagctcagggctggcagaggctcggcttcccgaagacggttaatttatgctgcttttgtgtgcagggaggagggggtggggggtggcggcctgacggaaaagcacagccccctgccagaatccgatcctccccattggctgacagacaagcatctccgaaagccacgccaggggcagaggcagaaataattttctgatggcgcatcagagatttaaaaacaaaacaacggacaaataaataaataaatggcaagatggcctcattccttagagaatggggggtgggggagttgggaaaggtcttcttggcacttctccttgcaaagggagcaggggtgaggggtggcatcccccaaaaagtctgtgcaggcaaagaaatgactgtccccaggtcggatgccatggctcacgcctgtaatcccagcactttcggaggccgaggagggaggatcacctgaagtcaggagttcgataccagcctggccaacatggtgaaaccccgtttctactgaaaatacaaaaattagccaggcgtggtggcgtgcgcctgtaatcccagctactcgggaggctgaggcaggagaatcgcttgaacctgggaggcggaggttgcagtgagccgagatggcgccactgcactgcagcctgggcggcagagggagactctgtctcaaagaaaaaaaaaaaaaaagaaagaaatgactgtccccaggtcaccgtgttgtgggtccattagatggtcacttaccattgattcagcctcgtgccctaaacagggctgggtgcaggggaggcggaagtttctcaggcacactcactttgcagggctgctgtgggaacggcgccccctgcagttgtgcgctggcgtggcctcgccctggaggaattcaaggagactgtggaagatggtagggtggagagtgcaggccgtgcagtcggactggaagtgggtttgaactctagcccagccactccccagctggcagaccagtgggcatgagtgatctcacctgcgggcctcagtttttctcatctgtgaaatggagccgctatggcttttccacattatgagataatgcatagacagcactaaacacagtgctggggcacaagaaaagctccctatgtgtttctttctctttctttctttctttctttctttctttctttctttctttctttctttctttctttcttttttttttttttttaggtggagtctcgctctgttgccaggctggagtacagtggtgcgatcttggctcactgcaacctccgactcccaggttcaagtggttctcctccctcagcctcccaagtagctgggattacaggcacacaccaccacacctggctaattttttttttgtatttttagtagaggcggggtttcaacatgttggccaggctggtctcgaactcctgacttcaggtgatccgcccaccttggcctcccaaagtgctgggattagaggtgcgaatcactgtgctcggcctatatgtatttcttgctattgctgtttttaatgtttattttatttacttatttttttaagaaacaggagttttccctgtcatccaggctggagtgcaatggcacaatcacagctcgctgcagtcttgaactcccgggctcaggtgatccttacacctctttctctccagtggttgagactacaggctcctaccaccacgccctgctaatctgtgtaatttttgtagaaatagggtatctctctattgcccaggctggtcttgaattcttgggctcaagtgagcctctcatctcagcctcgaaaaatgttgggattataggtgtgagccaccgtgcctgacccacagcacttactattaattgaaattatttacacttttttgttgttgttgttgattctctgctcctccttattagaatatactgggttttgttttgttttgttttgttttgagacagagacttgctctgtttcccaggctggagtgcagtggtgtgatctcagctcaccgcaacctcctcctcctctcaggttcaagcgattctcatgcctcagcctcccaagcatctgggactacaggcatgcacc

SEQ ID NO: 1560002 - DNA, 4001 bp, Homo sapiens
aacagtgcctggcacattgtaggcactcaatatttattgaatacatggatgagttcttcctcccccatcttcccctgccctccactccccagctccaccttccacctgcccttacctgccaggggctctccccccactggaagcccgccctccagggctcccccaaggacctcatagggagccaggggggcaggggccggggggagtttcccatagtctacgagccatcccagcccactagctgggagcagggccctgtccagctccagccccagggtcgccaggagtgacatggctgtagcacaggtgctgggcactgatggcaacaggagaggctgcaccagcagctggcacgaggctctggaggatgctcaggtgggcgaagacaggcaccaaggcgaaagtggaagacctacacgcgtgagacaagagtgggtgtggtcaggacagcgtcatccaccggccaaaatcaaggggaagccaagccacacccccaggcacgtccatgaggctcctccctcccccttccaaccaccgtttagaacactaagcctcagcctctccgaattctaaatttgccctttctttacccaaatctctgagccccacccactcccaagggaatttctttaggtcctaaagtaggaccgatgccccaccccttcccccaatacagaaaaaaaaaacctaaaggtctcccaggggaattaccttaggcccctcccatccacctcagaatatttcgcctcaaggaaaaactcaatcccagggacattttcttccagccacgccccttcctctaaaatatttccttttggccccactgccttcctagcttccatcccaaaccagttcccaggggaactgccccaggccgcagcccttcagcaatgttatccactcaaatcccactcctcgctctgccgctgcccctccaagccccgcccctcattgtttatttagctccgcccctcccccgattccccagaggccccgcctctttgtcacatcgaaaccccacccctcaactaacggttggtttagccccgccccttctcacaatgtgcttccgaaatcccacccatcgtgacgacagtggttctatccccacccacttagagggttgcctctgggtcccgccttctgccctgtcaatctaagccagtccccgcctcagcaggtgcctggtttaaaaggaaggaagctgggctgtgagccagagcaacgtggggcagggagggtggaggagggtagagggggcacgcggagaacggctacccgaacgccacccgtccacacgcggctctgcgccgagggccaaggcgcatgctacgtcgcccgagcggtccaattgcctttacacctccgccctcttggggatcaatgcgcatgtgcggccattcagggtccgcagctctttcactacggggcactggtgggctactgcgcaggaacaaccaagcacgaagaatcgtttagaaaaaaaaaaaacacaccctcccctggagtgctcaggcccagctgcacgcgggctgacaaacatcgagtctagaactctcccacccggccccgggcccagtgcgcatgcgcagccgcgcgccttcggcccaccgtactacttctgcgcctgcgcgaccgtgattccccgctcgcgactccccaccccccagggctccctaaagagggccacgagctgcgaaagggcgggaaaggcagttggagaagaggtaagcggttactcactccatggctgcagcaaggagaggcggcggcggcctcggctgaagaaagaaggtgggagcggagagcgcaggcgtggtgagcgcggagacgggccgggggcacaaaggggtcgaggctacagagccatggccggggctacgcaggcagaggcggcgacactgtagtgagaagagactgtgatccgaggacagggaatgaggcggccccggggactggggacagatatatactgggtggcggagcacggccctcccggatccttccgcgccccgccctcgcgcggccccaaccgggaggcagccgggtcccctcctcctggggatcaggggatccgagcctttccttcccactcctagggtccgggaccctcctccctctcagctggggatccgacctcttccctctgagccggggatccagccctctccttgtggctccggggtctggtttcctcctcctgactctaagctctggtttctttctctttctgcctctgaggtctgggcctgcttcctcctgtgattttgaggatccagcctcattctcttcccgcagacctgcaccagttcatttctctttccctttccttgcttgcagaatttcctgccagtcacttttcacttcttcatcccccagctgctgactctgagaaaccctcgtgggttagagtccagcatgagtcacagcactctcccaaatacagacctgccaggatggcctcgggcaaataacttaagttctcttacttcatttccctatctgtaaaataagaaaaatcaactcgcctggtgggtttatgagactcaaataagacgatgtctggcaagccttatgcacagagctcaactcatacattcctgttcaactgttttttttttttgagacggagtctctccgtctctgtcgcccaggctggagtgcagtggcgcgatctcggctcactgcaaactccgcctcccaggttcacgccattctcctgcctcagcctcccgagtagctgggactacaggcgcccgccaccacgcccggctaattttttgtatttttagtagagacggggtttcactgtgttagccaggatggtctcaatttcctggcctcgtgatccgcccgcctcggcctcccaaagtgctgggattacaggcgtgagccatcgctcccggcctcagcatattttattaataggaactctggggcccagtctcatttcttccttaccacttgtaagagccgcagacgttggactgtccaacacctgctgtcattcttctgtctccctcatccctctaaagtgtctgtttccagctatcctcatcttccattccaaatgatgggtgcccaggccccatcccctggcagggattcagacatcgaggccccagctgcgtccttttctccatcccttgcccttggcttcctttcaaaccgtccttcagcttccactggataggaactatctcccaaccctgccaaaaatggaagatctccgttttcgtttagtcacagggtagccatcttgccccttctcatgcactgggccctcctccaccagccgaggtggatgtccgtcttttctctgttgcagaaacccaccttgtcccatccacatcaggacatcccagctggagttcaaccttcatcccttctgtggcagttaggagactgaatcaaggtccagagaaggtggaggaatcctgatactgagcggtacacacaagcttctttctccttccttacctgttgcgggcaggaagtccttcttgggatctgaccaccttcccttagagcacttactgtccactctgccagtttttgagcacttgccctatattttcttgggcctataggggctgtgttatcactgaggcagtatacagagtagcagctaagagcatagactgagcttgtcccacccgtgggcctgcatgcggcctagaacagctttgaatgcagcctaacacaaatttgtaaaccttaccaaaacatgcgaattttttgcgatttttttttaagttcatcagctatcaatagtgtatgttatgtgtggcctaagacaattcttcaatgtggccccaggaagccaaattttatacatacctggcatagactctggagccagattatatgagttcaaaacttgactgcacccctcttactagctgtgtgaccctggccatttcccttccctgtgcctcagtttcccctgtggtacgaagtggcattaagaatacctacctctggaccaggcacggtggctc

SEQ ID NO: 1560003 - DNA, 4001 bp, Homo sapiens
gtcaaccaaccaaccaaccaaccaaccaatgaactagtcgaccaatcaatcagggaatcggtcaaccaaccaaataaatcagtcaaccaaccaatcaacccattaatcaaccaatgaaccagttaaccaaaacccaacaaattagccaatgaaagaatcagtcttaacccataagagggtccaggagaaaaaaaaaattaaaaaagaaaaaaagaaccagccaaccaaccaatgactcaagcaacagtcaaccaagcatttcttcaaccattccaacatctcctttaccgagtactctgtatctgtggtgtctctattctctctttttaaaaggcaaactagatcacattacacacacagatacacacgcacatatgccttgtttcatctttactcattaattattgaaaacccactatgtgccaagcatttgggatacagtaatgaatgaaatgattcctgcctcctgagggcttctgcatatacagttccctccaactaaaatgctcttcccttgggtgttttcctcattccttccctactttttttttattttaagggatagggtttcactctgttgcccaggctgcagtgcagtggcatcatcttggctcactgcagcctagacctcccaggctcaagcgatcctcccacctcagcctcccaagtagctgtgactacaagcgtgagccaccatgcctggctaattttttttttcctatagatatgaggtctcgctatgttgcccacgtcctgaactcctggactaaagcaattctccccgcttggcctcccaaagtgctgggattacaggccatcatgcctggcttccttcccatcatttatgcctcagtcaacatgttacctacttggagaaggttttctggctacccattctatattaggtcccctttgtcattttgtagctcagctgctaggtgtttttgacttattccaatacactctcatttaatttatctctggtctactccccacagtgtgagctgctggaaggcacagaccatgttcttcttgttcccagccgtatcctcagcacctaaaacagtgcctggcacattgtaggcactcaatatttattgaatacatggatgagttcttcctcccccatcttcccctgccctccactccccagctccaccttccacctgcccttacctgccaggggctctccccccactggaagcccgccctccagggctcccccaaggacctcatagggagccaggggggcaggggccggggggagtttcccatagtctacgagccatcccagcccactagctgggagcagggccctgtccagctccagccccagggtcgccaggagtgacatggctgtagcacaggtgctgggcactgatggcaacaggagaggctgcaccagcagctggcacgaggctctggaggatgctcaggtgggcgaagacaggcaccaaggcgaaagtggaagacctacacgcgtgagacaagagtgggtgtggtcaggacagcgtcatccaccggccaaaatcaaggggaagccaagccacacccccaggcacgtccatgaggctcctccctcccccttccaaccaccgtttagaacactaagcctcagcctctccgaattctaaatttgccctttctttacccaaatctctgagccccacccactcccaagggaatttctttaggtcctaaagtaggaccgatgccccaccccttcccccaatacagaaaaaaaaaacctaaaggtctcccaggggaattaccttaggcccctcccatccacctcagaatatttcgcctcaaggaaaaactcaatcccagggacattttcttccagccacgccccttcctctaaaatatttccttttggccccactgccttcctagcttccatcccaaaccagttcccaggggaactgccccaggccgcagcccttcagcaatgttatccactcaaatcccactcctcgctctgccgctgcccctccaagccccgcccctcattgtttatttagctccgcccctcccccgattccccagaggccccgcctctttgtcacatcgaaaccccacccctcaactaacggttggtttagccccgccccttctcacaatgtgcttccgaaatcccacccatcgtgacgacagtggttctatccccacccacttagagggttgcctctgggtcccgccttctgccctgtcaatctaagccagtccccgcctcagcaggtgcctggtttaaaaggaaggaagctgggctgtgagccagagcaacgtggggcagggagggtggaggagggtagagggggcacgcggagaacggctacccgaacgccacccgtccacacgcggctctgcgccgagggccaaggcgcatgctacgtcgcccgagcggtccaattgcctttacacctccgccctcttggggatcaatgcgcatgtgcggccattcagggtccgcagctctttcactacggggcactggtgggctactgcgcaggaacaaccaagcacgaagaatcgtttagaaaaaaaaaaaacacaccctcccctggagtgctcaggcccagctgcacgcgggctgacaaacatcgagtctagaactctcccacccggccccgggcccagtgcgcatgcgcagccgcgcgccttcggcccaccgtactacttctgcgcctgcgcgaccgtgattccccgctcgcgactccccaccccccagggctccctaaagagggccacgagctgcgaaagggcgggaaaggcagttggagaagaggtaagcggttactcactccatggctgcagcaaggagaggcggcggcggcctcggctgaagaaagaaggtgggagcggagagcgcaggcgtggtgagcgcggagacgggccgggggcacaaaggggtcgaggctacagagccatggccggggctacgcaggcagaggcggcgacactgtagtgagaagagactgtgatccgaggacagggaatgaggcggccccggggactggggacagatatatactgggtggcggagcacggccctcccggatccttccgcgccccgccctcgcgcggccccaaccgggaggcagccgggtcccctcctcctggggatcaggggatccgagcctttccttcccactcctagggtccgggaccctcctccctctcagctggggatccgacctcttccctctgagccggggatccagccctctccttgtggctccggggtctggtttcctcctcctgactctaagctctggtttctttctctttctgcctctgaggtctgggcctgcttcctcctgtgattttgaggatccagcctcattctcttcccgcagacctgcaccagttcatttctctttccctttccttgcttgcagaatttcctgccagtcacttttcacttcttcatcccccagctgctgactctgagaaaccctcgtgggttagagtccagcatgagtcacagcactctcccaaatacagacctgccaggatggcctcgggcaaataacttaagttctcttacttcatttccctatctgtaaaataagaaaaatcaactcgcctggtgggtttatgagactcaaataagacgatgtctggcaagccttatgcacagagctcaactcatacattcctgttcaactgttttttttttttgagacggagtctctccgtctctgtcgcccaggctggagtgcagtggcgcgatctcggctcactgcaaactccgcctcccaggttcacgccattctcctgcctcagcctcccgagtagctgggactacaggcgcccgccaccacgcccggctaattttttgtatttttagtagagacggggtttcactgtgttagccaggatggtctcaatttcctggcctcgtgatccgcccgcctcggcctcccaaagtgctgggattacaggcgtgagccatcgctcccggcctcagcatattttattaataggaactctggggc

SEQ ID NO: 1560004 - DNA, 4001 bp, Homo sapiens
tcaggacagcgtcatccaccggccaaaatcaaggggaagccaagccacacccccaggcacgtccatgaggctcctccctcccccttccaaccaccgtttagaacactaagcctcagcctctccgaattctaaatttgccctttctttacccaaatctctgagccccacccactcccaagggaatttctttaggtcctaaagtaggaccgatgccccaccccttcccccaatacagaaaaaaaaaacctaaaggtctcccaggggaattaccttaggcccctcccatccacctcagaatatttcgcctcaaggaaaaactcaatcccagggacattttcttccagccacgccccttcctctaaaatatttccttttggccccactgccttcctagcttccatcccaaaccagttcccaggggaactgccccaggccgcagcccttcagcaatgttatccactcaaatcccactcctcgctctgccgctgcccctccaagccccgcccctcattgtttatttagctccgcccctcccccgattccccagaggccccgcctctttgtcacatcgaaaccccacccctcaactaacggttggtttagccccgccccttctcacaatgtgcttccgaaatcccacccatcgtgacgacagtggttctatccccacccacttagagggttgcctctgggtcccgccttctgccctgtcaatctaagccagtccccgcctcagcaggtgcctggtttaaaaggaaggaagctgggctgtgagccagagcaacgtggggcagggagggtggaggagggtagagggggcacgcggagaacggctacccgaacgccacccgtccacacgcggctctgcgccgagggccaaggcgcatgctacgtcgcccgagcggtccaattgcctttacacctccgccctcttggggatcaatgcgcatgtgcggccattcagggtccgcagctctttcactacggggcactggtgggctactgcgcaggaacaaccaagcacgaagaatcgtttagaaaaaaaaaaaacacaccctcccctggagtgctcaggcccagctgcacgcgggctgacaaacatcgagtctagaactctcccacccggccccgggcccagtgcgcatgcgcagccgcgcgccttcggcccaccgtactacttctgcgcctgcgcgaccgtgattccccgctcgcgactccccaccccccagggctccctaaagagggccacgagctgcgaaagggcgggaaaggcagttggagaagaggtaagcggttactcactccatggctgcagcaaggagaggcggcggcggcctcggctgaagaaagaaggtgggagcggagagcgcaggcgtggtgagcgcggagacgggccgggggcacaaaggggtcgaggctacagagccatggccggggctacgcaggcagaggcggcgacactgtagtgagaagagactgtgatccgaggacagggaatgaggcggccccggggactggggacagatatatactgggtggcggagcacggccctcccggatccttccgcgccccgccctcgcgcggccccaaccgggaggcagccgggtcccctcctcctggggatcaggggatccgagcctttccttcccactcctagggtccgggaccctcctccctctcagctggggatccgacctcttccctctgagccggggatccagccctctccttgtggctccggggtctggtttcctcctcctgactctaagctctggtttctttctctttctgcctctgaggtctgggcctgcttcctcctgtgattttgaggatccagcctcattctcttcccgcagacctgcaccagttcatttctctttccctttccttgcttgcagaatttcctgccagtcacttttcacttcttcatcccccagctgctgactctgagaaaccctcgtgggttagagtccagcatgagtcacagcactctcccaaatacagacctgccaggatggcctcgggcaaataacttaagttctcttacttcatttccctatctgtaaaataagaaaaatcaactcgcctggtgggtttatgagactcaaataagacgatgtctggcaagccttatgcacagagctcaactcatacattcctgttcaactgttttttttttttgagacggagtctctccgtctctgtcgcccaggctggagtgcagtggcgcgatctcggctcactgcaaactccgcctcccaggttcacgccattctcctgcctcagcctcccgagtagctgggactacaggcgcccgccaccacgcccggctaattttttgtatttttagtagagacggggtttcactgtgttagccaggatggtctcaatttcctggcctcgtgatccgcccgcctcggcctcccaaagtgctgggattacaggcgtgagccatcgctcccggcctcagcatattttattaataggaactctggggcccagtctcatttcttccttaccacttgtaagagccgcagacgttggactgtccaacacctgctgtcattcttctgtctccctcatccctctaaagtgtctgtttccagctatcctcatcttccattccaaatgatgggtgcccaggccccatcccctggcagggattcagacatcgaggccccagctgcgtccttttctccatcccttgcccttggcttcctttcaaaccgtccttcagcttccactggataggaactatctcccaaccctgccaaaaatggaagatctccgttttcgtttagtcacagggtagccatcttgccccttctcatgcactgggccctcctccaccagccgaggtggatgtccgtcttttctctgttgcagaaacccaccttgtcccatccacatcaggacatcccagctggagttcaaccttcatcccttctgtggcagttaggagactgaatcaaggtccagagaaggtggaggaatcctgatactgagcggtacacacaagcttctttctccttccttacctgttgcgggcaggaagtccttcttgggatctgaccaccttcccttagagcacttactgtccactctgccagtttttgagcacttgccctatattttcttgggcctataggggctgtgttatcactgaggcagtatacagagtagcagctaagagcatagactgagcttgtcccacccgtgggcctgcatgcggcctagaacagctttgaatgcagcctaacacaaatttgtaaaccttaccaaaacatgcgaattttttgcgatttttttttaagttcatcagctatcaatagtgtatgttatgtgtggcctaagacaattcttcaatgtggccccaggaagccaaattttatacatacctggcatagactctggagccagattatatgagttcaaaacttgactgcacccctcttactagctgtgtgaccctggccatttcccttccctgtgcctcagtttcccctgtggtacgaagtggcattaagaatacctacctctggaccaggcacggtggctcatgcctgtagtcccaccaccctgggaggctgaggtgggcagattgcttgatctcaggaattcgagaccagcctgggcaacatggtgaaaccctgtctctaccaaaaatacaaaaaaatagtcgggtgtggtggtttgcacctgtggtcccagctactcatgaggctaaggcaggaggatcacttgaaccctggggtggggcggaggttgcagtaagccgagattgtgccaccacactgcagcctgggtgacagagtgagacctcgtctcaaaaaaaaaaaaaaaaaagtacctacttcttagggctgttacaaggattaaatgagttaatccgtgtcgagcagttagactaacgcctgggacacagtaggtgctgcataaaagtggttattgttattgctgtaattaaggtggatgtgttctcattccattgctgtataga

SEQ ID NO: 1560005 - DNA, 4001 bp, Homo sapiens
gcccagccaaaactctttttttttttttgagactgagtctcgctctgccacccaggctggagtgcagtggcacggatctcggctcactgcaacctccgcctccccggttcaagcaattctctgctttaccttgccaaattacaggtgcctgccaccacacccagctaatttttgtatttttagtagagatggggtttcaccatcttggccaggctggtcttgaactcctgacctcatgatccaccagcctcagcctcccaaagtgctgggattacaggcatgagccaccgtgcctggtgaaacttttttttatttttatttttgacacagagtctccctctgttgcccaggctggagtgcagtggtgcgatcttggcttgctgtaacctccgcctcctgggttcaagagattctcccacctcagcctcgggagtagctgggattacaggcgtgtgccaccacaaccggctaatttttgtatttttagtagagatggggtttcatcatattggccaggctggtcttgaactcctgaccgcaagggatccatccgcctcagcctcccaaagtgctaggattacaggcatgagccaccgtttccaaccccggctgaaactcttataaacaactctcatctctccaaaacttacttgacacacaattctaacgtgactttgaactcttagttggtaagtaattctaatactgctgatatggcagttgaccctgtactcctagtgcaccccttcccccctatggctcacctctgggcaggaaatgcagcagaaggccctgtgccagcatcatctggccgctgcgtaacatgcacccccagccacagtccgaggtcaggcagcccccaggaaggggcgggaagtcccggcggtatgtgagccacaggcgggacacaaagtcccgctggaaacgctgtatgtcacctacaagagcgggtctgtcagctgccaccagggacactccggcgggcgtggagaggcctcccccagccctggtcccaaccaccagctcaccctcgccctcgaaacggtagcggcggccacagaggtggatgctggagatcttgctaaagctggtccggcttttaaccacccaacctggggagacgtaggggcagcgcccagcgagatgaagcacttgcatgacagcaacagcgcttccattcccccatctgtgaaatgggcacgatcctagttcctatctccggggtggctccggggattccgtcggaggtggggcccccagtgacagctacaggagtgtccaccatcaattcaggatgaaggaaggtagttctgattattgtacccattttacagagaggggcaaaaacggaggcgccaggaagcaaaggatcttgcccaaggtcacacaggggaatgggcggggcttgaaaacactattggacctgccacaggtccaccctgggccgggcagggaggggacccacaggtgactcaggacgggaacaagggtgggataactggcaggaccggggtctggttttcctcaacggcccccgacacccccacgatctccgggccccctcctcaccgtacttgacgttgttccaggctgtcaggaacttggccttgaacttgtccacttcgtccggctcactcgggccagccccgggagagccaagagcggggccgctggctccggaaggccccaggccgttggggtctgggcctctgggaccccgcggcctgcgggcctcgggccggcggcgcgcgtcctccgggctgctgctccggtactgcgcggcggccggcgacactgagttcatggacgcgccgggagggcggaccgagggcccaggtggggggctgcggccgctgccccccaagggcgacccgcagccggttcacggggcccggggaaggcgctactcggcccccgtccccagggtaccgggccaggcaacagccgccgccgctgctaccgcagccatcgccatcttagcgggccaggaccccggatgacggtgggcgtggccaagccagacgccccgccccgccctctccccgcccagccgcctttcctgccccgatcccgggtcgccaggcggggacctcaaaccccgacgccttcccgcggcctccccccgccctccttatcacaccgccaggagcgcgacagccccttcaggcccttatcggaggcagcagagctggggaacccctgcccctggccccgcccctagtcctgccccccagggcccaggactgacctcctggcaggcgcccaggtgagactgactgcgcacctgcagcgcccgccccgcctcccgagtgcacctgcgcgggctgccgacccagaacccgccctggcctgggaccaaatcgactagtgtgacctccggggcaagccacgcctctctgtgcctcagtttcctcatgtgcaaaatagggctggaatacacgcaacaacatagacgaatcttcatgagaattatgctcagggaaaaaaaatccaggggtaggcaggcgcgggagggagggatgaatgaagtgctccaggaaagtttttttcagtgtttgttttgtcgagacagcatctggctctgttgtccagactggagtgcagtggcgctttcatagctcactgcagcctccaactctgatcctccaacctcagcctccagagtagctgagaccgcagacaggagccaccatgcctggttaattttttaaattttatttgtagataaggggtctcgctatgttgtctaggctggtctcaaactcctggcttcatgagatcctcccgcctcagcctcccaaatgctgggattacaggcgtgagccaccacctcaggcaggaagacattttttggagctgtggataaattcagtatcttaactgtaatagtggcttcacaggtgtgaaaactcatcagattgtacgcttaaaatttgcatggttttgtatatgtctattatacctcaataaggctgaaaaaaaacctctttgttttaaaaagtaatcagttaactttttatagagacaagttctctctatgttgcccaggctggcctgaaactccttagctcaagtgatcctcctgcctcagcctcccaagtagctgagactacaggaaaatattttattttattttattttttaattttttttctctaaccttgcgaggcccaaacagattttggttgttgttgttgagacagggtcttgctctgtcatccagactacagtgcagtggcctgatcatggctcactgcagtctcaactgccgaggcttaagcaagtctcctgcctcagccacctgagtagctaggactataggcacatgccaccacccctggctaatttttttttttttttttgagacggagtctcgttctgttgcccaggttggagtgcaatggcgcgatctcgactcactgcaagctctgtctcccaggttcacaccattctcttgcctcagcctcccgagtagctgggactacaggcgcccgccaccacgcctggctgattttttgtatttttagtagagacgaggtttcatcgtgttagccaggatggtctcgatctcctgacctcgtgatccgcccacctcggcctcccaaagtgctgggattacaggcgtgggccaccgtgcctggccacccctggctaatttttaaaaatttttctgtagagatagagtctcccagtgttgctcaggctagtcttgaactcctgggctgaaacgattagcctcagcctcccaaagttctaggatgacagacatgagccactgcacctggccagggacaatttttattttttattttattttcatttatttatgtatttattttgagatggagtttcgctcttgttgcccaggctggagtgcactagtgcgatcttggctcactgcaaccaccacctctcaggttcaagcaattctgctgcctcagcctcctgagtagctgggattacgggcgcacaccaccacgcccagctaatttttgtatttt

SEQ ID NO: 1560006 - DNA, 4001 bp, Homo sapiens
ccctggaccccgtgaaccgccatccattcctctgctgctctgctagaccgagctgcatggagacgagctgcatggagatggggggagcacaatgatgacccgcagaaacaaagcgccaccgcacgggtggttcatgggcctccaaagcaggcagcaaataacaacaatcacataactacaaacgtgacgtcacggaagaaaggtacaagaggctatacgctgtgatggccccagggcgggcactctgcagatatcatctccgcttctcaagatggcacccagtagttgttagttacggttctcagtttacagaagggggaaactgaaactcagagagcagaagcggccctttctgagatctgaatcaaacccagatccacctctcctggctgatggctgttcagctcctcccacttctccatccctggagaggaagttaagagctaagctgcttagctgcaggtcaaaaggcagctgaagtttgagcggtgccacagtccccttaacccctcctttattttgtccctcattggtgtctttcattgtactacctcaaagctaccacgttgagctcctcccctgggatagataagtctttttgaaggacagaacaggttgtctctcaggagaggagaatgaggattctacccacattcagagccagccagggtggggggcttctgtctttctgtagcccttgatgctgttcccttttcctcttcttgaggcaaacacactcctggaatcagaggggaagcttcctgatatacctcagtgtccatggctccaaacctgctggtgtcacctgaggcaggcccagagagagacgacacagtcactgcttcaggcccagggaagctcacagtcaccaactcctccgacgacacttggtcactcagaactctaaactgtgggtcaggagcgcgaccttgcttgctgttgtatccccgacagaactcagtatcaccaccctcattttgcggaaagacatcatgtaaatgactcgctcataaacacctctgcctctcttcaacactgtaattaactgcatttcatgctcctttccatcacagtatggaagaccactaagcactggacagcaagacttggttcagtctaagaaccaactaagcttcatagatgggggaaacctatcccagtgatctcgccttacactttgaaaaccaaggtaggagacagatgagatggaaggtagggccgtttccagaacaagagtagtcgctaatatgggaactagtataaacaactcctacctgacctgggcgacgtatgctgggccctgcgctaagccttttacaagtattacatcactgaatctaaatgaccataacagggaggacttcagaaaaaggaaataacccgcaccaggcatgcacagcaagtcagcagtggggtcatgattaagcctgcgccaaagtgtagagggtgcccctgggaatccaggccaggcagatgagtggcccaggtcgcgatggtgaccgacaggaaggccgcagctgggacccacggcgaggctcgaccgtgctgggggtcgggctcgcgtgtacacacttaccggggtgcaggtgagcgcgcaatgcgcgtgcacagaccaatgccccgagaggacagtgagcgcgtgcgcgaggcagatggtggcaagcacgagcagcgcagcttcggggatctgcacccaactgctgccccagccccagcagccagcggctgcggcacccaaccaggccgggtaaagcagcccggcgaatggcagcaccgtgaggcgccgcaacagcgccaaccgccggtacggccacacggcagccaccagctcgtcaccgttcgctatgagcgccggcccggcggcaaggagcgcgcgcggctgcggcccgggcttgggctgcccgtcaggccggaccccgcaaggccgggccccgcagggcaccgcgttgcccaccgccgccgctgccgccatctttcctagcgccgcgctcacttccgggcagaggaacgcctcacttccgaagttttacttccggtaagccctgagcgccgccatggcagcctggactaggaagagccagggcaacagaacaggctggccccggcagggactacttcgggtgccgccatgacaggctgtggccggaagaagaggctgggcgtcgccatgacagagagggactggaagacctaacggtgcctgcctccgctgccacgccggactgagaccggaaaagacaaggccggcaaggcgggcttgggcgccaccatgacaacctgaaccaaaaaaagcgagccctcctccttgactacaccagcaccacctgtcaccaggggcgaagcctggaccctgcggaggcggggtcgggagcttcggagttcaggaggcggggcccggtgcggggggcggggcttgtgaggggcggggtcggggaccgccccggaacacaaccacaccggacaagagccttaatgtgatagataagaattacaaatactagccgggcgcggtggctcacgcctgtaatcccaacactttgggaggcgaggcgggtggatcacctgagatcaggagttcaagacccaacatggtgaaaccacgtctctactaaaaatacaaaaattagccgggcgtggtggcacatgcctgtaatcccagctactcgggaggatgaggcaggagaattgcttgagcccgggagacggaggttgcagtgagccaagattgctccactgcacttcagcctggccaacagagcaagactgtctcaaaaaaaaaaaaaagaaaaatgaattacaaaaaccactttaggccgggcgcggtggctcacgcctgtaatcccagcactttgggaggccgaggtcaggagatcgagaccatcctggctaacgcggtgaaaccccgtctccactaaaaatacaaaaaaaaaaaaaaaattctccgggcgtggtggcgggcgcctgtagtcccagctactccggagcctgaggcagaatggcgcgaactggagaggcagagcttgcagtgagcggagattgtgccactgccctccagcctgggcgacagagcgagactctgtctccaaaaaaaaaaaaaaaaaaaaaaagaaattaccactttaacataaaaaatgaaaaactggtgtttacttgaaattatatacttctaggccgggcgcggtggctcacccctgtaattccagcactttgggaggccgaggcgggcggatcacgagttcaggagatcgagaccgtcctggctaacacagtgaaaccccgtctctactaaaaatacaaaaaattagccgggcgtggttgcaggcgcctgtagtcccagctactcgggaggctgaggcaggagaatggcctgaacctgggaggcggagcttgcagtgagccgagatcgcgccactgcactccagcctgggcgacagagcgagactctgtctgaaaaaaaaaaaaaaaagaaattatatagttctatattattaactgtactgttgcataaatgctatttgaacaaaaccacaataggactacttaacagtaccaattagtaggattaaacagtatgtgtgacaaacagtaactattttatgtttctttttgtcctctgatacagcaaatttatttaaacttaaaatttattggatatttaaattttgtagcttatattgttgcatattctttttttaatttttcgagatgaagtctcactctgtcgcccaggctggagtgcagtggcgcgatgtccgctcactgcaaactccactttccgagttcaatcgattctcccatttcagcctcccaagtaactgggattacaggcgcatgccaccgctccggctaatttttgtacttttttttttagacggagtctcactctgttgcccaggctggagtgcggtggtgcgatctcagctcactgcaacctacgcctcctgggttccagcggttctcctgcctcagcctcccgggtagctgggactacaggcgcgtgc

SEQ ID NO: 1560007 - DNA, 4001 bp, Homo sapiens
agtgccggggtggtctcagctttgcccgatggggtagacccaggatggagagacatggagagatggagagatgtggagctacaaaggcctggggtcaagtcctgtgcaggaggccaggagaggggtgagatgggggtcaggagagagagagggagaaaatcagctgcccacccagaaaccttagttgaaggctgggagctgatgctcggggccccataaatgctaagggctgggccggactctcagatactgagagaggctggggtcctggatccctgggtctgagggaggaggggcaggggtctggacccctgggtctgagggaggaaggactgggagcctggaatcctgggtctgagggaggaggggccagggcctggactcctgggtctgagggaggaggggctggggctggacccttgggtctgagggaggaggggctgggcctggacccctgggtctgagggaggaggggctggggcctggattcctggtctgagggaagaggggctggggcctggactcctggatctgagggaggaggggctggggcctggactcctggatctgagggaggaggggctggggcctggactcctggtctgagggaggaggggctggggcctggactcctggtctgagggaagaggggctggggcctggactcctggatctgagggaggaggggctggggcctggactcctggtctgagggaggagggaccgggaccctgggactcctggctcaccctggccctggccttggctcctgcttgcccttgacacagccagacccccttggggagcaggctcccatctgttggagtgcacagctgaggctttcccagtcaaggcaggaggcccagatgggcgcgctgcggggtgggagcacctccaagggtggggaccatgcctgtctcgctgtggccgcctctgcagctccttgccattttccatgctgtccgcctctccctgatctggtgccagctcccgcagcctctgcgcctgggccggcctcccttccccctcgcaggggacctggcccacatctctgaccatccctcccttgacctccccctttgccctctgcctcctcttcctgtccctcaggctgactgtggttgccgctagataggaaatatctgtccttgtgtctcttcctctgagcctcagtttctcattttctctctcaatgtctctccatgtgtctcagccatgtctctctgcttgtctctgtctctttgtctctatgtccatgtctctttctctgtctctttcagagcatctctgtctttccatgtgtctctgtctttccttcccatgtctaagctgccttcatttctcctctcgtccccactccgtttcctaagaccacctccctctaacttccttctctagggcttttagcatcagtcttctcccaatccatccacagcttccctccctccatcccacttacctgacagccatcactgactacccctttctcccttctctcccctagtcctgccccaacccaatcctccttcccagccccccggcccaccctgccccaccccacagatctgcagccccatcccccacctccatccctgggcccatcagcctttatccgccatctttctccccagccctcctattctccctccactggcctctcccgccctcttcatcccacctacccccacccaccccctcctctcctgattccccctcccttcagccccgccccagacacacagggaggaatccagggctgcagcaagggtcaggtggtcagccagggagggaggcggcatctgctggagagactcacagacagacaaggacacacggacacagaggcaaggacacagccaggcatgcacgctccccactacacagttgcacacgcacaccctcagctgtgcactcagtctccccaccgtggctctcctgttcctctcctcctcccagcctcccatgcctgctcccctacatgaggggctgcacacacacacactgcagccccaggctgcgacactgcggagcctgcacacacacacacacacacacacacacacacacacacacacacacacactgcggagtccccccatccaggcctggaaggagaaagagaggtcatctggtgtccatcccacaacgtggacctatccgcaccctgccagggaagcaggggggcctcaataaccccagacgcactaacacgagctctcacagacacacccagacgcgatcgcagactttcagacaccacggggcccacacactcgctgccagggcctgacagagccagcagctctcatacgcacatgcaactgtgcacatgcaaccgcacaaggtcaggcggagatgctgagggctggcccacaacctcgcggatctccgcacacaaagccatgccaacgtgcgccacagaccccccgccgccccctgcggccccacgaccacatggattggctgggtcagccggctccccgggtctcgcaggcctggccccggagcgcaggggtcccggtgcccccgccccccgcgcacacccaatgtcaccggccccacaatgtcacacggaagcggcgcccagccggctcagcacctacccccatcttggcggctccgcggcgagagagccaggcgggcggggcggggacctcggggcgggctcaggctcaggcttgggctgggagcctctgcagcgcccgcgcctcggtaggtgcgcgcgtccgtccgtccgtccgttggtcccaccgcacagaggctgcggcggccgccgcctccgcctcctcatatgcccgcgtccgcgggaggggggcggcgctggccaatcaggggcgccgccgtgctgacggacggcccgcggccccgcccctggtactgcagctgtcctccccttgggctccgcaaagtggcggcgcggccgcgaagggggagcgctgcgggggtggggggattcccagagacctccgcaataggggacttggagaccccctcaatatggagtagggcctccaagaaggggcgctcagggaaagaaaaccccggaaatcctctcattgtgggggtgtgccatcaccgagaagggtacgctgggggagggggggcgggtagtgacacggggtgggagggaagcccggtgaatcactgcagtgtggcaccagggaccctggagacggcggggggtagtgctgttcagggagagggccctgcaggaggggaagttggaagggaacacaagagagcaagaaaggccttgcaattgaggaggggtgctggcgggaggagccctgagattccctcactgtgggtgcccccccactacgcctgagctatccaatgagccacaaccacacagggtacacgggagacacaacacggtggaggatggccccaggaggcccagaaaatgcccagcgtcacagttacacaggaccatcacactgatagcccagatgctggggacacgcacacaccacagggttgcactcatattccaccataggccagcatgtaccctcacacacacaacaccaccccaccacacacagagtctcaaacatagagtgaaacacacatagggcacacaccttacacacccatcacaccacaagagactcataatcacagccacaaagtgctgtgcggactaacaccgacactcagaaaatcgcagactcacacatcacacactctaccacacctgacctcccaccatctcacatagaaacccacatcgtgcaacccataaaccaacacacacctgcactcagcaccatcacacacgcacaggcctcacactgcctccagacacactacatcagcctttgtggacatcgttgcatgatcccacgatgtcgcacacatcctcacacacactgctccccagtgtgtttgggcatgagcaacggcccacagtgcaaagttgccaatgctaactgtgaatgacagacaaaaaggtgcacacacttacacatagcacaataattcaaacacaagtcacg

SEQ ID NO: 1560008 - DNA, 4001 bp, Homo sapiens
gctcccatctgttggagtgcacagctgaggctttcccagtcaaggcaggaggcccagatgggcgcgctgcggggtgggagcacctccaagggtggggaccatgcctgtctcgctgtggccgcctctgcagctccttgccattttccatgctgtccgcctctccctgatctggtgccagctcccgcagcctctgcgcctgggccggcctcccttccccctcgcaggggacctggcccacatctctgaccatccctcccttgacctccccctttgccctctgcctcctcttcctgtccctcaggctgactgtggttgccgctagataggaaatatctgtccttgtgtctcttcctctgagcctcagtttctcattttctctctcaatgtctctccatgtgtctcagccatgtctctctgcttgtctctgtctctttgtctctatgtccatgtctctttctctgtctctttcagagcatctctgtctttccatgtgtctctgtctttccttcccatgtctaagctgccttcatttctcctctcgtccccactccgtttcctaagaccacctccctctaacttccttctctagggcttttagcatcagtcttctcccaatccatccacagcttccctccctccatcccacttacctgacagccatcactgactacccctttctcccttctctcccctagtcctgccccaacccaatcctccttcccagccccccggcccaccctgccccaccccacagatctgcagccccatcccccacctccatccctgggcccatcagcctttatccgccatctttctccccagccctcctattctccctccactggcctctcccgccctcttcatcccacctacccccacccaccccctcctctcctgattccccctcccttcagccccgccccagacacacagggaggaatccagggctgcagcaagggtcaggtggtcagccagggagggaggcggcatctgctggagagactcacagacagacaaggacacacggacacagaggcaaggacacagccaggcatgcacgctccccactacacagttgcacacgcacaccctcagctgtgcactcagtctccccaccgtggctctcctgttcctctcctcctcccagcctcccatgcctgctcccctacatgaggggctgcacacacacacactgcagccccaggctgcgacactgcggagcctgcacacacacacacacacacacacacacacacacacacacacacacacactgcggagtccccccatccaggcctggaaggagaaagagaggtcatctggtgtccatcccacaacgtggacctatccgcaccctgccagggaagcaggggggcctcaataaccccagacgcactaacacgagctctcacagacacacccagacgcgatcgcagactttcagacaccacggggcccacacactcgctgccagggcctgacagagccagcagctctcatacgcacatgcaactgtgcacatgcaaccgcacaaggtcaggcggagatgctgagggctggcccacaacctcgcggatctccgcacacaaagccatgccaacgtgcgccacagaccccccgccgccccctgcggccccacgaccacatggattggctgggtcagccggctccccgggtctcgcaggcctggccccggagcgcaggggtcccggtgcccccgccccccgcgcacacccaatgtcaccggccccacaatgtcacacggaagcggcgcccagccggctcagcacctacccccatcttggcggctccgcggcgagagagccaggcgggcggggcggggacctcggggcgggctcaggctcaggcttgggctgggagcctctgcagcgcccgcgcctcggtaggtgcgcgcgtccgtccgtccgtccgttggtcccaccgcacagaggctgcggcggccgccgcctccgcctcctcatatgcccgcgtccgcgggaggggggcggcgctggccaatcaggggcgccgccgtgctgacggacggcccgcggccccgcccctggtactgcagctgtcctccccttgggctccgcaaagtggcggcgcggccgcgaagggggagcgctgcgggggtggggggattcccagagacctccgcaataggggacttggagaccccctcaatatggagtagggcctccaagaaggggcgctcagggaaagaaaaccccggaaatcctctcattgtgggggtgtgccatcaccgagaagggtacgctgggggagggggggcgggtagtgacacggggtgggagggaagcccggtgaatcactgcagtgtggcaccagggaccctggagacggcggggggtagtgctgttcagggagagggccctgcaggaggggaagttggaagggaacacaagagagcaagaaaggccttgcaattgaggaggggtgctggcgggaggagccctgagattccctcactgtgggtgcccccccactacgcctgagctatccaatgagccacaaccacacagggtacacgggagacacaacacggtggaggatggccccaggaggcccagaaaatgcccagcgtcacagttacacaggaccatcacactgatagcccagatgctggggacacgcacacaccacagggttgcactcatattccaccataggccagcatgtaccctcacacacacaacaccaccccaccacacacagagtctcaaacatagagtgaaacacacatagggcacacaccttacacacccatcacaccacaagagactcataatcacagccacaaagtgctgtgcggactaacaccgacactcagaaaatcgcagactcacacatcacacactctaccacacctgacctcccaccatctcacatagaaacccacatcgtgcaacccataaaccaacacacacctgcactcagcaccatcacacacgcacaggcctcacactgcctccagacacactacatcagcctttgtggacatcgttgcatgatcccacgatgtcgcacacatcctcacacacactgctccccagtgtgtttgggcatgagcaacggcccacagtgcaaagttgccaatgctaactgtgaatgacagacaaaaaggtgcacacacttacacatagcacaataattcaaacacaagtcacgcgacacccacacacctcccacacatacacacatcacgttattgcagcactatcgcagacatctttgttgcacctccaaacacaccccaacgccctcacccacatgacacacagagctcgtcacagtatatgtacacacacagatgcacagccggcacccacaccccaggcctgctgccgacacacaacaccccatcagccaccccactggagcccaagaagttgaggcctccccactcactccaacaccactttgttctatgaggaacaccccagactctccctggggatggtagaaggggaagagagagagagagagacagagagcatttgaccttgtagttttctcagaatgtgggtatcctctccacctatgggataggagatgtgggggacgcaggcaagggacagggagtgagcttggtgtatgagggtgggtgggtgaaggtcgaggacctggtgcagggaaatgtgtgaaaggctgaaggccagagagaggcacagaaacacagagattcagagccacagcatatggacagagacaaggccagagagtgaatggaggctttccccagtgcccagagccccatcccaatcctgtcctctgacccgtccccatctttctcgctgtcctttgttgccatggtaacagggagctgcttctgcagcaaaggaggttgggcctgcagactgggctgttgccatggagactgggaaagggggaggagccacatcttttaacccagatgcctcacccccagacgccccctccccaactctgccctcttcctaggggagggagagcctatc

SEQ ID NO: 1560009 - DNA, 4001 bp, Homo sapiens
cctgcacctccatttcctctctgtctctgtgcttctatgtctcatgttttgtgtctctctatgtgctgtgtcctgaggcttgggtccctgccctggtgtcctatgtctgagtcccagggtctcctattccccgtgcctcagtctgtcctgtgtctgcactgcatgtcctctgcttccaagtcccatctcttttttttttttttttttttttttttaagatgcagtctcgctctgtcgcccaggctggagtgcagtggcatggtcttggctcactgcaacatccacctcctgggttcaaatgattctcctgcctcagcctcccaagtaactgggattacaggtgcccgccaccatgtctggctaatttttgtaattttagtagagatggggttttgccatgttggccaggctggtctcgaactcctgacctcaggtgatctgcccgcctcggcctcccaaagtgctgggattacaggcatgggattacacgcccggcctccaaatcccatctcttacgtatcacattgccatactctttatgcccccacctatgtccccatacccaagattcaccccagtgtccctgtgtcctgtgtccttgggtctgccccatccatatcccaatgtccttcaccctccatgacccctgtcttgagactgcctttcgtgttcgtctatccccatccttctctgcccctcttgtcccaagtcccaggctcagtgtcttccatccccaggtccccatgtcctgagcctgtccccacaacatggctcacattgtcgtcggtggtgaggtccccctcactagcctggatggcaaaggcgatgaggcagatggcggcggcaacccacatgaggcactgcaggcccccggccagctgcctcgcgaacttgacgtactctggggtgccccgtggtggccgcagtgcgttgggcccatcccgcagcagcagctcagcagccaggctcgcagagaggccctgggacagaggggcagggcgaggcggtcctgggggctttcctccacatgcacaccccgtggaaagccccctgcttcagtttcccttctccagcttggtctgtcctgctccttctcatctctttgtctcttggttcctgcccccaccccatctctccctccctccttcatctctccctttgtctctctctcctcgctcccctttctatgtgtctctctcctgctgctctctccttatttgtctctgccttctctgtcttgctgtctcttttcagctactcctctctccgtctctgtgtgtcaccctttctctctaatgctttctcccttctctccctctccctctctctccctctctccatctccctccctctctcctcccctccctccatcctttcctctctccctccctccctctttccttttctgcctccctccctctctctatttctccatatcttcctctcttcatctctccctctctctccctctctccatctccctccttccatctccctctccctccctctctcctcctcccctttctgtacgctcccagtctccagctcaccttggtggcactggtctggtatttctgttccagctccgccactgacagctggtggtcgttctgtgtggtggggtggggcagggtgcttgctctgggctctcctggccccctccccgcccactgcctggttcccagcctaccctccagctcccgcccctccccagtcagagctcacaatctccatctccttcttcatgttctccagcttctccttcctcttgccacccccgccacccgccttcttcttcttgctcatcttggcagccatgtccccgccagggccaggacccagctccaccgagtagagctcatagttctcctgggaatggacaggatggagggagggagaactcagattccactgcaacccctgtccccactgcaccccggacccctgggccccactcacggccttccccatggtgcccggtgcctgtgctcccacccaacagagcctgggcccggaccagtcctgatatacccagggagggcggtggggtggagcagaaccgcccgaccacagctgattacaggctccttggggtgacctctaggcctgggcacctcaggcattccctcctgggctggcccccccctcccctgcccagatccccccatgtcaacctgccctgagatcagggagcccctgggaaccgctgcagcaacaagaagagcaaacataaggtgctcattatgcgctgggcattgtgctgacggcttccatgtgctaacttatttaaccttccaataaccctttgaggggacaagaccctttacagatggggaaactgaggcatggaggggttgagtcattctcctatggctccatcacaggctaggacataatggagtgagaaccagatcagctggctgcagagtgtcctctttcagtctaaatagcacgtgcctgatcaactggaagaggagggtgctcccacactctttttttttttctttttttttttgagatggagtgtcactctgacacccaggttggagtgcagtggtgcaatctcagctcgctgcaacctccgcctcccgggttcaagtgattctcctgcctcagcctcttgagtagctgggactacaggcacatgccaccacacccagctaatttttgtacttttagtagagacggggtttcaccaggttggccaggctggtctcgaactcctgacctcaggtgatccacccgccttggcctcccaaagtgctgggattacaggcgtgagccaccatgccctgccatgcttacaacactctctatggtggctgaatgtttactgaactctgactattcactatgggctgggtgtgctctgtgtgtcactcaaatggtttccttagcatctaacagcagccctgtaaagcaatattctcttcttagcccccatcagggactttgcagaagatttcaacgtctaagaattagggacagggttccagcccgggcttgaccccagggcttgaccccagagcctagctcttctatggcaccaccaatggaaaaacccaaacttcactgcagcagcaccacacacatgccaggctctgcacgtgtgacctcacgggtctttgcaaaaaaccctgtgcaggcagaactatcattcctgttgtgcagagggggaaactgaggctcacagggactcacatatccagctacagactttacagctctcaaccattccccgtccctaccctagatggggaaaccaaggtgcaacatggggaaaggatgtgtccaagggtcttggcttgatcttggtgttgggtgacagatgccaggaggcctggggactccctcctcatccctcaggtagggacctccatgggcagcagcagcgaggggctgggccagtggaatggtggggaccttggtatgttatggggtgagcgtgtctccaggagcaggtgagcgtgcgcctgataagataactgccctggcaatgtccttctctactggggcaggtcacctgggaaactcaaagctgttgggcagccagagctcctccccgcacccacacggctggtcatccccagcctgctagaagaaacctccaaagaagaggtggcgtggggccacatgctgtccttgtagtgaatctactcgctcactgggctcccatcagctctgagccatgtatgtcaaacagcttgtgtcaccccctgcttacaaccctccaaagccttcccttcccactcagaataaactctgcactccttcctgcaacatctggccctggtcacctgtcctgcctctgttgctgctaggtttccaggggcactgacctctctgctgcactttgcacagaccaaggtcgttcctgcttcaggaccttggtacttacagttccttctgcctgggcccccttccttagatgtctgcactggctttctcacctctttcaggtctcagctcaaatgtcacctcttcagagagtccattctgta

SEQ ID NO: 1560010 - DNA, 4001 bp, Homo sapiens
agtgaggcttagaactgctttttttcctgcacaaatgaccttcctcccctaatctgatcagccctcccaacatggttttttgaggggtttttttggcacagggtctcactcttgttgctcaggctgaagtgcagtggcatgatcttggctcactgcagccttgacttccccggctgaagcggtcctcttgcttcagcctcccgagtagctgggactacaggtgtgcaccactacaaccagctaattttttgtagtatgggatttcactatgttgcccaggctggtctcaaactcctgggctcaagagaccctcccaccccggccttccaaagtgctaggattacaggtgtgagccaccgcacccagcctcgcctggtcagtttctttttattttttgtagagacagggtctcactatgttgccaaggctagtctcaaactcctgggcttaagcgattctcccacttcagtctcccaaagtgctgagattacaggcatgaaccactgggcctgggtggttttacatctcttgcttcgaccatcctacattggttggtccagagccagtcataaaccggctgagagcagggtcccctctggttcgctttcatcaccggccagcccaggctcctcagtggacaaacctgctaaaactgtatttttcttatttgagatggagtttcactcttgttgcccaggctggagtgcagtggcacaatctcctcagcctcctgactagctgggactacaggcacccgccaccacgcctggctaattttttgtatttttagtagagacggggtttcaccgtgttagccaggatggtctcgatctcctgacctcgtgatccccccgcctcggcctcccaaagtgctgggattacaggcgggagccaccgcacccggccagttttctgtatttttagaagagacggggttacatcatgttggccaggctggtctccgaacttctgacctcaggtgatccacctgcctcggcctcccaaagtgctgggattacaggcttgagccaccgtgcccggcctaaaactattttttctcgcagcctcaactgagacggagactgacctgggatgtggagccccagcctggcctggccctgcagccctccaccggactcaccaaagtatttggaggtggtgccgtcctctgcatgcaccacgaccagccccggccgcaggacctgcagcgtgggcacgtgggccgccaggatgccgaaggctccggtcagcgtgggcacgtccacctgccggacgttggcaccgttgaagaacacctgcagacaacagcgtggggaatgatggcggggcaggccggccccgcgcccaccgggcactcggcctgtcctgctaagtaatgggtcagggcaggacctggcgctgatgtgaggcactgagacaacccagcgcagggatccgaagttgcagctttggtcctcaacagttgcgcctcattctactgatccgcgaaatgggaatgcaacgatccggcgacacccaggctttggccagggagatcggggagggcacccaggagacgcttatctcggggaggtgcccgggacgagggcagcgcagggctcgggcagcagaggcagggccgagggtccagggctgagtagcctcggcttccggggcgcgcgggtccgggggcccggaagcgggggtcgcgccctgggggtggggaccctggactccgggggcggcggccacggagggtcccgacccgcagcgcccgaacctgcgtgggagaggcgaaggtgaaggacatctggttggggccagaggcggcagccggggcggcggcggcctcggcataggcacgggcgtggcggacgaggcggccaagtcccgggcggcggagcagcgcggcgggcagcatggcagcggcgggcggcaggaagcgggtagctggcggacagcggactccggcgcggcgcgggcggcctggagggcgaggaggacgacgcgcagggacgtctgggaggaggagtcccggcgagagcgcaagcgcgaactacgactcccggcagggcgcacgcgacgttgacgacgcagtgccccgtcgtgaggtattctgggggttgcagttttgttccggcccgggctgcggcagaaccagggggtggtcagataagggcggtgaaaccgtcctgggaggtggagtaaaacgaacttcagtgaaattcaagattcggctgcgtggtggctcacgactgtaataccagcgctttaggaggctgaggccagaggatcacttgaggccaggagctggaaaccagcctgggcaatagtgtagatcgcccccacccccgacccgtctgtacaaaaaaaaaaaaaaagatttttggggcgctcattggatgcagggccctggatagacatcaagaaaacatcaagtttccggctctgggccaggtgtggtggctccaacctgtaatcccagcaccttgagaggccaaggcaggagaatcacttgaccccaggagatggagaccagtctgggcaacagagggagaccccgtctctacaaataatcaaaattagccgggcgtggtgatgcacgcctgtggtcccagctactggggaggctgaggcgggagcatcgcttgggcctaaggagattgaggctgcagtgagctatcattgcgccactgcctagcctgggcaacagagtgagaatcccactctggggccgggggttatttagcagacatttgagatcattaataagcaggtcaggccgggcgcggtggctcacgcctgtaattccagcactttatccgatctggagggcgaggcaggcggatcacctgaggtcaggagtttgaaaccagcctggtcaacatggcgaaacctcgtctctactaaatatacaaaaattagccgagcatggtggtgggcgcctgtaatcccagctactcgggaggctgaggcaggagaatagctcgaacccgggcgggggggggggggggaggttgcagtgagccgagatcgcgccactgcactccagcctgggcgactgagcaagactctgtctcaaacaaaaaaataaataaaatttaaaaacaaacaggtcgtagtggtaggtggtggcaaaagccaaaaataaatcacagtaaaagccgagaaagtgtgcaggacgggacagggtggaaggctgcaggtgcagctgttctaggaaacggcgaccgcggcgaggggcacagcgcgggcgacgcgggagggctcgctggggatcccggaccccggcgcgctgctcctcgacgccggcagagggcgctccgcgcccggagatgcgctcgccgaccccccacctcctgcctggccgtcgcccccgtgcgcctctgacgcaggagcgcgtgcgcgggcggctcggggctccgctgccgtcagccagcggcccgcgcagcctcgctcgcggctatgacgtcaccgccccgcccccgcgctcacgcaggtctgcggcacccggccgggcccccagccccgctccttaggctccgggaaaatgcggaatcggggatggcgggggttggggctcgggctccctggaaagggccttgagcctggcgcggtgggctggaccccaggggtgcagggagcaggggaggccctggggctgtggctttacaagggtgcagccagggagatccaatgcctcctgctgtgggcgaatccgacacgatccgtggctccctacatccggaggctgcaccctcgccccctgcccgtgttcaggccagtgcaatggcgggcgccactgtcccctggaacccaagcacctgaagaaggccctgctggtccgactcaggatgaaggcgtgggcctggctcctcccaccgggccagcgctgtgacggtcacttggagcctggtcatcctggccctggctcggggggtgcagaggaggaggcctgttcacttttcgagtcgtgacctgtgcacctcctggctctcaggaccgcatatccagctgccact

SEQ ID NO: 1560011 - DNA, 4001 bp, Homo sapiens
taatcccagctacttgggaggcggaggcaggagaattgcttgaacctgggaggtggaggttgcagtgagcttagattgcgccactacactccaggctgggagacagagcaagactccatctcagaaaaaaaaaaaaaagagtatgggaacaaaaacccagttagcttattgagtgattcaactataagggatcaggctacgaatggtgaaggcagtgagaactggtcaaatctgagatattctagtattttattgatggtctggatgtggagggcagggaagcaaagagaggaattagggatgactccttagaatttggcctgaacaactgggtgggcagcaccagtgtttactgggatgggaaggcttgggagtgagcagatgtttttaggggagaaatcagggtttggctttagccatgttaggtttgagatgccagttagactctgagtggagctggtgggtggcaaactgcctatgtgagctggagtccttgagaagggtacagcctggagatggagctgcaagagacatcaaggctggcactggaagccacagtgctgcctgggaatggcaaggacaggacctgggctctggtgggccagggtctccacagggtcttgcagaccagggattctcaccgatttttctcatgcaccttgtacatctccctttggagcaagtaatccctcagagcctccacatcgtagaaatagttggtcaggaactggagtattgtccttttcttcttctgattgccctctggggccactgccgcacccaggcgatggatgcccctgatacgcccattccacatgggggcgaccaggcgcagggactggggagggggagaggaaaggagctgagcctggagcctcctgggagacacagagctggatcccccagttcttgctccatgaacctcaatccctctgcttcccaactcaccctaagttcttccttcaaaacttcaaaactgtctttgagattccaaaaatttccccatgttttttccaagttcctcctccccttagtgaaccctaaattttctcgactagccatatattgttgattttcctaaattcttcctctaactttcccccaaacccttatcactcaaaacctgcattatttgacctcttaattttccacagatttgccccttaattacccaattcttctgctggggtcttcccaaatgacttctttctttccccagaatataatcttaaaaacttatctccaaacctcaaggagagggtgctctgagcaatccctaaaaccaaccaagcttgtccaacccgccgcctgcatgcagcccaacacaaacatgcaaactttcttaaaacattaggaggatatttttgtgatttttttttttttttttttggctcatcagttatggttagtgtattttatgtgtggcccaagacaattcttcttcttcgaacagcgtggcccagggaagccaaaagattggacacccctgaaccgagaagggtataaaaagcatgagctttgaagaggagagtaagaaagtcgaggggtgtggccaatgggaagaagcccccaaactcttcaattttgctttcaaggtctcctcttaatctaccccaatttctctttgctttaaccaaattctttttttttttcaaattatctcgataattttacccaaacccttattttcctcaaaagtttaaagctgccaacctctttaattttccctaaattcattccttgattttaaatcctctgaaagaatatctcaaattctcctcttaatttcacccagatcatgcccttagaacctccaaattgacctcttggttcccccacccatcatgcttttgagttttctgtaaaaattcgtcaatctcccactaactttccttacattcatccttcggtcttctaagaccaaatcccacatcctcgaacaatcccttccaagctctcttatcctacaggccccacccttgcctgtccattagctccttgtgtcatccctccctctgattggttagtcgcgtcgctcttcggcagccactccctcatccccattggatactctcagccaagtccctgcctcctctcgctcgctaaagcgtctcctccgcctgcgaccctcacagatccttcctggcccccactagccacaggtttgcactcccagtacggggcttgccaggcttagcctgctgcctcacggctttctgctctcgtggccgccaacagaggccctgaatgcggaggctgtagagcggacttcaaatttggggctctaggaactccggtcacttaccgcccagggagccgccatcttgctaaggtttcgtaaccggaaggggccggtcttatcccacgctcctggttcagcgcgaacttattctcctgtggccacgccccgcgttttctaaccgtcctcttaaaggtgcacgcactttttactcttaaagggtttagggattgctcacagcgccctctccctgagcttcaaaacgagacacaggtcgggctcacgcacctgtgaacccagcactttgtggaggccgaggcgaaagcatcgcttgaagccaggagttcgagaccagcctgggcaacataggggagcctttatctccacaaagaaatagggcaaccttatatccacaaaaaataaaatgttagccgggcgtggtggtgcacgcctgtggtcccagctactcacgaggctgaggcggggggatcacttgagccggggaggtcgaagttgcagtgagctgtgattgcgccactgcactccagcctgggtgacagagcgagacgctgtctcttaaaacaaaaaattgaaaaacaaaacaaaccccaggactccacaatctttccctaggagaagatggggtgttcttcccggcagagtacctttctttcctgactgcaattgcagtctccccaagctttcttattcttccagcttccactcactacctcctaaaaacagggaatgagggggctgaaaagctgaccacgtcatttttaaaaattagggtcaggtaagagagtgggtgaagaggttagatgtcaaggttagagactgaggtgagatctcaagaccagtttggagttgaaagctagatcgcagcatgaagagccattgtgaagtcttgtggatagaattattcattcattagttccaagaatatttactgagcacctaccacgtgatggcaggcactgttctagatgccgaggttaccatggtgagcaggacagacccagtccctctctcaggaagtcaacattctgggctgggagaggatggatgtgggagaggatgaataagaaacaaaggaatcagcaaggcaattttgatgagaagcagataaaaaaaagtgactgggtgtagggccatcagcaaaggcctctctgaagaggtgacattgaagtagaagtgaatgataaggaaagagccattcaaagatctaggggaaaagcgctgcagggagaggtagcctctagagcagagaggccttgaggtgggaaccagcttgcagacagagataggagactgggttgagaggtgggcaggggctgacggtgcaggcctggtagggttttattctattcacagtgggaagaagggagtgtcaaaatcggatttacattttgtaaagattatttctgccaggtggagaatgtaccttagagcagcggtccctaaccgttttgttaccagggactggtttcgtggaggacaatttttccatagactgggggtcgggggtggggtggggatggttttgggatgaaactgttccacctgagatcatcaggcattagattctcataaggagcaggcaacctagatcccccgcacgcacagttcacaatagggtttgcctcctatgagaatctaatgccactgctgatgtgacaggaggcggagctcaggcggtaatgctcacttacccgctgctcatctcttgctgtgcggcccagttcctagcaggcgaggggct

SEQ ID NO: 1560012 - DNA, 4001 bp, Homo sapiens
aaggcttgggagtgagcagatgtttttaggggagaaatcagggtttggctttagccatgttaggtttgagatgccagttagactctgagtggagctggtgggtggcaaactgcctatgtgagctggagtccttgagaagggtacagcctggagatggagctgcaagagacatcaaggctggcactggaagccacagtgctgcctgggaatggcaaggacaggacctgggctctggtgggccagggtctccacagggtcttgcagaccagggattctcaccgatttttctcatgcaccttgtacatctccctttggagcaagtaatccctcagagcctccacatcgtagaaatagttggtcaggaactggagtattgtccttttcttcttctgattgccctctggggccactgccgcacccaggcgatggatgcccctgatacgcccattccacatgggggcgaccaggcgcagggactggggagggggagaggaaaggagctgagcctggagcctcctgggagacacagagctggatcccccagttcttgctccatgaacctcaatccctctgcttcccaactcaccctaagttcttccttcaaaacttcaaaactgtctttgagattccaaaaatttccccatgttttttccaagttcctcctccccttagtgaaccctaaattttctcgactagccatatattgttgattttcctaaattcttcctctaactttcccccaaacccttatcactcaaaacctgcattatttgacctcttaattttccacagatttgccccttaattacccaattcttctgctggggtcttcccaaatgacttctttctttccccagaatataatcttaaaaacttatctccaaacctcaaggagagggtgctctgagcaatccctaaaaccaaccaagcttgtccaacccgccgcctgcatgcagcccaacacaaacatgcaaactttcttaaaacattaggaggatatttttgtgatttttttttttttttttttggctcatcagttatggttagtgtattttatgtgtggcccaagacaattcttcttcttcgaacagcgtggcccagggaagccaaaagattggacacccctgaaccgagaagggtataaaaagcatgagctttgaagaggagagtaagaaagtcgaggggtgtggccaatgggaagaagcccccaaactcttcaattttgctttcaaggtctcctcttaatctaccccaatttctctttgctttaaccaaattctttttttttttcaaattatctcgataattttacccaaacccttattttcctcaaaagtttaaagctgccaacctctttaattttccctaaattcattccttgattttaaatcctctgaaagaatatctcaaattctcctcttaatttcacccagatcatgcccttagaacctccaaattgacctcttggttcccccacccatcatgcttttgagttttctgtaaaaattcgtcaatctcccactaactttccttacattcatccttcggtcttctaagaccaaatcccacatcctcgaacaatcccttccaagctctcttatcctacaggccccacccttgcctgtccattagctccttgtgtcatccctccctctgattggttagtcgcgtcgctcttcggcagccactccctcatccccattggatactctcagccaagtccctgcctcctctcgctcgctaaagcgtctcctccgcctgcgaccctcacagatccttcctggcccccactagccacaggtttgcactcccagtacggggcttgccaggcttagcctgctgcctcacggctttctgctctcgtggccgccaacagaggccctgaatgcggaggctgtagagcggacttcaaatttggggctctaggaactccggtcacttaccgcccagggagccgccatcttgctaaggtttcgtaaccggaaggggccggtcttatcccacgctcctggttcagcgcgaacttattctcctgtggccacgccccgcgttttctaaccgtcctcttaaaggtgcacgcactttttactcttaaagggtttagggattgctcacagcgccctctccctgagcttcaaaacgagacacaggtcgggctcacgcacctgtgaacccagcactttgtggaggccgaggcgaaagcatcgcttgaagccaggagttcgagaccagcctgggcaacataggggagcctttatctccacaaagaaatagggcaaccttatatccacaaaaaataaaatgttagccgggcgtggtggtgcacgcctgtggtcccagctactcacgaggctgaggcggggggatcacttgagccggggaggtcgaagttgcagtgagctgtgattgcgccactgcactccagcctgggtgacagagcgagacgctgtctcttaaaacaaaaaattgaaaaacaaaacaaaccccaggactccacaatctttccctaggagaagatggggtgttcttcccggcagagtacctttctttcctgactgcaattgcagtctccccaagctttcttattcttccagcttccactcactacctcctaaaaacagggaatgagggggctgaaaagctgaccacgtcatttttaaaaattagggtcaggtaagagagtgggtgaagaggttagatgtcaaggttagagactgaggtgagatctcaagaccagtttggagttgaaagctagatcgcagcatgaagagccattgtgaagtcttgtggatagaattattcattcattagttccaagaatatttactgagcacctaccacgtgatggcaggcactgttctagatgccgaggttaccatggtgagcaggacagacccagtccctctctcaggaagtcaacattctgggctgggagaggatggatgtgggagaggatgaataagaaacaaaggaatcagcaaggcaattttgatgagaagcagataaaaaaaagtgactgggtgtagggccatcagcaaaggcctctctgaagaggtgacattgaagtagaagtgaatgataaggaaagagccattcaaagatctaggggaaaagcgctgcagggagaggtagcctctagagcagagaggccttgaggtgggaaccagcttgcagacagagataggagactgggttgagaggtgggcaggggctgacggtgcaggcctggtagggttttattctattcacagtgggaagaagggagtgtcaaaatcggatttacattttgtaaagattatttctgccaggtggagaatgtaccttagagcagcggtccctaaccgttttgttaccagggactggtttcgtggaggacaatttttccatagactgggggtcgggggtggggtggggatggttttgggatgaaactgttccacctgagatcatcaggcattagattctcataaggagcaggcaacctagatcccccgcacgcacagttcacaatagggtttgcctcctatgagaatctaatgccactgctgatgtgacaggaggcggagctcaggcggtaatgctcacttacccgctgctcatctcttgctgtgcggcccagttcctagcaggcgaggggctggtactggtccttggcccagggactggggacccttgccttagagggcaagggtggatgcaggggaccagtaaaagaggctgctgtagcagtctaggcaagagatgaatggggatggggcagagggaatggtgagaagtgctcaaatcctgggcctgttttgaaggttaagccaacagattgagaaactaaaagcagacgggcgtggctgtgcacgtgaggaaactggaagggcagcaggtttaggaaggtgggtgtggcagctgaataacgaaccctctccccatacctgtgaatccctgggcactgtgactatgttactttctatggtaaaagggacttggggctgggcgcgttggctcac

SEQ ID NO: 1560013 - DNA, 4001 bp, Homo sapiens
ccgtctcagcctcagccctgcacttttttcttttttttgagatggagtctcgctctgtcacccaggctggagtgcagtagcacaatcgcagctcactgcaacctccacctcctgggtctcctgggttcaagtgattctcctgtctcagcctcccaagtagctagaattacaggcatacgccaccacgcccagctaatcttcgtacttttagtagaaacggggtttctccatgttgcccaggctctcgaacccctgacctcaagtgatccacccgcctcagcctcccaaagtgccgggattacaggggagagccaccacgcctggccagccctgaacttcataatccctcccacctgcaccgccccctctgcccaggatcagcacctgagttcctgtcctcatcttggagatcttctctctggccgaggctgcccatgctggtggggctgtgggagagaagggccccgggtcacagcagtgaccccagcccttgctgggcaccactcggtcttcaaggagctcacagcctaggggccgaccctctcaaatgctacctcccacactcatctgcagcctccccgccaggctctgaatgtccagccataggctgtgtgtcttgccttggacatcctgagacctaggggaccccaagatgatcctcaaacctgcaacagcccatctgccagtgtcccccgccagccaccctggtcgcctcccgccagtacagcctagaaggactctaccgccagccatgccagcctctggccatgccagcctccggccactgctccccacacctcgcttttcctgaaaggaccactctcacctcctcctggtttcactgacggcctcctgcccctctccccatgtggcaccagcttaggggctcagtcatctgttcactgactgaatgggacccccgggctatatgttatatctcaaaacacagcatgagggtcaggcatggccactcccctcctcacccccccaggctgggcagcaaactctgatgggggcgatggaggcagacggacatcgtcagaagatcctggaatcttctccactagcaggttcaggaatgtgggtctggctctagccctgcaccgggggccctggtttggccccctatgaggatgggcaaaccacccctagacgccagcaactggccccccacctgccagctctctagcagtgccctccccgccaagcccctgcccctgtgttccggccacccgatgcacccgtcctcacccttctggtctccattcatacttcctagcccggccaggctgggccttgtgcctcctctcaggtgcccctctgcctggggagtctcccatcccagctctgatcaccgtctcacctccgcggatgccagcaggacctgagccttcctgagtcacgtctgagtcacccgtgtccccaggtcctggtggggcagggcttggctcagggccagctctggtgctcctgggagtctgagcggggccagtgcccattcaccgcatgaggaaaagggaggttcagggcgaagaggggtttaggctgtgggacgggggagaggtgggggagacccccgtgggggcagactggggattggagagttggagagaatgctcaaatggccagaatccactcgaagtgtatctgggggcagaaagagacacggacacagcgctggcttcctgccccctcactaactgggatgccccattactcggaagccccccaccccgtcttcccgcagccgcaggggcacaggaccgccctggacagggctccagagtccagggctgtctgcacccgccccggggccccgaccgcgcgaacctctaggggcgcgctctccacccccgccgccacgaccccagctctcagcctgggtggagcccagagagggtgcgcgggctcccggggacgcacagcagtgggagcacccgccgctcaccggcgcaggagaggcaggggggggcaggccgcgggcgtccagggcggcggacgtggtggaaccgttagcccggtgccaacggtcctgaaacggggggcgggatctcggggcggggcctcggggcccggccaaggcgaaggtggagccagttcggaccccggaagggggccgggggcggggcctggagggggtgggtggggccaaggcgaagaaggggcggggcctcgagggtggggccgagcggagcacggccgagcaggatgggggccaggcctcagggacgcggtcacggccgaagggcggggcctcgcagagcctcgcagaacaggccgggatagaagacgctcgggagcagtgcctgggtctggggaggggccgggactttggggaagggactagaaggaaggcgaggacgagcggggtctcgctgagcaaagtcagagtaggggcggggccaggactcaggggcttggccagagcgggaagcggggttgagcatggccttgcggagcagtgttatggtaggggcggggctgggatccggagccgttacaaaggaggaaggcggggccgcgcagagcagggtcagggtaggagggcgctcagggtgggtccaggacagaaggcagggccttgggagggccttagggagcagtgccagtgcaggggcggagcctgaaagggaagagggtgtcagggcagggccgggccgggcttggtcagggagcagaaagaacctgcaccgcagggcggggttggaagggttcttggaaaggtgggcctgggtcaggtcggaatgggccttgcagacctgacggggctgaggctggtgcggccagcgtggcagagtgcaggaggaaggaccacaggtaacggcggttatgtaagtcatgtctgatccgtgtcctgggttcgttcattcatcccatacacgttcaacgagcgcctcctaggcgcagatgcagggctgagcaccaggctggggagaggcggttatagccattgagaccaccctaaggccaagaggaagcccgcagggttctttccagcaggtggcaggggctcagggatccttactgaagaagtggcaggggtgagttcagcgacgaggctagggcgggtccaggccagcgatagggcctggagccagggtcagaaagtgtgtgcggaggggctgctgaagatgaaatgcccccaagagtgaggctacctggggtgagggcccaaagggagaggcaaacatgggtggagggggatagggaagccacctcccccatcaaagcggcaaccacctgagggctctcggtgatcacaaaccctctttctttggaagcccaaattggaagcctgcttggccctggaggctgccagggaacctctctttttttggagacagagtctcactgtgtcacccgggctggagtgcagtggtgcgatcagagctcactgcagcctccacctcctgggctcaagcgatcctcctgcctcagcctccagagtagctgggaccacaagcaggcaggcaggccactgtgtttgacttctctcctttcattccttcaacacttcccctgtgcttgcttgcttgctcagtggttacgaaaaaaagccggggctgggagtttgaacacactgttctaataaactttagaagagacctggttgggtgcagctgtgaggaccagattcccccaccccagccttcgcagggggcactatctgggggcaggagcttgcccagggcacttgtgcaaaggccctgaagcctccagtggcaacaggtggcttcacaagctgaagggagtccctgggggctgaagccagggctggccagccttgggaccccccgtgggctatgtcctgaggcaccaggtgcgttctgggaagggggaggcagacatcacatgggaatgcacagaaacagagcgcatacacgcctgcgccatttatttagaacacagagccgggcacagtggctcatgcctgtaatcccaacgctttgggaggccgaggcaggtggatcacttgaggtcaggagttcgagaccagcttg

SEQ ID NO: 1560014 - DNA, 4001 bp, Homo sapiens
agatggagtctcgctctgtcacccaggctggagtgcagtagcacaatcgcagctcactgcaacctccacctcctgggtctcctgggttcaagtgattctcctgtctcagcctcccaagtagctagaattacaggcatacgccaccacgcccagctaatcttcgtacttttagtagaaacggggtttctccatgttgcccaggctctcgaacccctgacctcaagtgatccacccgcctcagcctcccaaagtgccgggattacaggggagagccaccacgcctggccagccctgaacttcataatccctcccacctgcaccgccccctctgcccaggatcagcacctgagttcctgtcctcatcttggagatcttctctctggccgaggctgcccatgctggtggggctgtgggagagaagggccccgggtcacagcagtgaccccagcccttgctgggcaccactcggtcttcaaggagctcacagcctaggggccgaccctctcaaatgctacctcccacactcatctgcagcctccccgccaggctctgaatgtccagccataggctgtgtgtcttgccttggacatcctgagacctaggggaccccaagatgatcctcaaacctgcaacagcccatctgccagtgtcccccgccagccaccctggtcgcctcccgccagtacagcctagaaggactctaccgccagccatgccagcctctggccatgccagcctccggccactgctccccacacctcgcttttcctgaaaggaccactctcacctcctcctggtttcactgacggcctcctgcccctctccccatgtggcaccagcttaggggctcagtcatctgttcactgactgaatgggacccccgggctatatgttatatctcaaaacacagcatgagggtcaggcatggccactcccctcctcacccccccaggctgggcagcaaactctgatgggggcgatggaggcagacggacatcgtcagaagatcctggaatcttctccactagcaggttcaggaatgtgggtctggctctagccctgcaccgggggccctggtttggccccctatgaggatgggcaaaccacccctagacgccagcaactggccccccacctgccagctctctagcagtgccctccccgccaagcccctgcccctgtgttccggccacccgatgcacccgtcctcacccttctggtctccattcatacttcctagcccggccaggctgggccttgtgcctcctctcaggtgcccctctgcctggggagtctcccatcccagctctgatcaccgtctcacctccgcggatgccagcaggacctgagccttcctgagtcacgtctgagtcacccgtgtccccaggtcctggtggggcagggcttggctcagggccagctctggtgctcctgggagtctgagcggggccagtgcccattcaccgcatgaggaaaagggaggttcagggcgaagaggggtttaggctgtgggacgggggagaggtgggggagacccccgtgggggcagactggggattggagagttggagagaatgctcaaatggccagaatccactcgaagtgtatctgggggcagaaagagacacggacacagcgctggcttcctgccccctcactaactgggatgccccattactcggaagccccccaccccgtcttcccgcagccgcaggggcacaggaccgccctggacagggctccagagtccagggctgtctgcacccgccccggggccccgaccgcgcgaacctctaggggcgcgctctccacccccgccgccacgaccccagctctcagcctgggtggagcccagagagggtgcgcgggctcccggggacgcacagcagtgggagcacccgccgctcaccggcgcaggagaggcaggggggggcaggccgcgggcgtccagggcggcggacgtggtggaaccgttagcccggtgccaacggtcctgaaacggggggcgggatctcggggcggggcctcggggcccggccaaggcgaaggtggagccagttcggaccccggaagggggccgggggcggggcctggagggggtgggtggggccaaggcgaagaaggggcggggcctcgagggtggggccgagcggagcacggccgagcaggatgggggccaggcctcagggacgcggtcacggccgaagggcggggcctcgcagagcctcgcagaacaggccgggatagaagacgctcgggagcagtgcctgggtctggggaggggccgggactttggggaagggactagaaggaaggcgaggacgagcggggtctcgctgagcaaagtcagagtaggggcggggccaggactcaggggcttggccagagcgggaagcggggttgagcatggccttgcggagcagtgttatggtaggggcggggctgggatccggagccgttacaaaggaggaaggcggggccgcgcagagcagggtcagggtaggagggcgctcagggtgggtccaggacagaaggcagggccttgggagggccttagggagcagtgccagtgcaggggcggagcctgaaagggaagagggtgtcagggcagggccgggccgggcttggtcagggagcagaaagaacctgcaccgcagggcggggttggaagggttcttggaaaggtgggcctgggtcaggtcggaatgggccttgcagacctgacggggctgaggctggtgcggccagcgtggcagagtgcaggaggaaggaccacaggtaacggcggttatgtaagtcatgtctgatccgtgtcctgggttcgttcattcatcccatacacgttcaacgagcgcctcctaggcgcagatgcagggctgagcaccaggctggggagaggcggttatagccattgagaccaccctaaggccaagaggaagcccgcagggttctttccagcaggtggcaggggctcagggatccttactgaagaagtggcaggggtgagttcagcgacgaggctagggcgggtccaggccagcgatagggcctggagccagggtcagaaagtgtgtgcggaggggctgctgaagatgaaatgcccccaagagtgaggctacctggggtgagggcccaaagggagaggcaaacatgggtggagggggatagggaagccacctcccccatcaaagcggcaaccacctgagggctctcggtgatcacaaaccctctttctttggaagcccaaattggaagcctgcttggccctggaggctgccagggaacctctctttttttggagacagagtctcactgtgtcacccgggctggagtgcagtggtgcgatcagagctcactgcagcctccacctcctgggctcaagcgatcctcctgcctcagcctccagagtagctgggaccacaagcaggcaggcaggccactgtgtttgacttctctcctttcattccttcaacacttcccctgtgcttgcttgcttgctcagtggttacgaaaaaaagccggggctgggagtttgaacacactgttctaataaactttagaagagacctggttgggtgcagctgtgaggaccagattcccccaccccagccttcgcagggggcactatctgggggcaggagcttgcccagggcacttgtgcaaaggccctgaagcctccagtggcaacaggtggcttcacaagctgaagggagtccctgggggctgaagccagggctggccagccttgggaccccccgtgggctatgtcctgaggcaccaggtgcgttctgggaagggggaggcagacatcacatgggaatgcacagaaacagagcgcatacacgcctgcgccatttatttagaacacagagccgggcacagtggctcatgcctgtaatcccaacgctttgggaggccgaggcaggtggatcacttgaggtcaggagttcgagaccagcttggccaacgtggtgaaaccccatctctactaaaaatacgaa

SEQ ID NO: 1560015 - DNA, 4001 bp, Homo sapiens
tggttccctttccggaaccctctagaaatctctttgtacctatctctaagccagttctagctatttattcagtgaactccttcagagcctttcaatatgtttctttacataaggcagtggagttagattctgttgcttataaccaaagaatccaaacctatacgcagtacttattaatattctggagatacaatgaggttaattagggtatccaaggataaagctgtagaacatacgtgccattatattaaatttacacaataacattcagaagtaaacttctcagaaggcaatgcggaccctcctgacagccacaaacagagctcccaccagcccacagtaaactcagagaccccagagcctccagacccgcacctcaccgtggctgtgcgctgttcatctaatttctcgcttttctgcagctccttgtagagctcaccccttggagcatattccagaatcaggtacacccggcgtgcatcatggaaatagttatacaggcgcaggatattggggtgtctgaaggattaatgttggaagagtcagatttctccctgaggcctatcatatgatgccaccgtcactgcctggtcacacaagtggcaaattatgctgggaccagaataacaacagccctatctgggagcaagtgaggggagaacggagaacaggaaccaggattcgagtgtctgacccagggtaggaggtagtgtaaatggaatgaactgcagagaagtcttcaaggtacaagtgcagggtttacttggggttagtatttggggaaaatgctgggctcagacgtcaaagatgaaagaggaagcagagactgtccttactgtagatgagcctggatctcaatttcccggcgcagctggtgctccagtccttccttctctatctgcgacttgaagagaaccttcagggccacaatgaaatggctttccttgagccgagccaggtacacattcccaaatttccccttgcccaggggacgcccgatttcaaagtcatcgactgtgaggcgccgcctgacaggagaggaagaaaaaagcctcagcttgggaggtagggtaggcggagggaaagtcagggatgccaatgctccccttcctctttcattgtatccttcctctgccgctttcccttctcacacagacccagccctatcagtagttctcgttcccaggagccagcaccccacacacccagtctgttcttcatccccacgtcccaccttccttccttttccagataccaatcccaagggactcacatggctgggctgctgggctgctgggctgtttggtttgctgtagccactgaaagagaggaggaggagggagataggaagggagaggggagggaaggagaaggggagagaaagagaggagaggagaacagtagagaagggaatagggagcgagaggtgaggggaagaaggggaggagagaaagagagggaaggggaaggcagggagagggggagggagaggtaaggggaagaagaaagagtaaggtaaggtagggaggggaggaggaggtgaagaagaggcagagagaaaggaaggggaggagagagtaggggagggagaggtgaaagaaagaattggagggaagggagggagtggggagaaaagaagagcgttggggaggaggagagggaggggagatgtcaacacatgtgtcttctgtgcacccgacccctggcccagtccccagccttccctgcgtcctttctctggcgctggctctcacactcttcgcctgcaggttgagctttgcccagctgcaccacagctctgggggagctcatggggagaagaggtgagggcgcggacgccttcctgaaccctctggatggctgttcccgttcacagggtcctgaaaggggtggggggtcactttctggccggggcgcttccaatcctgctcgtcctgcagcctcactgatgtctcactgctacacaggcttcgggatccgcggcgtcgtgagcagccgtggctgcgcggccttcttttatacccggcaccaaccgctcagagaggtacttcctggctggctcctattggctgaaattcctgacgccatcggaagtgcgcccaatagaaaggacagaaacgggagcctcagtccagggttcccgggttggggcggaactggagtgctgcggtccgggctgggcactgaaagcgagggccaggggtgaggcccgagaaggaaggagacagagggtgcggagaggtggtgatggccgttgtgggaatgaacaacgcatacacccacggggtgtgcatgcgtcaactaggagagagccgcgatgcacgtgggaatgaacagacgcccactcctgacgtgctggagcctcgtgcagcccgtgaccctaaaccacttcgcgccttgtgcagccggcgaccccaaaaccaccttgcttcaaggtcacgtccgattcaggccactctccagggtcaccgcgatggggctccctgaagcctgcggctgtgcctgctcacagccaggacgccaccagtccagctcacttacccctctcctcccactcgccaaatatttgttggaccctgtaatcagtttgtggatttggcctcagatcgtaaaatcagcccccacgtatttgtttagcaaacacataagtttcaaaaacattaaaaattgaattcttttagacagggaacatatcttgcagaaatataattgaaggcctggcgtgatggctcatgcctgtaatcccagcactttgggaggccgaggcgggcggatcacctgaggtaggcagttcgagaccagcctggccaacagggcgaaaccccgtttctactacaaaaattagccgggtgtggtggcgcatgcctgtaatcccacctactcaaaaggctgaggcaagagaatcgcttgaaccctggaggcggaggttgcagtgagccaagatcatgccactgcactccagcctgggcgacagaaggagaacgagactctgtctcaaaaaaaacaaaaacaaaaacaaaaaaacccaaaaacaaaaaagctcgtctcaaaatatttggggagacctatttgagtaataaaactctggtctctcatttagctcgattgatgtgaattaaaccctttattgcaattatcctgtcttgataagtcgactctatctggggagcagggaaaataatgaacccattaggtggttacaataggtggatcagggtaatggcgcttagctcaggccaaccattcctttctcagaggctttcccaaacctgtctgtttgtttgtttattgagacggagtcttgctctgtcacccaggctggagtgcagtggctcgaactcagctcatgcaacctccgcctcctaggttcaaacatttctcctgcctcagcctcctgagtagctgggattacaggcacctgccaccatgcccggctaatttttgtatttttagtagagacagggtttcaccatgttggccaggctggtctcgaactcctgacctcaggtgatccactcgcctcggcttcccaaaatactgggatcacaggtgtgagccactgcgcccagctccaaactgtcaatttaaaacagcccccactacaacgtcatcctgttctgtttttccttaggtcactcataaccatgtgaaagtgctgttttatatatgtgtatattgttaatttaatgagtatcgattgagtgcctatcttgcaacaggcactgctctaaaaaatcagatatgtacatagcaaaataattatgcattcctgtacttgaggaatttttttttttttttgagatgcagtttcactctgtcgcccaggctggagtgcagtggtgcgatctcggctcactgcaacctctgcctcccaggttcaaccaattctcctgcctcagactcccaagtagctgggactacaggtgcacaccaccacgcccggctaattttggtatttttagtagagacagggtttcaccattttggccaggctggtgtcg

SEQ ID NO: 1560016 - DNA, 4001 bp, Homo sapiens
cagttctagctatttattcagtgaactccttcagagcctttcaatatgtttctttacataaggcagtggagttagattctgttgcttataaccaaagaatccaaacctatacgcagtacttattaatattctggagatacaatgaggttaattagggtatccaaggataaagctgtagaacatacgtgccattatattaaatttacacaataacattcagaagtaaacttctcagaaggcaatgcggaccctcctgacagccacaaacagagctcccaccagcccacagtaaactcagagaccccagagcctccagacccgcacctcaccgtggctgtgcgctgttcatctaatttctcgcttttctgcagctccttgtagagctcaccccttggagcatattccagaatcaggtacacccggcgtgcatcatggaaatagttatacaggcgcaggatattggggtgtctgaaggattaatgttggaagagtcagatttctccctgaggcctatcatatgatgccaccgtcactgcctggtcacacaagtggcaaattatgctgggaccagaataacaacagccctatctgggagcaagtgaggggagaacggagaacaggaaccaggattcgagtgtctgacccagggtaggaggtagtgtaaatggaatgaactgcagagaagtcttcaaggtacaagtgcagggtttacttggggttagtatttggggaaaatgctgggctcagacgtcaaagatgaaagaggaagcagagactgtccttactgtagatgagcctggatctcaatttcccggcgcagctggtgctccagtccttccttctctatctgcgacttgaagagaaccttcagggccacaatgaaatggctttccttgagccgagccaggtacacattcccaaatttccccttgcccaggggacgcccgatttcaaagtcatcgactgtgaggcgccgcctgacaggagaggaagaaaaaagcctcagcttgggaggtagggtaggcggagggaaagtcagggatgccaatgctccccttcctctttcattgtatccttcctctgccgctttcccttctcacacagacccagccctatcagtagttctcgttcccaggagccagcaccccacacacccagtctgttcttcatccccacgtcccaccttccttccttttccagataccaatcccaagggactcacatggctgggctgctgggctgctgggctgtttggtttgctgtagccactgaaagagaggaggaggagggagataggaagggagaggggagggaaggagaaggggagagaaagagaggagaggagaacagtagagaagggaatagggagcgagaggtgaggggaagaaggggaggagagaaagagagggaaggggaaggcagggagagggggagggagaggtaaggggaagaagaaagagtaaggtaaggtagggaggggaggaggaggtgaagaagaggcagagagaaaggaaggggaggagagagtaggggagggagaggtgaaagaaagaattggagggaagggagggagtggggagaaaagaagagcgttggggaggaggagagggaggggagatgtcaacacatgtgtcttctgtgcacccgacccctggcccagtccccagccttccctgcgtcctttctctggcgctggctctcacactcttcgcctgcaggttgagctttgcccagctgcaccacagctctgggggagctcatggggagaagaggtgagggcgcggacgccttcctgaaccctctggatggctgttcccgttcacagggtcctgaaaggggtggggggtcactttctggccggggcgcttccaatcctgctcgtcctgcagcctcactgatgtctcactgctacacaggcttcgggatccgcggcgtcgtgagcagccgtggctgcgcggccttcttttatacccggcaccaaccgctcagagaggtacttcctggctggctcctattggctgaaattcctgacgccatcggaagtgcgcccaatagaaaggacagaaacgggagcctcagtccagggttcccgggttggggcggaactggagtgctgcggtccgggctgggcactgaaagcgagggccaggggtgaggcccgagaaggaaggagacagagggtgcggagaggtggtgatggccgttgtgggaatgaacaacgcatacacccacggggtgtgcatgcgtcaactaggagagagccgcgatgcacgtgggaatgaacagacgcccactcctgacgtgctggagcctcgtgcagcccgtgaccctaaaccacttcgcgccttgtgcagccggcgaccccaaaaccaccttgcttcaaggtcacgtccgattcaggccactctccagggtcaccgcgatggggctccctgaagcctgcggctgtgcctgctcacagccaggacgccaccagtccagctcacttacccctctcctcccactcgccaaatatttgttggaccctgtaatcagtttgtggatttggcctcagatcgtaaaatcagcccccacgtatttgtttagcaaacacataagtttcaaaaacattaaaaattgaattcttttagacagggaacatatcttgcagaaatataattgaaggcctggcgtgatggctcatgcctgtaatcccagcactttgggaggccgaggcgggcggatcacctgaggtaggcagttcgagaccagcctggccaacagggcgaaaccccgtttctactacaaaaattagccgggtgtggtggcgcatgcctgtaatcccacctactcaaaaggctgaggcaagagaatcgcttgaaccctggaggcggaggttgcagtgagccaagatcatgccactgcactccagcctgggcgacagaaggagaacgagactctgtctcaaaaaaaacaaaaacaaaaacaaaaaaacccaaaaacaaaaaagctcgtctcaaaatatttggggagacctatttgagtaataaaactctggtctctcatttagctcgattgatgtgaattaaaccctttattgcaattatcctgtcttgataagtcgactctatctggggagcagggaaaataatgaacccattaggtggttacaataggtggatcagggtaatggcgcttagctcaggccaaccattcctttctcagaggctttcccaaacctgtctgtttgtttgtttattgagacggagtcttgctctgtcacccaggctggagtgcagtggctcgaactcagctcatgcaacctccgcctcctaggttcaaacatttctcctgcctcagcctcctgagtagctgggattacaggcacctgccaccatgcccggctaatttttgtatttttagtagagacagggtttcaccatgttggccaggctggtctcgaactcctgacctcaggtgatccactcgcctcggcttcccaaaatactgggatcacaggtgtgagccactgcgcccagctccaaactgtcaatttaaaacagcccccactacaacgtcatcctgttctgtttttccttaggtcactcataaccatgtgaaagtgctgttttatatatgtgtatattgttaatttaatgagtatcgattgagtgcctatcttgcaacaggcactgctctaaaaaatcagatatgtacatagcaaaataattatgcattcctgtacttgaggaatttttttttttttttgagatgcagtttcactctgtcgcccaggctggagtgcagtggtgcgatctcggctcactgcaacctctgcctcccaggttcaaccaattctcctgcctcagactcccaagtagctgggactacaggtgcacaccaccacgcccggctaattttggtatttttagtagagacagggtttcaccattttggccaggctggtgtcgaactcctgaccacagatgatctacccacctcagtctcccaaattgctggga

SEQ ID NO: 1560017 - DNA, 4001 bp, Homo sapiens
ggttgtgtctgtttcgtcccctgctgtgtcaggatggcctggcacacaataggtgtgccataaatgcttgttgaatgagtgagtgaaattgtgttcagctatgtacttatgagcattcctgggcataggtgtagaaatatgagcatgtgtaattccataggggagttcacgtattgtgtcttgactgtttttttcttttgttttttgagagtcttgctctgttgcccaggctaaagtgcagtggcatgatcttggctcactgcaacctctgcctcctgggttcaagccattctcctgcctcagccttctgagtagctgggattacaggagcgcgccaccatgcccggctaatttttgtaatttttagtagagatagggtttcaccatgttggccaggctggtctcgaactcctgacctcaagtgatctgcccatctcagcctcccaaagtgctgggatcacaggtgtgagccaccgtgcccggccttgagtaactgttttcgagtgaaggtggattgccttccctccctaacgtggtggtgttggtgttggtatgaccagcgtgcacacacagaagcacgtacaattacagagacaaacacgagagacacagacctgcaagcacacagagatacccaacacaaaccgctatacaacgtacatcagtccccctttatccgaggtttcactttttgaggtttcagttacacttggtctaaaaatatttcaatggaaaattccagatataactcctaagttttaaattgcatgccgttctgagtactgtgatgaaacctcatgccatcccactctggttggcctagaacgtgaatcccccctttgtccagcatctcagtgctgtatctgatacctgtctgtaagtcacttagctatcagatcaactgtcctggtactgcagtgctcaagtgcagagttcaagaaactcttatttatctaaataatcgcctggccgggtgctatggctcacatctgtaatcccagcactttgggaggccgaggcgggtggatcacttgagattaggagtttaagacaagcctgggcaacacagtgaaacccccgtctctactaaaaatacaaaaaaatcagccgggcatggtggcgcgtgcctgtaatcccagctactcgggaggctgaggcacgataactgctagaacccgggctgcggaggttgcagtgagccaaggtcgccacactgcactccagcctgggcgacagagagagactctgtctaaaaaaaaaaaaaaaaggccccagggtgcaaaatagtgatggctgcaattcggataggccaaagagaagccttaaagtgcttccttttaagtgaaaaggtgaaaattctccacttagaaaaagataatcatatatatatgtactgaggttgctaagatctatagtaagaaaacaatctatctgcgaaattgtgaaggaaaaagaaagttatgtgtagtatatacagggtttagtattattcattgtttcaggcttttgtgggggctcttagagaacgtatcctggtgaataaggggaatcccccaacacagatacacgtagaaacatagacacccccctcccccagcacacacacacaatgtctgcgctaggatgtaagaaggaccaagtttttcgttttgttttttgagacaggttcttgctctatctcccaggctgcagtacagtggcacaatcacggctcactgctgccttgacctccagggctcaagcgatcctcctgtctcatcctcccaagcagctgggactacaggcggccaccacacttggctaacttttcaatttttttttgtagagaagaggagagtctcaccacgttgcccaggctgctctcaaacttctggccccaagcgatcctcccgcctcggcctcccaaagtgctggatcgcaggcagagccactcggtgcccggccctgggaccaagtcttgtaagtgcgactgcagttctgcgtgttgtttacgcgtgtgcttgtgcatctgtgtttgtgtttctgagctggtatgtttgtgaccctgcgtgtatctgtggatggtgtgtacgtgcatgtgttgagtatctgtgtacgtgtctctcgtgtttgctccgtgcgtgtacgcctctgttcccaccgcgttggcaagggaggctctccatccgcagacacaaagtttccttttctccgtcagcggagggagtggaatggtgcaaagtctgcagaggccggaaaggggagggtaggggagctcctcagtcgcggcttcctaggtggccgttcccagacaaggtcaggtgcccgctcccgcagcctccgcgccctgaaggccccgcgcccgcagcccccgcgccgcccggaggagaaacagtacagtcccgggcgggcggcccgagtgggggcggggagcctgggtcgggtccagccacctggcacgtggggccccgccagggtcagcgcgcgggagctggcgccgccggccggagaagccctggggctggaggtgggttctggagccgggtcccgttccgaccgcagcattcctgcccccgcgtgagtcaccgggggcacctccccaccccagcgcttccggccggcttcgggggcgcggagccagagccgggatcccccttcccaggccccaacggccgcaccttgagtgaaggggacaggaggaactgggaccccttcccctccagaaggttcttgctttaccgcaagacgacaggagcaggccgattccagatgtgctttccagatgtcctgaccatccccccacaacccctgctctccgccccagcttttccagagaatgagagggatggaaggaggaggggcacgccctgagtcagatagagggacagacgcacacaaacggacgaaattccttcacacagcaaacccccccacacacacactcacaatgaatcacacttaaacacacaggggctgttattagcacagaagacgcagcgcttggtaagttaacggcacacagatatgcaagggctgatgtcacaaacacagtgacacaaaaacaccgtgactcacacatatacacgcgggctgacactgatgtacattcataaagagacatgtatgcatacaagccaacgtgggacaaacacataaacacacagtcacacatgtacacattgattacaaacacctagcgacgcaatgtacatctaggctgatgccaacacacacagaaacttaaatgtccctgtatattcagagacacacaccacgtaacagcgtacatggagttgaggtggacagatagatacacaccaggacacaatgaagggtcattttgacctgctcagacacagacacaccgacgcgtacacctcacagccaagcctccatctacgccataagatggagctggatgcgcccaggtttcatgttcacccagacacagactgatacaaaaacacatttgcgctgggtgcggtggctcacgcctgtaatcccagtactttgggaggccgaggccggtggatcacttgaggtcaggagtttgagaccagcctggccaacatgacaaacctgtcatgaaaccctgtctttactaaaaatacaaaaataagccaggcgtgcctgtaatcgcagctcctcaggaggctgaggcaggagaatcccttgaaccccggaggcggaagttacagtaagccaagatcgtgccactgcactccagcttgggtgacagagtgagactccgtctcaaaacaaaaaccccaaaaaacaaaaaaacacagtttcgtagatgcgcaggcctgatgcagacacacaaggatggagacactgccatggacacatagattgacacagagacacatctatacgctgactggtaagcatccttaggtcatgtactcagaggcagcaggggccagtgcacacacagggagaccagagagaagcagagggtgctgttacacacacacacacacacacaggtctgtgactacagtcatacaccaacatgctta

SEQ ID NO: 1560018 - DNA, 4001 bp, Homo sapiens
agaaacaccaaacactggtactgtcccgtgtcggaaagctgcagggaggtgattctgacagggcaagaggagagacagagaggttcagggtcagagctggacactgggagggggtctgtcagaacggaaagagggtgtccagtctggaagctcatgacaaccacgaagtatgtcctattattaactcattttgcagaagaggaaaacgaaacctagaggttccatcacatgctcaaagccgcacggctgacaagtggtcaaactggggttcccacccaggtgggctttctgccctctgtgtgacggaggtgggagtgggattcggggatgtggccacacacctgagctggctgaccactatccagtcatcctgttcatcctcacccaggggcacctgggtctgggtgctgtccgcgagctccaggatctgtccatcccgaagccaatgtacctcggggggctctccctgaacctggagctgacaccgaagggtgcccgtgagtccccgggcacctgtgatattccctgggttgcccacgaagggactttcttcagcctgcgtgcctggaggggagatgggaagagttagcttaggaaccccccagctccttccggccctcagttccaccctgtccttgcctgcccaccggcggccaggaccccgccaggcccttaggccgacatagttgcagagtgacctcagagtggggtggagggcggaggctctgagaggaggacgggagccctcccaagggactgggatctagcgtccatcccgtcgggaaggaggctcgggatctggcagcctcccacgccctgcactgcctggcagggccagcccctgccccctccgtcctctcttaggtctctagagacttaacaggtcgcgctggtgctggtggatggaggggaagaatcaggggttgggggagagagataagggtggtggtggggggagataagggtggtggcggagggagaagccagagaaaggcaggggagatgagacagagaggagcacagatacaaggcaagacagaaaaaatgaagaaacagccctcaagagagaagaaaaggtgggggcggaggggggatacagtcacagagggaggctgagaagagagagagagactcagagagcagggagagataaaggcagagactgtgaaagagagagaaacagagacccacagagatagcagagctggaggcagagacagagagacaaagtgagagcctcctccccagagatggagtggactggtggggtagggacaagtggcgggtcaggggggtggtgttggcagggagaagcgttttcccccagggctccagagccctcctcatcccactgcctgactcggtgccccttcggaaagatttcttccttcctggcgaccctcagctcagcccctctccccatggcccccttctcaggtccagcccccacccctgccctcagcttctccttgtctgtctgtctctccgggtcctctcttctgtcccccctgcccttcagttcctctctcagtctttctctccctctgccgcacttggtgtctctgagtctgtgtctccctcccttgaagtcccttttctgtggtcccaaggaaactccctaagccagcccaggccccccacacctgccatcatcccccacctcctacccctgccccagcccctccgaggggatccctgccccaaggagcccccatcactcacccctgggggccatgcacgcccagccgcacagcgccaagcaccaggccagcgggaccctgcccatcctggggcaccgccacgccatgggtgccaaactttcctcagaagttgttgggctcccagcgggggagggggcagggccgggctgtccccggccctccccccagctccaggctccccggatttggcactgcctgcctggcacagcggcaggggaggcccttgccaccggctctgcccagcagccgccttctcagcacccctgcctccttccctcactcccagacttgggcaaccctttctccgcccctggctccccctttgcctccgcccaccagggccagagcccaggggccacctggacaatcaggggttaactcaagagaggagaggatcagctctttcttaaaggggccagggagggagctgaggagggggaaggggaccctggtggctgtgccccctgtcctgagccagtgaggccgtgtctctctatccgggctctgggcgctgtccctctgggctctgtgtctggtaaacattcctccagaactccactcccctctcagctcaggccgtgacgcccctctccccgcctccacccccagcccagccccagccaggcctccttggcccttcattccccctcactctctcggctcctcggacaaggacacacacacacacacacacacgcacgcacgcacgcacgcacacacactcttagacgtcactgacacacacaggctaggacaagcagagacacgcagagggacccagacgggcaggggcatgctactggcccacagacacactcagacaagccaggccaggagctcgattcctggagaaacctcagagacaggaggacacggctgggtgggcatccatgggggacacttacttggggagacacagatcttcagacacgccaaaacctgcatggacgcctaaatgggacaccaaatacaggcgacatgaaggggacccaagttggaatcccagtgctaccactaactgtgggctacaggcaagtgactggcctcctgagcctcagtttgtccatctgtaaaatgggaataagaatagttgttggccgggcacagtaactcactcctgtaatcccagcactttgggaggccaaggtgggaggatcgcttgagcccaggagttcgagaccagactggtcaatgcactgagacccccatctctacaagaagtttaaaaattaaaacttaaccaggtatcatggcgtgtgcctgtggtcccagctactagggaggctggagtgagaggaacgcttgagtccaagagatcgaggctgcagtgagccctgatcattccactgctctctccttctggtgggactgtgtgtcctggttattgcagatctgctgcctgcgtatcggctctgctgcacttccattcctcggccctgtgtgtttggcacgtggagggctctgcatgcctggatgtctgtgaggaggaggctgggcgtctatccctctgctcttggccacctgtgtttgggtactggtatacctacggtgcatcataaagtcctatctgtttggcctcctgatgtctcttctacctgccccttcccagcacccccgtctgatcctgccttctcctgcctctactgtcactcctttctcccatttagcaaccagaggactgtttctgaaagtcaaatcctaccctgtcccttctctgcttgcccatggcctcctgctgccctcagggcaagctcccagctccttgtcactggccacttagggcccttcaccgttgtctccctgggctgtgtctttttttttttttttttttttgagacccagtcttgctttgttgcccaggctggagtgcaatggctcgatctcggctcactgcaacctccatctcctgggttcaagtgatcctcccacctcagcttcctgagttgctgggattacaggtgtgcaccaccatgccaggttaatttttgtatttttggtagagacggggtttcaccatgttggccaggctggtctggaactcctgaactcgtgatctgcccgcctcggcctcccaaagggctgggattacaggcgtgggtcactgtgcccggccatgggctgctggcttctgttgctccttccaacctgtctcccactcaacagtcagaaggcttcttcccaatctcaaaccaaaccctttcccacctctgccccaaacctttcagcagaaccctaaactccttatgtttctgtgaccctcccctcgcctccccaggcttc

SEQ ID NO: 1560019 - DNA, 4001 bp, Homo sapiens
caggtgcgcgccaccactcccggctaatttttgtatttttttgtagagaccaagtttggacttgtttccctggctaacgtcggcctcccgaggtgctgggatcacaggtggcaccatcctctcacctgaagcagcatcaggtcgttcaggttctgctgggggtcgtagccattctcgctcatgctgctgatggaaaacgtctggcgggactgcctctcccgccgcctcaggtcataggcacccagcaccacggtgctaaccccggggttcctgagagtagcggaggaaagggcagagggaggacaccaggctggggcctgggcacagagcaagccggcttgcaaattaggggggatcccagcctgcagactgcaatccttcaccctgaaaactcccccgcttttacagaagcagagccgagactttccagggcccccttcccatcttgagccccttcccttctctgcgcctcctcctccatctgagccccttctcttctctgcgccccctcctccatctgagtcccttcccttctctgagcctcctccatctgaccccctccccttctctgcacctcctccatctgagccccttcccttatctgggcctcccccatctgacccccttcccttctctgcacctcccccatctgaccccattcccttatctgggcctcccccatctgacccccttcccttctctgcacctcctccatctgacccccttcccttctctgcgcctcccccatctgagccccttcccttccctgggcctcccccatctgacccccttcccttctctgcccctcctccatctgagccccttcccttccctgggcctcccccatctgacccccttcccttctctgcacctcctccatctgacccccttcccttctccgcacctcctccatctgaggcccttcccttctctgcacctcctccatctgaggcccttctcttctctgcacctcctccatctgagccccttcccttctctgcacctcctccatctgagccccttcccttctctgggcctcccccatctgacccccttcccttctctgcacctcctccatctgagccccttcctttctctgggccccctcctccatctgagccccttcccttctctgggcctcccccatctgaccccctttccttcactgcacctcctccatctgagcctcttcctttctctgggcctcctccatctgacccccttcccttctctgggcctcctccatctgagccccccaatatccttgggtccctcctcaactcagtccccatttccctctccaagccccctcctttccctgagcccctccttttgcaatcccctcccctcctcacctaccaagcacccccactgaatgcctaagccccccaagccccttctctgagccccaatgccccctaggccccctccccaggacccctcactggctttggaagcagctggccgcggtcatcacgaagcgggcatggatcagggcacccccgcagaagtgcctgccttgattctgaatggaggccaggaacgggaactggcggggcctcgccttccggccgccaacgatgtccaaaagggggctggagcctgggtcggggggagacagctctgagatccccaagaatccacacagtggccgggagggcgtgtgaagctgcagcctcagctctatccacccagtggggctgcggggggacccaccctcccccatcgtcccactccctaagaggacagggggcccctgagtcccgcacaccgtccgccctcacgcctttcgcgggatcgtccaggccgggctggctgtgtgacccaggccaagccgcttgccttctctgtgctttaagtctgagttctgccctggcagccgggccctagcacagatgggggaccaccggcacagagaggcactcaccggccctcgaggacgccagcagaccagccagcagggccaggactgtcagccgggtcatggcggggcaggtctgtggctaaggcggcggctgcccttatacacaggccttggcagttggtggcgtccccgcccaggcccagggacagccccactcagtgggaacacgggaaattgcccaaggcctccaccgccaactgctccctgggccagcctgggctccccctacattctgcactgatcctcagtttccctctctagaagatggccacacccccaggggcaggtgagggtgtcaggaaccagtggatcccggagcccagcacatggcgggcatgcagccagcacccaggaacattgccagctcagagtcccagtctccccatcccaagccactggggctccagcactgcccgctgggcctggcaccggggggctcagggcagtggagctggcagtcctgcgttgagtcctgcgcgtctgtatgggtgattattattattattattattattattattttgagacggagtttcgctcttgttgcccaggctggagtgcaatggtgtgatctcgactcactgcaacctccgcctcccaggctcaagtgattctcctgtctcagcctcctgagtagctaggattacagttgtccaccaccacgcctggctaattttttgtatttttagtagagatggggtttcactatattggccaggctggtctcaaactcccgacctcaggtgatccacccacctcggcctcccaaaatgctgggattacaggtgtgaaacactgtgcccgattgggtgatttttttaaactttttcaacagctttattgagatataattgacaagctgggtgcggtggctcacacctgtaatcctagcactctgggaggccgaggcaggcagatcacctgaggttgggcgttcaagaccagcctgaccaacatggagaaaccccatctctactaaaaatacaaaattaactgggcgtggtggcacatgcctgtaatcccagctactcaggaggctgaggcaggagaatcacttgaacctgggaggcggaggttgcagcgagccgagatcgcaccattgcactccagcctgggcgacaagagcaaaactccatttcaaaaaaaaaaaagaaattagctgggcgtggtggcgggcgcctatagtcccagctacttgggaagctgagacaggataatcgcttgaacctgggaggtggaggttgcagtgagccgagattgcgccactgcactccagcctgggtgacacagagagactccgtctcaaaaaaaataaataaaaacaaattaaaaactatataaaaataaatagacgaaatgtccagaacaagcaaatctgcagaggcaggaagtggatctgtggttgccaggggccgggggagggcagggggtgatggctgatggatggagatggggcttccttctttggggtgatggaatgttctgggactggacagcagtgatggttgcacaagtcggtgaatgcaccgaaaaccacttcactgtaccgttcaaaatggctaattttaagttatgtaaatttcatctccttcttttgtttttttcagagttgaggtctcgctgttgcccaggctggagggcagcggcaccatctcagctcactgcagcctcaatctcctgggttcaactgatcctcctgcctcagcctcccgagtagctgggaccacaggcacccgccaccgtgcccggctaatttttgtatattttgtagagatgggatctcactatgttgcccagggtggagtgcagtggcacgatctcagctcgctgcagcctccgattcccgggttccagcaatcctcctgcctcagcctcccaggtagctgggaccataggcacatgccaccatgcccggctaatttttgtatttttttgtagaggtggagtctcactatgttgctcgggctggtttgaaactcctaagctcaagcaatccacctgcctcggcctcccaaagtgctgggagcacaggtgtgagctactgcgtccaaactcacctccattttttacaaagggg

SEQ ID NO: 1560020 - DNA, 4001 bp, Homo sapiens
gaaaattgaggcacagagaggcctagaaatccacctaagaaaggttgggtgggagcctagttcctgtctttaactcccagctgatgagatttcctttagtttgccacgttggtagtgacctcaccatcatgaggagcaatcaaggcaagccagattcccaccaggaagagggtccacaataggcatcctccctggctcatggggttgggggagtgagcaaattcctgcttgctctgggcctcagaggctggtggcaggaggaaatgtcactcagtgagcccttacttgctcctcctgggctgacctggcttgtctggattcctgaactctggcctggaacagagaagcaccaaggcccccttttggttctcccacacccagagcacctgccaggaaatgccacaccctaggggtgagagtgagggagggtgtccaggctggactgagcaaacacccaactgctcacctaggccatatgggggcccagctgcctgacctgggggccacacctcttcctcctgacaccagccctgcctggtgtcaccttgagaacaggccagtgggaggaagtgatggcccccagggctggccccagacctagacggccaggtggcttcccatgggccctgaatcccagatctggactgcaggagtcccccgcccaagttgaggggcgacctcagtttcctcttgagaagtgtccatttaaaaaaatcagagctgggcatagtggctcatgcctgaaatcccagcactttcagatgccaaggcaggaggattgcttgggcccaggagtttgagaccagcctggacaacatagtgagaccccgtctccacacacaaaaaaattttaaaattagctgcctgtggtgtgcacctgtagtcccagctactcgggaggctgaggtgggaggatcacttgagcccaggaggttgaggctgcagtgaatacagtgcatggagccactgtactccagcctgggtgacaaagtgagtcccccacctctacaaataaaacaaacaaacaaaaagtttaaatctgacccagaggaaaagatggtcgggattcttggaacaggagtgaatctgaacagtggctacagacataattaatataattatgatgacagctgactgtccctgggcacccactgagtggccacagctcctatccactcaactcatcctcgccaaggtcccatgccatgagacccccccttaacacacagggaaactgaggctcagagacctaacgccagtcacgcaagggcccccagtggccagcagtacacctcatcacaaaaatttcctttgactaaacgcttcgggcatcctcatcccagctggttcattgttccacctcacggaggggaaactgaggccggttcagcaatgtgtccatgccacgcagccagggcccctggaatgccgcccagccacctggcagggcctgcagcaccggaaccgcagggagagactgggggtcacctgcagttcccaaacccaaccggggaccccagcgctggcttgcccagatactcccaaccaaggggccaataatctcaacaacacaggtaacagtaacagccaagtctgactaagcggcatccgcctcgggggtctgatcccgcccaatctgggaggggcgccggggtcccgggtcgccagctgtgggggaggcttcctccccgacccaggtccgagctggccttgggaacgccggagacaattacggatgggtgagggcaaccgggttctcgagactcggggctcccgaatgttcccacatctgcagggtatgcgcggtggagaccggcaggggcttctccagagccacaacttccccacccccaaacccccaccactggggtccgccagatcctccgggggctgccgacactcacccccagacgacagtcccgcctctgcccctctacctgctcctctcagctcgcgagccgaagaaagagtttttacctgagccagagctcccgcccctctcccgcttcctccctcccaccgggcctcacgccttcctgcctccctccgccttggccgcttgccagtccccctcttcccagctcggctgagtttcctggtggcccaggcgaagttctctgccggctcctccctccccggccatgcctcttcccctctccggtcccggctgccacctctgccatcccgctcttgccaccctcgcccctctcggggctcacgaccccaccttgggtctggcccgctgctagggaatgagctccccgtggctggagatgaacaagcagcgccttgcgggttcctggcacagagcccggtcagcgttggcccacgtgtgttccgtgaagaaatgattggataagcccatggcgataaggagggagggaggcaggttaaaccttgcggcacctctgctctctgcggggagttcaaagattcctgaagctggggtcggcgcagtggctcactcctgtacttccagaggccgaggggggcggatcgctggaacccaggagtttgagaccagcctgggcaacatagtgagattccatctctatattgaaaataattccaggacccgaaaacctacgatgtgcccccagacatccagatgccacctgctggcatttggaagggttctggaagtcaacaatcagacagatttgtagtcttttctttttctttttttcttgttttgagagacaggatctcgctttgtcacccaggctagagtacagtggtgtgatctccgctcgctacaatgtcgacctccccagttcaagcaatcctcccacctcagcctcccgagtagctgggactacaggcacccgccagcatgcctggctaatttttgtcatttttctagatatggggttttgatatgttgcccaggctggtcttaactgtgggcctcaagtgaccttcctgcctcagatccccaaggtgctggattatagatgtgagccactgcacctggcctcagatttgtagatttttagggttgggttggctaggattcgaaccctgccctgtgctgcctctgaatctctaggagattctagcctggacccagcgttgggagctctggggttggggaagtccaggtgtgtgagctgggctatggtttcaggaaacccctccttcctccttcatccctgtttcttcccgaggaggaagccgaggtgtatatgtggcctgtctgtgcctcagtttcctcacctgtaaaatgtaagaaatagcccctgggtactctggatgggagaggtctggggagtgaaccctcagagcaaatgcatgattaaaactgtatggagggcaattaccggaaatgtcatagtgtcaaatgtggcactactggcctcggttctggatgcacacactttcttactgtggtacatccttggactttgattcagagtctatgctcaccctgttgggtccctgggttcaccaagtcatggccccaggaagggatttgtcggccgggaaggagccggaaccaaaagtcccatcctgggcgggcggggtggctcaaccctataatctcagcattttggaaggccgaagtgggcagatcatgccggtaatcccagcaccttccaaaggccaaagtgaggggatcacctgaggtcaggactttgcgatcagcctggccaacatgaagaaaccccgtctccactaaaacatacaaaaattagccaggcatactggcgggtgcctgtaatcccacctactcgggaggctgaggcaggagaatcactcgaacccaggaggtggaggttgcagtgagcagagatcatgccacggcactccagtctgggagatagagtgagactccatctcaaaaaaaaaaaaacaaaaaacaaaaatattagccaggtgtggtggcgggcgcctgtaatcccagctactcaggaggctgaggcaggagaatcacttgaacctgggaggcagaggttgcagtgagccaagatcgcaccactgcactccagcctgggcgacag

SEQ ID NO: 1560021 - DNA, 4001 bp, Homo sapiens
gagtgtgagcagtgctgacaggcagagaaggcacttggggcagcgcatgacccggcccagggaaggggcggccgcgggagctacaagggagccacaggggagccacggaggccattggggtgtggggatgggcctccagagagggcccagccaggccccaggcagacagcttcacaatctcccatagtccccgccaacccccataacagattctctcggtcccagatcctaaacagctcccctgacccagggacctcgttggtccttattcctagacctaggagtcccccattccaatcccgtaccagcaccctgttcttcccactccgtccaaatgcttccaccttcctaaaagcccaagggtctacctcttccctgtctccatccaggacaagggaccttgccgtctatctcctccctctccctccatttattgccctcaccaggaaatcaggagcgggattcctagctccctggggttagaaacccagcctgcctcccgcaacaccccaaccccagggactggggaaccagggatcccatgcttttttacctctgggtctggctcccgccagctccgggtgccggcctcaggtcaggcctccctcagctccctctgatctgcctgccccagcccctgtgttgtcgaccggcggggcccagccctgcccagccagtccagaggggcggggaggggagtggagcgggagcagggagggccccaggggccggggcggggctgaggcaggagagagggagggagggagggagggaggagggcaggaggccgacctgagagatggggctctggcgtgttagggctggtttctggtgagacagctgggaagggtgcagggggcagccacagaaacaagacgggggctttgtgaggcctgggaggggagaaccagggccagggggtgccagggagggtggggctgaaggctgggcctgggctggggagtgttagagtgaccagggcgaggcagggtcccactgaggcagagatggggaggctgagaggctggcgcccggctgcacccatggccaggaggcggcagtgaatgtgctgagtgggaagggatcggcgggcctgccagagggatgtttgttgttgctgcccagtcagggtgaggtggggggaacggggctggtgaggagaaggagagacagagacattgtggagagggaagagacggccagggagcagagagaggagaactggggtgagacaggcgatggagagagctgagggggagagagagagaagacgggcaagtgggaaggtggccaggagggagagggggagggaaatggagatggcgagaaagataaggggttgcggaagccctgtggggtgctcatggggaaagagaggttgagagaggcaggtggagggcagaggggagggactcaggcttccgagccagacccaggcagaggcggagagggagccaaggggaagaacaggagaggaaaagactggagcttcaagggcaatagagggtgacggggtggggcccacggggaaccccgggagctaagctgatcccctgtacctcctccatccctctcggcacccgggctgcctgcccagcagcgtgggaatctgttcctaccttacccccaacctccggcctggagccagcctcaccccgggcccctcccctcccccagcggcactgtgactccaggaacactcacatccagccccttggggcaggagggggtgtctgcctgtgtttgcatccctgccctccaggggcccctgctgttgggactgcatcagctctctgaagacctcccaagacatggggtaagactaaggggctcccactaagcctgggctgaccccttcactccaccctggtttggggcaggcctgtccccatcatggcaggaacacagtctgtcagcagcagcagttgatgatctgtccagccctgatttcctcccccaaagtttgaataatggagcctgtgggaacagctggaggaagagagtggggaggaagtggtgaatattaatggaataatagttggagtgggaaatgacagctaggggctgggggcaggggcccgagcacctcctgagggagtctgcaagcccactccactctggggctgggggagagggactccaggccccctgagctcatctagcttctgggggcagggggtgctgctcctcctggaagcattaggaagcttcacaaggtgcctttctttttgcctttgccatgtgcctcagtccgggtccaatcaggagagagaaaccacacaggaatgggaatagggaaagttcaatatacagaatgattaactctcatgggattggccactaaggggtgccttcttggggaacatggttggagggtggacatgctggtggaacacgatcattccaatccaacacttctgtctccccaagccttgggactcccctcacccatcttatgctagggcagttctggtctctctgcctcattaactttaggccactgttggatccaagttccggttaggcacccaagcaagctattagaactacgtccagctgcacaaggtaacccatgaaatccagaagctctagaaagcgcactcatgccagtaaatttggcctgagctagtgttacatccaccctcattggtgtaacatccttaaaatccccttctgcacacattccccaagtttctgactctgtatatttgcgaagccttgtcattcttatagtgtaaaagctgctcccgcctaggtcctagctggcacctgttcacctggagcaagctgatttcaccctaggtatttatgggtctagaggcagcaaggggcgctgtggtgagtcttaagaagaatggggtgtatctgttatttctgtataagagctggccataagaaaaaaaaaactgtggtgggacagtggctcacccctgtaatcccaatactctgggaggccaagagggaaggatcactttccaggagttcaagaccagcctgggcaacatagtgagatcttaccgctaatcaaaaaaaaaaaaaaaaaaaaaaggacgaccactttcaaggtgtctgcccctggtgaggtcatcacaaggttttttttttgagacggagtctcactctgtcacccaggttggagtgcagtggcatgatctccgctcactgcaagcctcacctcccaggttcacgccattctcctgcctcagcctctcaagtagctgggactacagacgcccgccaccatgcccggctaatgtttttgtatttttagtagagacagggtttcactatttctactaaagtagagtacttaggcaggatggtcttcatctcctgaccttgtgatccacccgcctcggcctcccaaagtgctgggattacaggcatgaggcactgcacccggcctctgtttttttttttgagatggagtcttgcactgtcgccaaggctggtgtgcagtggtgcaatctcggctcactgcaacctctccgcctcctgggttcaagagatcctcctactcgggagggttcagccttccgagtaactaggattacaggtgctcgccaccacgcctggctaattttttgcatttttagtagagatggggttttactatgttggccaggctggttttgaactcctgacctcatgatccgcctgccttggcctcccaaagtgctgggattacaggcgtgagccaccgtgcctggccacatcacaaggtttctaagcacaggaaggctggtaggttcctcagatgctgataagtcactcgcttggagtgacttgggggttcaagatcgcctgtttactctgggtccaattagatgaccccattccaaagaagtaaaaacttttgggccgggcatggtggctcacacctgtaatcccagcactttgggaggctgaggtgggtggatcacctgaggccaggagtttgagaccagcatggccaacatggcaaaaccctgtctctactaaaaacacaaaaattcgcctgg

SEQ ID NO: 1560022 - DNA, 4001 bp, Homo sapiens
gagatcgagaccatcctggctaacacagtgaaaccccatctctactaaaaatacaaaaaaaaaaaaaatagccgggcatggtggcgagcgcctgtagtcccagctatgcaggaggctgaggcaggagaatggcatgaacctggaaggctgagctagattgcaccactgcactacagcctgggaaacagaacgagtctcaaaaaaaaaaaaaaaaaaaaaaaagggactaggactcaggcctgaagacatgataatgccaaatggccacatctgtttcatagacattcatctgtgccacgcaacaacataccccaggctttacaaacaagaccccatcaaagtcttgtataagccaggcaaacactgaatgagcacttcctattccagccctattcctattctaagtgctgttgatactcgtttagtactcatgacaacttcaacaggtaaatatttctatgactctcattgtacaaacaaggaagtcgaggtgaagagaagtgcccaagttcacataatcagcccaagggtgccttaacaagcaataactggttttgaacccaggcagtctgtgctcttaacctcaaacctgtgctgcttcttagctactattagcttcactttgaaacaaggaaactgaggctcaaagtggtcgagtccaaaggtctccaattaataggtgggggagttaatatttaaatgcagatctggcagcccatgaccctaaccattacactataccatgactctatagggcctcagttggggaagcatgaacaaaattactttcctgggacgtggcggctcacgtttttaatcctagcactttgagaggctgaagtgggtggcctgtttgagcgcaggagttcgagaccagcctgggcaacatagcgagaccctgtctctacaaaaaataaaaaaaattagccagatttggtggtgcgtgtctgtagtcccagcttctcaggaggctgaggcgggaggatcactagagcccgagagttcgaggctgcactgagctatgatcacaccaccttactccagcccgggcgcagagagagaccctgtctgtatcccacccctcacacacacaaagatgggagcttgagactcatgtggacagggtgtgggctgggcctggagtactgagaactgatggaaatgaggttaagagtctgcgttaaggggtggaggaaggagcatgtagcctctaggctaggggtcttggtgtggaaatgaaccaggcttgggggaatacctgtgtgaatgccccacttgcagaagaggctactttccgagaaaccgctggcccctatgatctgcccgatcacgtgcacctcagccatggccctgggaggggaaaaatataatcacaaccctgtgaggtaagtgtattatctccatttgacgggggggaaactgaggcccagcaagtaaagggtagtactaggattccaagctagcttcgtcacacccctgaggctgaggtcttgaccacagatcctaattgccaacccatgaaagcctggaaaaaatggggggacccttgtctggggaaccagcatttaactctgggaagtccaaaataaccttttcgggttcaggtcggcggaaagccccgcccgaaggggctatggctccgcccacgagcgcaaaagacccgccttccgcgtcacgccagccaccccgcttccctcccccagcaagctccataaggcgcatgcgttatgagttcaggtccgacttaaccccgcctctaagcgcagcgcatgcgtcattcctaccttagcgcacttaacggttaggagaggagaaagcggcaaccggggttgtagttcatgggcttgactgcttcttttctccgcgggcgccgaccaggcctggctcgcgcctctcccaggacccgcctggctgcgagatatgtaagccgcgatacttccgcgaccgcgctcgtcttggtttccgtggttgttgctggggcaacagcaggctcctcccctagctttgtactcgctctgcgcgctactaattggtgctagccgtctgcggggggcggggtgaagctgtgatggacattttcctcctccgctccattttgggaaaatagcgtctctccagctacggcaaagggttccgccattttgggcgtggctaggaagctgccatgttgagtgtggctgaggaagtttgagtgcagtttctcccagataccttctttaccaaaaaagcaaatccctaactgctccgtgctgcgcctaccccaccgaagagctctctgtggtccgggatcacaaatcagagattgaaccaggaccaagggggaattccttccaggacctcgtgtacatccccggccttgtaactggaaaacaaagcaaaaaaatcactcctcattcagagagtggagaagttggggagtgggttctgcttccgttttagagttcccctaggtttctcaaggacaaggaaggaaggaagttggataagtccaacttccttctcggagctactaccaagttcactgttactgcttgattctgagcaaggagcggttggggtagcgaagagaaatgaggaactaagattcccttatttgcagaaaatcctctttcctattgattgatttatcaatcaagaaatggagatgttgtccctggatgccatcctagatgccatcatttcccacatcaagccagtcatcaggtcccatcaaggctccttaaaagggtctcactctgtcacccaggctggagtacggtggctcgatcacagctcattgcagcctcttaactcctgggttcaagggatcctcctacctcagcctcccatgtagctggtatcacagacatgcaccaccacggctggctaattcttttttttttttttaagagatggagtcctgctatgttgctatgttgcccagtcttgtcttgacctcctgggctctagctatcctcccagttctccctcccaaactgccgggattacaggcgtgagccacccagccaggccaatagatacaaagtatttacaagctaccattggctaggcgcggtggctcataactgtaatcccagccctttggaaggctgaggcgggaagagctcttgaggccagaagttcgaatatagggagaccccattaataatgcatatatcaactagtgaagtattccattgaattgtttaatataaatgttatcctattgaaatgttgtaccctcgttataattttggttttttactttttgagatggcgtctccccctgtcatccaggctggagtgcagtggtgcgatcccagctcactgcaatctctgcctcccgggttcaagagattctcctgcctcagcctcccgagtagctgggactacaggcgtgcaccaccacacccagctaatttttgtatttttagtagagacgggttttcaccatattggccagaccggtctcaaactcctgacctcaggtggtccacccgcctcagcctcccaaagtgctgggattacaggcgttagccaccgtgaccggccgggtttttttttttttttttttttttgacagagtctccctctgtcgcccaggctggagtgcagtggcatgatctctgctcaccacaacctccgcctcccaggttcaagcaattcttctgtctcagcctccttagtagctgggattgcaggcacccaccactatatctagctaatgtttgtgcttttagtagagatggagttccaccatgttggtcaggctggtctcgaactcctggcctcatgtgatccttctgcctcagcctcccaaagtgctgggattacaggcatgagccacctcgcctgggcccagctactttttgtattttcttttttattttatttatttacttttttttttttttttttttgagacagaatcttgctctgttgcccaggctggagtgagcctctgcacctggcagaggtttcacttttaaatgatctttctgtcctttaagctggagctgggg

SEQ ID NO: 1560023 - DNA, 4001 bp, Homo sapiens
ctccatctcaaaaaaaaaaaaaaaaaaagacagacaaaatgaagaggcaagaaagaattccctcccttagagcctcctgaggggccatggccctggcgacacctgacttctggccccaagaactgtgagagaataaatttctcttgttgaaagctaccaagtccacggtgacttgtggcagccacaggtaacgaatacaaagggaatgtttgcagtgttaatcccaaaagacaagatgctaggttccctagcatctcagagccccaggccaccccctctacttaccactttctctggacagttgacccttggtgtccgaatttggacctcaggggctggcgggggcacctgccaggacttagggccggctcctgaagtgttgaggctcccatcatcagcactggcggcctcaccctcaccctcgctgcggctgcccacgctggcctgtgcccctactgcccggtcctcagccccttcaggattggagcgagtgcggggccgaggctctgccgagtgctcctcttcctcctcctcctcttcagtggggctgctgggctctgccacttccatggctcctgtgtggctagatggaacacggacaggggaagccagaatcctccccttggagttttaaaaacatttggttacggtcgggcacggtggctcatgcctgtaatcccagcactttgggaggccgaggcaggtggatcacctgaggttggaagttcgagaccagcctgaccaacatggagaaaccccgtctcaactaaaaatacaaaattagccgggcgtggtggcgcatgcggataatcccagctactcgggaggctgaggcaggagaatcgcttgaacccgggaggggaggctgcggtgagccgagatcccgccactgcactccatcctgggcaaaaagagcgaaactccgtctcaaaaaaaaaaaaaaaaaaaagattggttactaagaaggaagaggggcgatgagccgcttactgatgatgagtcactcctcttagggagtcactttcctcagctgcagaatggctgccttttacacctctcagccgagcagccactccgacataagataacagtcccccctcttttttcctctttttttttttaacgtagtgctagccccatgcccctactcggccagtgagcacatcccagctctctggccactgaaaatggctcagggatgggcacatgacccaaatcaggccattgagtggcagctctgcaacttctagcagtgtcatcaaggaaaagagactctcattagagttgcagagctggtagaataaagttgagagctgtgaggggccccttttgcctcggtaaaaagcgaaatggtctccaccgagaaaactgcagatcgaattctgaccacctggacccagctcctgttagacccaatctataagccaccaacttccttttcttccttaagccagattgagtagggttttctgttacctaaaactgaaaatgtcttggtgaataagggaataataacctctaggacaccctcgtccctagcgggtgtctgcatgagggagaagcaaaatattagtactgtggttccccttggagagaaacaggacgcgaatggagcagtttgtctatctgggaaataggcacgggcttcccaagatggtctttgagcgccttgcagtccccacacctctaagaaaaacaaggctttagcggcagcaagaaggatggaggctacactgcaggagaaaccagaaataaaggcggaagccccaggaaaggcgaggagctggatctcttggggcaaagggagctgggcccctaggaacgggccccacacgctttcaccacccaccttcggctcaccgtagcctgaacctccttctaaatcagccgccgactcactaggaagccgccatctttacagccggaagttgtacggcgcagccccgacgcctcctgggaaatgtagttcagcgggctgcagaacaagcagagacagaaactggttgaggctagaaagaacttggaaactgataggctgaaactgggttgggggtggggtttggagtgagagctgcctggagctgggtgcggcgggacctggaatgtgattggctacactggagcaaagtatgaaatgtgattggattaaaaaaattagtgaatttttgtttttggccgaatcagactacaatagtcagtgcttctaccgtgataggctgaaacgtggaatagaggtggagcttgcaatgtgataggctaagagggacggagaaggccgatttagggaaagaggaggagctgattggtgattggtggagctggcctgagcctccatgtggggcaggtattcccatgtgggtgtggcctgagcatccagggcccttcccaattacttaattcttgttccttattttacatatatttgcatgaatcaaaaaatacttactctggtcttattgggtcactgtaggtggagcgaagctaagtcgggcctatttcaagcctacctcttttttcatggcttttttttttcttatttttagagacagggtatcgctctgtcgcccaaactagactgcagtcacgcgatcatggctagtcactacagccaagcgatcgctcaagtagctgggactacaggcgaggaccaccgcatcagactaccctaggcttccttccttttttttttatttttattttttagatggagtctcactctgtcgcccaggctgccgttgtcttcttagtgcacacttcccccttagccccagaagtatttatttatttatttttatttttttgagacaagagtcttgctctgtcgcccaggctggagtgcagtggctcaatctcggctcactgcaacctccacctccagggatcgagcaattctcctgcctcagcctcccaagtagctgggattacaggcatgcaccaccaggcccggctgagatatatatagtatttttagtagagctgggtttttgttgtgtttttttttttcgtttttgtttttgtttttttgagatggagtctcgctgtgtcacctagagcggctctttgaaggctctaagcctttgcccaggaagttccttctgcctggaatgctgttcctcctgttgcttttctggcaagttctttatgcttcaaagctcaccttacacagcccctccggctattctcgaattagagcctggccaatgtggccggcttctttgaccctcaaaaaaaaaaaaacaactgaggagttgggggcagtggctcacacctataatcccagcattttgggaggctgaggtgggtggatcacgaggtcaggagttagagatcagcctggccaatatggtgaaaccccgtctctactaaaaatacaaaaaattagctgggtgtggtggcgcgcacctataatcacagctactcagaaggctgaggcagaagaattgcttgaacccaggaggtggaggttgcagtgagccgagatcgcaccactgcactccagcctgcgtggcagaacaagattccatctaataaaataaaataaataaataaactgaggcttcaagtggctcttaaatgtttctggggctggtggggtcggtggctcatgcctgtaatcccaacactttgggaggctgaggtgagtggatcacctgaggtcaggagtttaagaccagcctcgccaacatgggaaaaacccatccctagccgggtgcggtggctcacgcctgtaatcccagcactttgggaggccgaggctggcagatcacttgaggtcaggagttcgagaccagcctggtcagcatggtgaaaccctgtctctactaaaaatacaaaaattagctgggcattgtggtgggcacttgtaatcccagctactcgggaggctgaggcaggagaatttcttgaacccaggaggtggaggttgcaatgagccaaggttgcgccactgcactctagcctaggcgacagagcaagactccatctcaaaaaaaagagaactg

SEQ ID NO: 1560024 - DNA, 4001 bp, Homo sapiens
tctctactaaaaatacaaaaaaaaaaaaaaaaaaaaaaaaagccagggataatggtgcacacccataatcccagctactcaggaagctgaggcaggagaatcgcttgaacctgggaggcagaggttgcagtgaaccaagatcatgccattgcactcaagcctgggcaacaagagcaaaactccatctcaaaaaaaaaaaaaaaaaaaatagaaatctttcctgaccactctgctaaatcacactgcccactttacttcacccctgcacgtgaactccctgagagcagggatgtagcctgctttgtacagtgctgtgtcccaggtgccaggtataggcctggcacatagcaggtccagtaaatgcttgttgaatgaataaaagaaggagcagacacccagtgcacagccatctctctccatgccctctgtggtcactgggccactgcagggggttgataccacgatccccaggtcctcacagatctgagggggagcatccctgggctcactgccctgcagctgcccaccttgagcaccagtttgctggcaaagtagaaaagggcgacaacccggccccagttgaagttgccgtcagaaaacatgtcagctgccactcggaaaaagacctctcggggggagtctgtgtccacggcggcaatcatcctgcaggagagaggagaaccagtgccggggagcaggcatcaggctgatggtggaaaattcccgcatccaccgcacactaaagataaggagactgagccccaagccaggctgaaatgaaaagcaacaggccaacgggggacaagggaaggggacaagacagacatttaggaaggtgggaaaaatgactccctgaaggagggttttaagatcctggcagagaggagggctgggagtccggaatgtttgcgctgagttgtggggcccagactcctagttcttaggggaggaggagaatgcggggctgagagtcctgtgtcctgaaggagcccagtggctggacttctgggtcctcaggggcccacacctctgcagctccatgttactgtccagttcgtccccgatgcgcttgagacactcgctcagcttcttggtggacgcatcctgaggcaccgggtccagggccagctcgggtgcctccccccccattcgccctgctcgatcctggatgaaactagagtggggatggagtgagggtgcagaatcagaacggggtgtcactcctcaaatctgtgccacaataatcagacctcaaactcacccctgaagcaaaagggcccctgtcttcatgatctgctcagagctggtgggccctagaggagaaaggaagggaagaggtacctggactcttgggttctaggggatcaggagactgtggagactcacggcccctgagggaggacagagctggggaccctggacttctgggaccctagcagataaagtgacgggggggcccagacaactgagtccctgatggagaaaggccaggaggctgggcctgtatcctacattctccccggggaaagaggctaggggaacgctatatgcatccagacccctggcctgagggggcagaggcgagacccgcccctcccaccagtgccagaggcaggaagtggtgcgggcgacaagcccgggcctgcccgggggcttggcttccgagatcccctggttctcgagggtccgagagcgccagagaggcagggatcgggacacggggatcagagagccaggaacctccgaggacggaggggactggaggctggcagcgcccgatccgggagtttctgcccctcagtgcttggagatcgcacagccccaggccggtaggaaggatcccggacgggccggcgagggggctcgccctcctcccgcccgtctgcctcccgcctcacccccgcctctgggctgctccccggacccgtccatcaccgccgctcccgccgccgcctctcgccgggtccgcgcgggcggccgcagcgcgcccgggtcacgtgagagccccgctgaacgtgcgtccttcacgtggccgccccgcaaaatggccgctgccccgcagcgccgccgggtcacgtgaccgcacctgcctcgctccctcgggaggtttggtcccgtcacgtgactgtccaatgagcatctcccgataagtgccagcagtggcgccgtccaacagccgtccgtccaatcgcagctctaatgccttcatttatccaggcaccatttttagaagtttcgggcagggtttgagctctccccagcgcagaaggaattagcaagtgcaaaagctcagaggcccaaaatagcatgcttccaggcaggacgttatagatgactaaaaactgagtggttttgttttttgcagagacctggatctagcaatatagcccacgcccaggcttgtctctaacttgtgagcccaagagataaccccgtctcagccttccaaagcgctgggattacaggcatgagctaccgcgccaggcctgcttttctgtttgtttgttttttcctgttttttttttttttttttttgagacagggtctcactgtgttgcccaggctggagtgcagtggcccaatcatggctcactgcagtctggaattcccgggctgaagcctcccacctcagcctcctgagtagctgggactacaccgcccctggttaatttttaaaactttttatgtggagatgaggtctctctatgttgcccaggctggtctctgaactcccagactcaagcgatcctcgcaccttggcctcccaaagtgctgagattacaggcttgagccaccccacccagtcatgactcgaatgtttgtgtttgtgtaaaaagaaaaggaatatgaagtttaaaaagtggcagaaactaatctgtgctgatagatcagcagggtatggaggggaggggccacaagagacactccccgggtgccccaaatatgccatatttttatctgaatggtgtttacatgggtatacacattattattattattattattattattattattattattttgagacggagttttgctcttgttgcccaggatggagtgcaatggcacgatctcggcttactgcaacctctgcctccgggttcaagcaattctcctgcctcagcctcccaagtagctggaattgcaggcatgcgacaccacgcccagctaattttgtatttttagtaaagatggggtttcactatgttggtcaggctggtctcaagctcctgacctcaagtgatccacctgcctcggcctcccaaagtgctgggattacaggcgtgagccactgtgcccggccgggtatacacatatttacaattcattgagctgtacacataagacttgtgtgctttatgaatattatgacatgtcactttagacagaaaataatagcaactaaggaaaactcagaaaaatgagctaggatcagatgataaagggtttgggcctgtcagagaagggacttgatctatgtccagaaggccgctgggaagcatggggaaattttgagcaggcaaagggcagagtcagactagggtgtcaggaagatctcttggacttccttctttctcgaaaaagctcctggttgggctcagtggctcacttctgtaatcccagcactttgggaggccgagatgggtagatcacctgaggtcaggagtttgagaccagcctggccaacacggtgaaaccctatccctactaaaaattctaaattagccaggtgtggtggcaggcacctgtagtcccagctactcgggagctgaggcaggggaatcgtttgaatctggaggcagaggttgcagtgagctgagatcgtgaccttgcactccagcctcagtaacaagagggaaactccaactcaaaaaaaaaaaaaaaaaaaaaaaaagctcgcatagcacccaggatgtgtaatgcttctcacagctgtaaatgtgtgcagtgttttaatttcatgttggtttttttcatccacccaaaatttccacaag

SEQ ID NO: 1560025 - DNA, 4001 bp, Homo sapiens
cggcgaccctggcccagggtccctcgcggggtttggagaggcgcggtgtggggaggcagggcgcccacactgctctccgcctgcactcctgtcacctcctccagggagtccacccggcctggccgatcgccgccggagaggattcggggcgcgcacactcaccccgggggcatgaacacgccggagggggcggcggtggggggcgggcggcttccttcaggagggcgcgcccgccgagcgccgctctccgcggcggctgctgctgtggctgtcgctgctgctgccgctctaactgcagtggcggctgctgtggctgtggctgctgctgctccccgggccgcaggcgcgtccgcgtcgtggccgctgctgggatcgctggtgccgccgccgccgccgccaggcgcccgctcgcatgtggctcgcgccgcgtctcaggccgcccggcggatcccgggcccgctccaaagccgccccgccccgccccgccccgcccccgcccggcgggtcccacgccccgcccccgcgtgacgctacggccccgcccgcccgccgcggacaagtcaggacttgcaggcgcgcgccgcgcccccccctacctccgcgccgggggtttccctgcagcgggggacggggcagggcctagcccaaggcaaggaggacccaggcgctgtgcggcggggtgtggggagatcgcccagacaccgggacagtcggacacacacactgactgggacccacagatccacacccccagcgatgcgtacacagaccgaccgacgggcgttccagggtccacaaagtcacgtgcaggcagagcccagaggatgtactcacagacacaaggccacagtctcgcaaatccacaccatggacaggggcatgagcacacacactcacatactgatggggctcacacttacacacacccagacggaaatgcacagactcactaacagggtcccctggacaagcagacggacacaatgacagggccacacacagttgcagaaacacccacactgatgatcacacctgggcccacaaactgtgttcacaaacaaccctaccgaacaggcacccacaccacacacacggtggtgcaaccacacagacataggcggagtgcttatcaggaaacacaaacttgctgataggcacaggggacacacacatacacacagacacctgttacagggatacctggatacacggccaaatccaaatcacactcccacagggacatacacaaatgcactcacacaatttcacagctaacacattaaaactatcagaaagtgacattcgcccgacacggtggctcatgcctgtaatcccagcactttgggaggccaaggtgcgtggactgcctgaggtcaggaattcgagaccagcctgaccaacatgatgaaaccccatctctactaaaaatacaaaattagccgggcgttgtggcgcatgcctgtaatcccagctacttgggaggctgaggcaggagaactgcttgaacccgggaggcggaggttgcagtgagccgagatagtgccattgcactctagcctgggcaacaagagcaaactccgtcttaaaaataaaaataaaggaaagaaactgacattcagagacacaaaccaaatcagacatagaagaaactgaccacccacacatgtcacaaagtcacacctgtgacagcttcttgctaactggcccactgcacacacgtcggagcatgcacacctggccacactcaccacaaatctggcaggggacccacgtcgtggaagcagccctgggcacctggcatggacatgcctgggcagaccccatgccaaatttcatcctgtctcatagctttccattccgtttctttttcagtttctcattgttacttcctgccctgctctggtttggtgagttttgtccttcctttttccaaagccgtggattcctgtctcctctacactttccatccttactgggtctcacccaatcgcaatcgcctcaccagagtgactcaccttccagtgcctagtgtggggctggctgagtaaggatgtcagacttctcaaacttgactgcctccaagtacacactcttagctcccccaagagatgcaggtaatctatatctcacgtgaaatctccccatttgcaacattgggaactcctcagctttcctccctctttcactttccctcctctttcgctttccccgattattcattgtcccttccttcttcctggtgttttccaaactgtgggtcatgagtaaaccatggattatgacatatgacatcacttacatggatcttacttttttttttttttttgagacagagtctcgcgctgtcgcccaggctggagttcagtggcatgatctcggctcattgccacctccgcctcctgggttcaagcaagtcttctgcctcagcctccctagtagctgggactacaggtgtgcgccactatgcccagctaatttttgtattattggtagagatgcggtttcaccatattggccaggctggtctcaaactcctgacctcgggatccgcctgtcttggcctcccaaagtgctgggattacaggtgtgagccactgcactcagcttttttttttttttttttttgagacggaatgtcactctgttgcccagactggagtgcagtggcacgatctcagcaaactgcaagctccgcctcccaggttcaggcctttctgcctcagcctccccagtagcagggagtacaggcgtctgccaccacacccggctaattttttgtattttttagtagagacagtgtttcaccatgttagccaggatggtctcgatctcctgacctcgtgatctgccctcctcggcctcccaaagtgctgggattatggcgtgagccactgcacctggcccagccttttttttttttagataaaagattcactctgtcgcccagattggagtgtagtggcacaatggatagccttgtggtacaatagccttgcagcttcaaactcctgggctccagagatcctcctgcctcagcctcccaagtaactgggactacaggtgtaaaccaccacgcccagctaatttttatttttttgtagagatgggcggtctcgctatgttgcccagtctggtcttgaccttatgggctcaagcaaacctcctgcctccgcctccctcagtgctgggattacaggtgtgaaccaccatgcccggctgacttaatgcattttactcagtaagatgcattcacatcccaaccaacttgcgctttactgagatgtatttagacacaagaatattcactctttttaggtgtatggtgtgtaagtggtgataaaagtacacaattttgtattaccacaacttctacctgcaattttactgacctagacaagaggttttgttgttgttttaattgagacagattctggctgtgttacccaggctggtttcaaactcctgcgctcaagcgatcctcccacctcagcctccctagtagctgggattataggtgtgcatgactgctttgaccagagttaaaaaaaaatacaccacaggccgggcatggtggctcacacctgtaatcctagcactttgggaggccgggggacgtggatcacctgaggtcaggagtttgagactagcctggccatcatggtaaaaccccatctctactaaaaatacagaaattagctgggcatggtggtgggtgcctgtaatcccagctactcgggagcttgaggcagaagaattgcttgaacccaagggaaggaggtttcggtgagccgagatcgcgccattccattccagcctgggcgacaagggcaaaactccgtctcaaaacgccaacaacaaaaatacactacaggctgggcacggtggctcatgcctgtaatcctaacactttgagaggccgaggcgagtggatcacttaaggtccggagttcgacaccagcctggccaacagggtgaagccccgtctttaccaaaaatataaa

SEQ ID NO: 1560026 - DNA, 4001 bp, Homo sapiens
taggcactgcctcagttcccaaacatgcccctctccacacacacacactcactccagagataagacctgcacacctctggactcacatatcaacacaaaacagacacccacggacacacatacatcaacacccccaaaacacacccacatgtcaccaactctcaggacacacgtagatcaggcacacacagacacatgccatcagacctcaacacaccaccagacaccaacccaccctcctcacgcaaccctcaaacatcatcaccaactgtcagcaacacacacacacacacaccctacagctaactctaatcccacacagcccagcagcacacacacctagcgcacccacagaaaacactggtctcacgtgactgacataaacactacacacacgcagcccacatgacacacatgagccagccgatcacagtgacaagcccctcagacccaacacacacacacacacacaggctcagacacaaccccatccagaggctgccagcaacacccaccgtctacactgcatagaccccacagatcctgggtcctcaaatcccagacgctgatgccagacacacaagccaaacccagactgaaacaaccccccaccacacacatacatacacacacacactcacacctgacaactcacacagacacctggacagaaaacagacatttgcatttagcaggcgcagcatcacaaacgctgggcaaaagacacatgccccggagatacagagacggcctcagccaagacagaaacacacaggcaagacacaagcacacatatcgcacgctcgggcaagacacacacataaacacacaaacagctcactccagcaacacacacacactacaacctccacaccccagcacacgcaggcaccacagacccccagtatcatcccggaacagcacacacagacaactctcaccgacaacacacgcaggtccacccaccccacaagcagggcacccacagacagaaccccacacaaacaggcgcggggactcacgcagacaccccgacgggtcagaaaccccaacattcctctggatcgacaccaccactccctgcagaacccagcacaaactcggagccagacacgcgcacacacccaggcgagacacctgcagatccacaaccccgcacacgcgcgctcccacggcggtcccagacacccccctccgctgtcacagccccccccaccgccgccacgtgcgcccgccccgcccgccaggcgagcgcggggccaataaccggctgttgctggggcgcagcccccgcccgcaggagccgcagactccacggcccgcgagccgccccccgtcgccgcccccagcgggcgcgcgccctgggtgtggccgcccctccgtgccgcccccccgcccctcccggactttgggggctggggcacccctggggtcgaccctcttccccggggccgcactggccgccagggggcgctgccgagcccgcaccccattgtttgtaaacaaacccgccagaccgccgaggcacctgtgcgcccagaccggcgccccaacgccgagccgcctctcacccggcgaccctggcccagggtccctcgcggggtttggagaggcgcggtgtggggaggcagggcgcccacactgctctccgcctgcactcctgtcacctcctccagggagtccacccggcctggccgatcgccgccggagaggattcggggcgcgcacactcaccccgggggcatgaacacgccggagggggcggcggtggggggcgggcggcttccttcaggagggcgcgcccgccgagcgccgctctccgcggcggctgctgctgtggctgtcgctgctgctgccgctctaactgcagtggcggctgctgtggctgtggctgctgctgctccccgggccgcaggcgcgtccgcgtcgtggccgctgctgggatcgctggtgccgccgccgccgccgccaggcgcccgctcgcatgtggctcgcgccgcgtctcaggccgcccggcggatcccgggcccgctccaaagccgccccgccccgccccgccccgcccccgcccggcgggtcccacgccccgcccccgcgtgacgctacggccccgcccgcccgccgcggacaagtcaggacttgcaggcgcgcgccgcgcccccccctacctccgcgccgggggtttccctgcagcgggggacggggcagggcctagcccaaggcaaggaggacccaggcgctgtgcggcggggtgtggggagatcgcccagacaccgggacagtcggacacacacactgactgggacccacagatccacacccccagcgatgcgtacacagaccgaccgacgggcgttccagggtccacaaagtcacgtgcaggcagagcccagaggatgtactcacagacacaaggccacagtctcgcaaatccacaccatggacaggggcatgagcacacacactcacatactgatggggctcacacttacacacacccagacggaaatgcacagactcactaacagggtcccctggacaagcagacggacacaatgacagggccacacacagttgcagaaacacccacactgatgatcacacctgggcccacaaactgtgttcacaaacaaccctaccgaacaggcacccacaccacacacacggtggtgcaaccacacagacataggcggagtgcttatcaggaaacacaaacttgctgataggcacaggggacacacacatacacacagacacctgttacagggatacctggatacacggccaaatccaaatcacactcccacagggacatacacaaatgcactcacacaatttcacagctaacacattaaaactatcagaaagtgacattcgcccgacacggtggctcatgcctgtaatcccagcactttgggaggccaaggtgcgtggactgcctgaggtcaggaattcgagaccagcctgaccaacatgatgaaaccccatctctactaaaaatacaaaattagccgggcgttgtggcgcatgcctgtaatcccagctacttgggaggctgaggcaggagaactgcttgaacccgggaggcggaggttgcagtgagccgagatagtgccattgcactctagcctgggcaacaagagcaaactccgtcttaaaaataaaaataaaggaaagaaactgacattcagagacacaaaccaaatcagacatagaagaaactgaccacccacacatgtcacaaagtcacacctgtgacagcttcttgctaactggcccactgcacacacgtcggagcatgcacacctggccacactcaccacaaatctggcaggggacccacgtcgtggaagcagccctgggcacctggcatggacatgcctgggcagaccccatgccaaatttcatcctgtctcatagctttccattccgtttctttttcagtttctcattgttacttcctgccctgctctggtttggtgagttttgtccttcctttttccaaagccgtggattcctgtctcctctacactttccatccttactgggtctcacccaatcgcaatcgcctcaccagagtgactcaccttccagtgcctagtgtggggctggctgagtaaggatgtcagacttctcaaacttgactgcctccaagtacacactcttagctcccccaagagatgcaggtaatctatatctcacgtgaaatctccccatttgcaacattgggaactcctcagctttcctccctctttcactttccctcctctttcgctttccccgattattcattgtcccttccttcttcctggtgttttccaaactgtgggtcatgagtaaaccatggattatgacatatgacatcacttacatggatcttacttttttttttttttttgagacagagtctcgcgctgtcgcccaggctggagttcagtggcatgatctcggctcattgccacctccgcctcctgggttcaagcaagtcttctgcctcagcc

SEQ ID NO: 1560027 - DNA, 4001 bp, Homo sapiens
ccctgtcccctcctccctcagactcaggagtctaggccccagcccctcctccctcagacccaggagtctaggccccagcccctcctccctcagacccaggagtccaggccccagcccctcctccctcagacccaggagtctaggccccagcccctcctccctgagatcctttcgccctccatcccttctccctgcatctctgggtctcaaatccatctctccctgcacttgcagagctcagggctcctcctctgggctgcacagggccctgtggcctccgctgaacactcctggggtaatactgcaccagcctttgcttatcccaacagagcacacgccaccccccagggcagggccaggcctggctcagccatttgcctccagcaccctgggcagggccacctctgtgatgatggataaatgtttctctccatcctggtctccacctttgcgtgtgtctctcctcttgggtctccatctctgtccctgtctctgcctctctctgcacctgcaccactcagtccctgggtctcttccgctctcccatgagtgaggggctggggtgtgggctgcggctgggcccggagcttaggcgggatggatgtgtgggggcggtgaggggggacagggctgggcaggtttcaggaatgtgggagggacaggctggctgagacctgcccggcctggagccagagcccccagccgcctcttggcccccctcagtttgatacaacagcaaacgggataagtcgagtcatcttgcaaaaggataaggttgaggcccaggatcttgggaagctgggcacctggactcctgggatcagagggaagaggaggctggggcctggtggagtagttattgtagaaaaaccaccaccctccctcaccctctgggctggcatcctggcatcagctctcagtgcttcttagaaactcccttcccttctctgctcaatctggcccagccctacccctggggacccactgttgaccatgagtgtgccaggggcctggattcccaagcgctcacctctggccccagcctgtccccagggaggggtgacggggtccaggctggtgcctaaggctgggtctgatctgcagacaagtggaggcagagagttcctctctcttccccaatctctctcatctctctgtccctctgtccccagcacccccacccccaccccccagcccccggcctcctctccttctatcctcatgcaggtgtgtaaatgtagctgaggccccaggaagggggcctgtcacttggaaacactttgttccactgtcactgcccggggctggtgctccagccctttcctgagggaggcgggttctttatactggactctggaaactcctaaatacatgtggatcgctggtgtggggacacatggtcctcgcttctctaaggggtccctggacctctcaaaacttgaggacctttgagggagagagccctggggttttgatcctctgtgccctgggggaagctattctagccactggaggcctggactcctgggtctgaggaaagaggggctgggggcccagattccagggtctgagggaggaggcaggtgggacccagattccagggtgctgagtgggaagggggctgacttctctggttgtctctgatccaccgcctgggtatccccagctctcctgcctggctgtccccagatctctctcactggaaggcgtaccttccaacactcccatatccctcctccttggggtccccacattttgcttcctggggtcagggtaaagccctttctcctcgctttcccggggtccccaggggcctctccccagtcccaccttgccctcagcccgagccatacctgggtgcgccgccagcaggactgcgagcaacagcagccgcggggccccgcgcgcctgggccggtgcgtccgggggctccatgttcacggcggcggcggagactgagcccgggctgcagctcggccgctgcggggctgggagccagaggccccgcccccggcagccccgccccgccccgccctccaggcccccctcgtcccccgatgcccgggcgcggggccaggacctcccactgcccggagcggacctcccagtgcacggggccaggctcggggctcgtccgcccccaagcctagagctgtccgggcttactgaccagcgcctgcagcggggggcctgatcgaccagcgtagccagtgacccgagctgggatctcaccaggcaatcgcggaccttctcctcgttattctgaccaggggccttggggactcgtccccactgtgaccagcagcctgggctggcatcgtcgattttaaccagaggaccccactgcaacctgtggcctgcgatggcctctcccagtgtaactaatggccccaagcgtgccgtccgagtggcctgcactggcctctcccagtccaaccagtgacccccgcagcctgaccagtggcccccagcagctgctcccagtatgcccggagatgttttcccctgtggtcagtgctctgggctgctttcctcgtctgaccagtagcctggaatcaaccggtttaatctcttattttcaatggtcttcaaatccaggtcctcctaggccgcttcgatgatggggctgggggtggggtacggggtgccctctctgcttgctcacccatggaaggccctcccactcttccccctatccagggaatcccaggaatgccaccctcccttcctccttcccgctctctccttcattccctcccaaccttgtggggaagggaggagtcagactggccagagcaggtgaggagggcaggggaagaggccagggcacctgcgggaagggggaggagtccagccactgctaggaagcgtgggtcacaggtccgactgcccaaggcccctacaggccaggtcagactgggacaaaatcccccactagatgtcactagttgcccaggacagtggtcagaacgtgggagggtggggggtcgctggccacactgggagaggttacccaagcttctgatcagcctgggggttgaggtagccctggagctgggctttgcctgctcagacatacagagaaggcttggattacaggtcagcctgggagttattagactggtcaaggttactttatccattggtcatacaggagaccaacgttttttttgtttgtttgttttgtttttgacagggtctcgctctgttgcccagccgggaatgcagtgggcgcaatcatagctcattcaaacctcaaccgcctgggctcaagcaatccttccacttcagcctcccaagtagctgggactataggcttgtgttaccatgtccagctaatttttgtatttttttggtaatagaaacagggtattactatgttgcccaggctggtctccaactcttgggctcaagtgatcctcctgccttccaaagtgctgggattacaggcatgagccactgcatccatcctacagagcaactgttacattgggaaagaccttttaggattaactgtaccatcccctcctccaggaagtcccctctgccttccctggctgggtcaggttccccctctgggctcccccacctgagcccggcacactctgggggtccctggctggggataggtctgtctccctcagtggactgtgagcctgtgagggcagggccagggatgtcttgatcactgtggtgagctaagggctcctcccctgggcaccccgcccagcacaagaccagacacagtgcaggtgctcagggaaggtttgtttgcaaggcacacaaactcacgtgcagattccatccagactggagcatcccaggatatacaatacaaactcactcatggggaatgcggcggcactccaagacagtcccaggtgctgtcaagctcacacactgtgagcaccgacacccataccctagctcttctgtccccagcctgtgcaccttctgtttgggctggaccctggtacatgccctctcagcagccatcgccc

SEQ ID NO: 1560028 - DNA, 4001 bp, Homo sapiens
ctcaaaaaaaaaaaaaaaaaaaaaaaaaaaaaagaccagcatggtggctcatgcctgtaatctgaggcaggtggatcgcttgagcccatctactcgggaggctgaggcaccacagtcacttgaacccatgaggcggaggttacagtgagccgagatcgtgccacggcactccagcctgagcaacagagcaagactcggtcaaaaagaaaagacgagacaaagaaataaagtacgtttgggggttcacagggcaggtctctataatgtgatagaacctccattatgtcccatacagcccaggagtatcaccatcaaagaccaggagtgtcactgtcaaagcccagcagtgccctccatactccaggactgtccccatatcacggccccggagagaccccatcataccgcagtctgcccttgtcacagcccacacatgaccccatcacgtctagaactgccccctttatagcccaggactctcccccatcacagaccagggctgttctatgatggcccaagatgctccacatcacaagtccagattgtgcctgtaacttatcagaactggtccccagcagagccaagtactgtcccaaacagctcaggaatgtcccctatccaaagcccagcacttttccccattataaccagcattgtctctgccaaatatcagggcttatttcctattcaccaggtctgaaattaaaaaaaaaaaaaaaatcccattgttgtctttttcaatccccaggactatccctatgttgctgtctaggccagtaccttccagactgtccctaccatggtccagcactgtcctctccacaccccgggactgtccccatcacagctgaggactcagcccaattatctccattacaggatatctctatcttcatcagagcctaggaatgtcccatcatgagttcagggccattctatgacaccagaactgtgccatgatgagacggtccacatcagtcccaagtggacctgtcaaagcccagtactgccccaccacagtccaggagtgtcaccactaaagcccagattgcccacataccccaggtatcccaggactatccctatcagtcactaagagccgaaaaaagtgaaattctgccctgacattcatcagctaggataagagactcaaataaagtcaggtgtaaagttaacagacagttctcccaaggttacaccgcagctgtgaaggcttgtaatgacccctttctttggctgtttccttcctcactgagaaaccttgttctctgaaatcatagactctgggaaacgctgctgctgtttgacatcgcacagtcagaagggatcgtctcagccagcctgcagcatctgtcactttgaccatgagacgctgcctcgatttccaatccaggtgcaaagcttcagataggagtttgggaagcacagcaatccccatctcttatttttttcaactttcattccaagaaaataggaccttgagtccaattcccagagctgagacttgaggtccaactctgccttcacctgcacccggccctggaggtctgggcccctttattccagctcccgcacaggctgatgccccaccgcaccccagggctccgctccccaaatcacaacctccccacccccacgcctccctcattacagggtcctccaccatgtttccctttttttttttttttttacctccccgccaattacttgccccacctcatccgcgtctacctgctccccctcaccccattaaagcctcgtgctcctttccaaagggcgccatcctcctccgcgccctgcagcggaaccccagggcgggaggagcggcgccgagtcggaccggctgcaggccagtggtcttcccggaagtgcgcctcccccggttatttcccagaccccggcgcggggctgcgaacccacctgccccagagcggctgcggccatgatccgtgcggcgcgtaactgtgcccgcccggggcgcggctccgaagagagacgttccggccacgccccgctcacgcctccttctgggggaaggcggccgaccagcgccccaggccgtcccagctccagggcgtcggcagggagccggacactgctgcggggcgcaggcgctggtgggagggcaggacttgaaatacggtccctgccaggcgaagtggctcaggtctgtaatcttagcactttgggaggccgaagcgggcggattacctgaggtcaggagttagagaccagcctggtccaacatgatgaaaccccgtctctactaaaaatacaaaaaattagccgggcgtggtggcgggcgcctgtaatcttagctactcggaaagctgaggcaggagaattgcttgaatcggggaggcagaggttgcagtgagccgagatgatgccactgcactccagcctgggcgacagagtgagactccgtctcaaaaaaaaaaaaaaaaaaaagtcctggcttggtggctcacacctgtaatcccagcactttgggggccaaggcgggtggatcacctgaggccaggagttcaagaccagcctggccgacatggggaaaccccgtctctactaaaaatacaaaaattaaggccaggcacggtggcttacgcctgtaatcccagcactttgggaggccgaggtgggcggatcacaaggtcaggagttcaagacccgcctgaccaacatggtgaaaccccgtctctactaaagatacaaaaattagccgggtgtggtggtgtgcgcctgtaatcccagctactagggaggctgaggcaggagaatcatttgaaccctggaggcggacgttgcggtgagccgagatcgcgccactgcatttccagcctgggtgacagggtgagactccgtctcaaaataaataaataaataaaaataaatacataaaaatacaaaaattagtcgagcgtggtgccgggggcctgtaatcccagctattcgggaggctgaggcaggagaatcgcttgaacccgggaggcggaggttgcagtgagccgacattgcaccacagcactccagcctgggcgacagagtgagactccgtctcaaattaaaaaaaaaaaaaaaaaatcgtatccctcggccatcgtgtctcggcaatcctaccctgggacactctgtctccaaattctacccccacagtgcccccaagtcctgtccccgggtcactatcctgccacccctaacagccacaggcccaaacagccaaaccgcgggacccttccctcacagggcgtcgccctgtttttctgcgctccgccccagtcctcctgccccacccgccagccccgggctgtagggtcggggcccactgacagctcccgcccccgccgcggccaatcagcggttggtgcacacgcccccccggccacagccaatccgcagcagccctgcagctccacccctcacctgggggacgccagcgcacccgggccctgccccccccctgggtccagctggggagtctgcgtcccccagtgccctgcggaccaaaacccaggagtttcagcccctcctccctctgatccagatgtctcaaccccctactttctcttccctttggacttttcttgccagccaccttcctattctacaggcagtgagaggaaaactccttttccctgagggccaagagtaagagggccttctgcgtctccccctccattacctcctaattagcgcttaatttactctcccctgcgggcctttagttagcgcgctggtgaagccaaaccgctctacccttcccaggagcccctggcgacagcgacagggctagcaacatcaggcacctgcttgctgcaaggcctggggttggggggcggggggagctgcagtccttcagggtcgaggcaacttgtgggtctggggtgcaagggctaagtggggcagaaggactcgtctaaaggatgggaaataaatataacgatatcctcctccttctggctgcaaatcgtttttatgggaacctgcagggtgacccggca

SEQ ID NO: 1560029 - DNA, 4001 bp, Homo sapiens
aagaaaaaggaaagagaggtacagaaagaaagagagagagaaaagagaagagaaaaggaaaggaaaggaaagggaaaaagaaaagaaaagaaaaaggagaggggaggagaggagaggagaaggagaggaaagaaagaagaagagagaaagaacaggtgggagaaataaaggggaaaaaacaataactcttaagataatacaaatttaaatatatataaataaaaagtagggacttcttccctccccactccccaccaaaaatgaagtaggggaagcaagaggaaaggtaatcaagagattgagacaggagagaaagatttaatcagccataaatgacctttccctagcctgccccagtcctgcccacctcctgccccacttgcccagccaatgggcccctgggactgagatcagctgtggaggatatgaactgctcaaaaaaaaaaaaaaaaaaaaaagtgaaaaggtctccagcccaaaggcaagagactgccctacccacaccttgctcctgcagcccttctgtatttacctgtttcaagtgactccgttcctagatacctactacgtcctactcctggcccatcttcttcaccctcctcccgtttgttcccctacccagagcttctttctacagattccatcttcccctccttatggattggggatcagaggatcagactcaacctcacaatatcttttcagatttttttccccagggcctcaccaatccaggccttcccaaggtcacccctttcttctccccatctccaaggttagtttctgtcccttccctccaccctcactatcaacattcctattgcccttaggatgtgccaggtccagtccttagcattttacatattgatttttcacagccctatgaggtggccactgttaatattttagagaggaaaattagctccatagatccagagaagtgcagtccgttggccaaggctacacaagtggaaagcggcagagcaaggacatgcatccacccatgtaaccactactctcctatctgtcaactgtagttcaaagctcttctgcaacccattgcctctccccgtctaaagataggcttccacctaggttttttgcagtgtaatcttgcccttagcagcatccacctgaagggattgtgacccttttgacaagaaacaaagccttctcaagtgtttctaagaaatgtgggcaaagtgccctgtctgtacctctctccctccttttttcccctcattaattcaacaaatattaatcgtctcctctgtacagtgtccagaacacacgaattctctgtcttgatattcgatcaagagacacaggaatcaaacaaattttttacacaattcattttaaaatcagaattgtggcaaaggagcaaagaaatacaaggccctatgcagcctgtgacagggacctgttctcttctttcttcttcttgaagagggatctttgcccagaagaaagtccctcccttacaaagtcagtttcattctccaaaccctgagggagaaggtcttgcggtcttcccctgttcctccaaggagcctcccctgaataccagtggcagctaataaggaacccccatctctctcttcaagtcgtctccctcagggcccacaaagaagttgcaaacgggttttttcctctcctaaagaagtggaagttcttttcgtctcctaaggaagtggcagatcttcccttcggtgtcttctccaaggagtctcccactctttttcccttttgtgacagcccttccttcatatccttcagggaccccacactctgaagatagcctttacatccctaatcccctttgggaaaaccgcctggggcccaggtactcacagatctagccagtccccgagccccaggctgccgcagcagcaggagggcagcctggctcaaaccacggtttagccgccagaccctcgctgcagcgatcgctaccgccatcttggctaacaaccactcagcggtccggcactcacgtaggctagattcggggctgcctctttatgtgcctgacgcaaactccagcaccatctgacaagaaaaccatcttcttcccgttctgtggtagatagaatgcacagagatttggagaaaaaaaaatctatctacccaaaattttctccaatcgcctcattgtagttactcctgtaacaggcaaagaagagggcaacctgaccagggcctcagggatttagggcccgggggcccagagtaaagcggatcaatgccaaggcctgccttctgttcccaaatgtccaatggcgttgccagagttaggaggtgggactgggcggagccagattgttggtaaacgctaagccacgtgcggacgcccaggaggatggcccagcccggcgcgtgcgcactggttacgcagcctgtttgcggcgcgcgctgccaggcggaagtgacaactgcagccgcacgtgggctcggcgcgatggaggaggagacgcatactgacgccaaaatccgtgctgaaaatggaacagggtccagccctcggggtcctggctgcagcctccggcactttgcctgcgaacagaacctgctgtcgcggccagatggctctgcttccttcctgcaaggtaagaacttcacccaggtctttcttttggagagggactaccgtgtactgtgcaaccgagtgcccacctcctcacgataccagctggtaaatgtcactcctgcgttgatgcatgatttcttgtccgattgaatactactaaatacgcagggatacacacatctctccctcacgactagaaaggagaagatagttccatctttgtaactatctctgagaatgagaggaggggcagactgtccgcccaagaattgatatttcagaatagggaaaatcacctcgccagggtaaatatcccccttaactcgattcctcctccaccctcccacccccaccccccacacacacaccctctaggtccttgcatcccggactgaagcaaacctgtctatttgcatactgtggactgtggcggatctttcacccacgtaaatactcctcaaattgaagataatgtcattgcgctgggttgagaaatacatccccaccgctacctcactgcatctctccacacaagtaaatatccctaagattagggcaagtcaaaaaaaaaaaaaaaaaaaagattagggcaagtcttacctatagagcaaatatccccttttcctagctaaataactctcagaagtagattaactccaagaatatttctctttaacgtttgagacgggaggccgggggcggtggctcacgcctgtaatccccacactttgggaggccaagacctgtggctcacctgaggtcaggagttcgagaccagcctggccaacatggcgaaaccctgtctctactaaaaatacaaaaactagccaggcatggtggcgggcgcctgtaatcccagctactcgggaggctgaggcaggacaatcacttgaacctgggaggcagaagttgcagtgggccgagatcgtgccattgtactccagcgtgagcgacaaagcaagactctgtctcaaaaaaaaaaaaaattgagacagcgtctcacgatgtcacccaggttggtcttgaactcctgggctcaagcaatcctcctcccaaagtgctcatacaggtatgagccaccacgcccagccccaatacattttaacaaaatttggctgctgtgttgattgtggggagtatgggggaaaacagggaggtgatggtggctccagccagagcaggagtagtggaggtgatgagattctggatgtagtttgaaagtaatacggacaaaacttacgtatagtttggtttgagtgcgaggaaaaagattcaggcataactaaggtttctgcccagatctgtacaagtctggaaatcagaagagagacccaagctggacataggcaatttggaactctctggctatatagatggtatttcaggctattgcctgaacgaagtgagtgta

SEQ ID NO: 1560030 - DNA, 4001 bp, Homo sapiens
ggggcggatgggcagagagcaaggccgaggggactcagagggggctgctcctcgccccagggagcagggaagacatcttcgaaggcggctcaggaagtctgttggctcttcttgggcagggcttctggagaggaggacttcagagactgaccccaccagagatcccctgcaagcagtctctttccccaactccctccctcccccgctgaggacctctctccaaaaccccaaagacagagaatagagccagatataaagagaggagacagactgagaccaggagcaagagttaggagggagcctcaaatgctggcccctgggggagaagggccactcctcttacctaggtggagttggaacaggagacccggcagcctcaccacgcctaaggaaggcagctaggaccctcagcgtgtcttcccggagccccagctcttcagagcctgccatggaggcacctgtgagagagagggttagggactggactccaagggtttagcaagaagtggaggcttggggaccaggacttgtgagtcccaaggaaggtgctgagggcctggactcctgggtcctttggagagtgtgggtctgggggcctagactcttgagtcctcagacgaaaaagcgatcaggaaaaagactcttcgatccaaggaaaggtggtggggctgggtgcccagattcgtgggtctaaaggaggagggagctggggtcctggacttctgagtcttagagaaaaaggaactggagccccagacccttaggtctcccaggaagaagaggcttagcgccccaactcctggattctataagaggcatatgccaaactcctgaaacccttaaagcatcgggaactaccaatcccaagaggtttcagggcaaatcttcccctaggtccgcgcttcttcgccgcgcagcctgctgtgaggtgtagttccaaatctccgacccctgctggaatctagaggaccctggacccttggatatcagagaagcgggactggggtgcccaccactggatcccggccccctcctcttccctcctcaccccacccctcgtcaacaccccgctgacctggtccggggccccaccgccgcctcctccactcaacttgcggtctcctccactgaactcgtacaaactttattagttcaactttcccgcgcctgcgcactgggccgggtcgataaccggcccagcgtagaaagggcggaacgctgggtgcacgctcaatttgcatgtgacgctcccagcatgcctctggccggaaacccaaaaaagggcataggggcgggaacagcccagcgggccgtcccatcggcttttgggtctgttacccaaagaatgataaagttggttttatttcaagaagtcgatcaaaaagaaagccccagcgctctagagctcagctgacgggaaagggggtgcgcagcctcgagtttgagagctacccggagctccaagacaggggtgggttccagctgcccgcacgccccgaccttccatcgtaggtaacgcggaagagcccgggagagcgttggtggcgtccgagagcgaggagcgggaaagaggatgggtctgcacggagagtggaaaggcaggctgtgtactctggggaaagtggagcaaggaaggagctacagtggccgacgctggaggtcggctgcagaaaaactagaaaaagtagggaggaaagaggaaaagaggaggcgtctacactgagggggttctagagagggaggggtggactccgtagatgggggtagttcagtctcgaaacctggggcgtgctctgtcctggaggagggaggcgggcagtcggaggggaattgaatggaagttctgtgttggaaatgttttgggagatcttctgtagggggactgtggaagggggtctacattggggtaagtgcaggaggtagaggcttacacgtgaatcgattctgcactgaaataactagggaaagaggatgctaccctgaaagtggggatacttactttcgatgatgtgggggagggaggaggtctatactggcggaattgagggagtggagggtctgcactgaagacgctggggaaggatgtgccatggatatgggaaggaaccctagctgattagagagcctctcgggaggatgggaggatgggaagaggaggtttcctgtttgtacccccgaaaatatgggtgaaggacctgtgccgtggcccgtgagaaggaggtctgggtgcggaaactccaggccaggtgggtccgggggaggccggtcgcgcccaggaaatgccctatacgcgcaggccggaccatgggaaccccaaagccacggatcctgccctggctggtgtcgcagctggacctggggcaactggagggcgtggcctgggtgaacaagagccgcacgcgcttccgcatcccttggaagcacggcctacggcaggatgcacagcaggaggatttcggaatcttccaggtgcgtgcgacgacctgggacgctggaaacccggagctgcgcgctgggcggaaaggactcctagtgggcccggctgagaaggcggaggtggcgcgcgaggggcgggctcgtgccaacgctggtgggtggggctagaacgggaggggcggggctagccggatccgctgactgatggtggggcgcaagcagggttggagctgcagggttacgggaataaaaccgggaaagccggttagtacgcaaaggaaatgcatcctgggggtttggggctttctagaggccggggctcttggttgtaggatagatactgggggatggttcttgaaacatcagaggtgaggcctggagccccaaatctgaggttcctaactaccgaattagtatatgccagaggtggtaaacagtgtgaggggcggggttatcacagagggtgtcgcggggcaggtggtgcacgggattagacaccaagttggacttggaagcctggcttagaaagaaaaggtttttgggccgggggcggtggttcacacctgtaatcctagcactttgcaaggccaaggcgggaggatcgcttgagcccaggagtttgaggccagcttgggcaacataggctccatctctttaaaaacaaaagcgaaacaaaacaaaaaccaaagaggtttcaaaggcttttgaagaggccgagcacagtagctcatgcctgtaatcccagcactttgggaggccgaggaggacggatcacctgaggtcaggagttcaagaccagcctggccaacatggtgaaaccccatctctactaaaaatacaaaaattagccaggtgtagtggtgcccacctgtaatcccagctactcaggaggctgagacaggagaatcgcttgaaccggggaggcggaagttgcagtgagctgagattgcaccattgcattccagcctgggtgacaggagtgaaactccatctcaaaaagaaaaaaagccttttgaaaactagaggtgggggatggaggtaggtgggacggggggatttggggatggaccttgcagagttagaacttgccagggaaagagggtggtgttaggactcgggagacagggttagggccccaggagcaggatctaagtcgtcctcccccaccatcctgacaccactgttgccccaggcctgggccgaggccactggtgcatatgttcccgggagggataagccagacctgccaacctggaagaggaatttccgctctgccctcaaccgcaaagaagggttgcgtttagcagaggaccggagcaaggaccctcacgacccacataaaatctacgagtttgtgaactcaggtctgccagcttggggttcgtgtgggaggctggggccccaagggttcctggcactcctactcccctcaccacttttctcaacaggagttggggacttttcccagccagacacctctccggacaccaatggtggaggcagtacttctgatacccaggtgagaatgtgcccaactttcatgcccctcagtctccgacctgtct

SEQ ID NO: 1560031 - DNA, 4001 bp, Homo sapiens
aacctctgcctcccaggttcaagcgattctcctgcctcaacctcccaggtagctgggattacagatgctgaccaccacgcatgggtaattttagatcaaactgtttaaaaaggggccacggcaggccgggcgctgtggctcatgcctctaataccaatactttgggaggccgaggcgggcggatcacctgaggtcaggagttcaataccagtctgggcaacatggtgaaaccctgtctctactaaaaatacaaaaattagccaggtgtggtggtgcatgcctgtaatcccagctactcgggaggctgaggcacaagaatcccctgaacttgggaggcggaggttgcagtgagccgagatcacgccaatgcactccagcctgggcgacagagcaaaacaaaactctgtctcaaaaaacaaaaacaaaaacaaacaaaggcgaggggaccatggcagcaggcaaatccataccaacccatcacacagacggggaaaactgaggcctgctttctcactcttggaataggaaagctgggaggccgtggcagaactcctgatgcacatagcttgaggctctccagctgtcacgctgatggggtggagggtgcagaaactacctaaagttttggggctctgtagaacggctctctgcagctttgggggtcaattggggatggtgacgtggccacagctgtggtagaggacaccccttcttgagatcagggatggagataggatggagagaagagtgtgtggtcttcgtcatctgctgatccttgtgggccctctgttcttgaactcccaagtttccaggtcctcgtatctccaataccaggccttgaggccttgaggctttctgtctggagacccctgaaattttcatcctgcctctaaattacccaaagtctcagaattacccaatcttaggatcctcagtcccctgatcccttctgcccacctgatcttgacctcaaataggaccctgatcacttgtggccccacataactgagtacccagaaacccgggtctctgttctcctgggtcctcaagaccccctggtatctgggtccctggagctctggttcatttccttggatccttgtgatcccagatattggggtgctcagaaccccatctctgttttcataatgcccatgtctccagatatcttggttcctgagattgtgacatcctgagatcctcagtatctgtctccttagaaccccagtctctgttaccctgactccctttgattctaataatatcaggatacagggaaccccagtttctccagcccagctcagcttcctcataacgctacacatctggcttaagagcttgtactttcttgcccctaggataccaggctctgtgccctgattccctgacacccccatatttgtaccactgggcattgtccctggcccccccccccccacgtcactcagcccctgggctttgccccccagggtccccaaatccccagatcccaaggcacagcttactggctccccgatgatctcatatctatatccttggaacctgggcttatatcctcttgtcccccaggtccctggagagacaccggtttgtgcctcaagctctgcctcctggctctggtgaccctatgctctgtgtggatcccacccggcccggaccctcgggggccactcaccggggtagtaaagcgcctccggccgggccaggccgtgggggggcccggggaccgccggcaggtcgcagccgccgcgcagagggtccagggggacgacaaggcccgcagcgccgcggggagcggcgggctccggggagggcgcgcgcagcgggcgcttgcggagcggcagcgcggcgcccgggagtccggcggccttgggccgggtgcgcaggtccacgggcccctcgtccatggcccccgcggggcatcggggcatggggccgccggggacggcggccggagagcggctgggctcggctgcacgggagggtggtttcgccgggcgccgggacttcccctgcagccggctgaactgaagggacttttgtcggccggggcggtgccggccgcccgcctccccgcccccggcccccccggggccacccgtacgccccaggggtttcctggacccgccgctgctcccgccgctctgaggtgcagcctgccctgcgccccgcccgcgccgcgccccgcttgccccctcccggcccgcggcgcctggggcagccaggcctcggcgggggagggagaggaaaggaggggtggggggagaggaggcggggtcggggggtgggggggtgtccccacccctgctgccaagggccgctctctctgcctctgtttttgtctttctggccctatctctcaacatctctatctctgagtctgtaactgtctctctggttctcctgtctgagtaggtgtttctctccgcaaccccgcgtttgtctctgtgtgctctgttccgtctctgtctctctcttttgtctctttgtgtctgtcaccatctctctgcctctcagttgctgtctgcttctctgtctctcaggaggccttggcatctctgggacggggtttggaatctcggttcccacttactcgctgggtgaccttggccaaacacttcccctctctgagccgtttcctccttagtgggagtgaagagacgcacccggggcagggactggcactcggcaggcggccaggaacgattcctctccctcccctcttccatctctgccactccacgtgcctcatcagctgtgggtctaaaggggctgggggtggggtgagggtggggagcgctccactgattgtgtctctgcactcgttgggggccctgcccccagccggggcccgcggggcaccggggtgggtgctcggaaaatcctaggtgcacagagagaaagagacatggagacaggcgcagagatcttgagagaaagagagatagcaagagacacggacaccaggccagagtcagcgcgaccgaggccggtgctgcaggagcggggagcagtttggcttccccccgacttcccctcccacctcgaggaggggttgatgggtggggaacaggctaggcgggttgggggcatgactcaggctggagatgggagggagggaggagggaggcgggactcttccccgtctcctcccctcctctccctctccccgccccggggtggggccccgaaggtccggggctttcccggatttccctgggggcggggcagccgctggggttgagtccgggtcactgagtcacaggaggcggagagggaggctttggggacacagggggcggggcatgggggctgcaccccggacttgcccagggggcacgcggcgtctctctggttctctcccccggtctccttctgtcttcgaaacttgcctgacctccctctggttgtctcctgccccgccctctgtctctgtctccccatctctgttgctgtctctgtgtcccctgggaccttgaaagtgggtattggggccccgggaagggactttggccggactcgggccccacccgagtggatcgttaacccaggatgtgagaagtggctgtgtggagaggcctcaccccttcccttcctttcgacctctctctggatctcccttatcccccttcatggcgaaacatcccgagcacagacctgtgttaattccacctccaccccttgctcccggtgggacctcagacaagccatcccctgccttgagactcagtttgttcttctggaaaatgggaccaatggcaacccctgcctgctggtgttgtgggggccacagcaagggaagaggggaggaattcggttggacaggctgggggctgtgttccctgcccatccaaccccacccctggggaccctcagacacaggagaggggtgtggagcactatcccaatgcacagaaaggaaagctgaggtttggaggggcgaggcttagggtggggaccctcagaggtagggtgggaaggacacccaagcctgtcccact

SEQ ID NO: 1560032 - DNA, 4001 bp, Homo sapiens
actggctccaccagcggttcaccaccagcgtcacataaaagcctgcaggggagcggggaatgggggctcagtggggacaccagggccaggggtttgggggcccaggttgtgggagagggggcaacgtaaggtctgcatcagggaaacccgagcgtgctggccaacctgaccacgtttgggctgggaacttgggggtccagccctgaggtcagaaaggacagttgccgggcgcggtggctcacgcctgtaatcccagctccttgggaggctgaggagggtggatcatgaggtcaggagtttgagaccagcctgaccagcatggtgaaactccgtctctactaaaaatacaaaaattagccgggcatggtggcgcacctgtagtctcagctattcaggaggctgaggcagaagaatcacttgaacccgggaggcggaggttgcagtgagctgagatcgcaccattgcactccagcttgggcaacagagcgagactccatctcaaaaaaaaaaaaaaaaaaaaaaaaaaaaaaaggcagagcagccctttgggtcactggctacttgggagtcacctcagatgtgacattgggatcccagtatggggatagaggcacagagcccatgttaggggcacgtgggcagactgttgcttgctgtgaaggcatagggacctaaaacaaggggagaggggcctggtttgtgggggtgtacatcagagacatctggtcaggcttgtcacagtagccacacccggcccctgagccaggaacttctgaaggggttggggacagggtctacatcagggagccttgggcaggctagggtcacttgtggtcactaggggtccaagacttgtcagagaaatgcccccaggctggaattgagaggatggagtcctatggggtccctggagggttaggggtttgtcccccctaataacacaacagacactggtgagaatccccagggtgaccaggaataagtcctgtgtgtgagatggagctctcctgggggcacctcagggggcactgtgaccccaggtgacaccccaggtctcagagtgtagagccacatctggcatcttcatgatatggatccaaaaatgggtgggcagtgctgtcggggttggatttgaggggggggatctcagaggggcaggaatgggggctcctcaaaaggcatgaatggatatgggtttctcagggacatgggaacgggggacttggggttggaccgcaccaagcacgaaggagacagggatgaggctggcatactggtcacaataaatcacaagcttctcgaagtagcgcttctgcccttcggtcagcacaaagctgcgggatagagatgaggggtcacaggtcacaagggtgactccatccccagcttcagatctctcttgctgtgcccctcaccctggcttcttttataatagctgcccccagccgggtgctatgggtcacacctgtaatcccagcactttgggaggccgaggcaggaggatcacttgaggtcagaagtttgagaccagcctggtcaacacggtgaaaccccatctctactaaaaatacaaaaaaattagccaggcatggtggctggcacccataatcccagctactcgggaggctgaggcaggagaatcgcttgaacccgggaggcagaggtggaagtaagagaagattatgccactgcactccagcctgggtgacagagtgagactccatctcagtttaaaaaacatagatatatatacttatatatctctatatttttataatttttatatattatatatatataatagctgccccccctccgctagaacatgagcacctcagggcagcctcaccggtaggcagcactcagcgccatgtagaacccaaggaagcagagcagctctcgccacaggagtttgtagatgctcccacgccacagtagcagcagctgggagaagccaccgaagcgggcgttcgccactcgggctgtgtaggtgacggtcatcgtggcacccggcaggtgtggccaagggagagtgggtggcccgggtgggggctgcgggtgtgggtggagaggtgcggggataactgagcacagggattccacccatgttccggcccgccaccccttcagtcctgacccttgcctgagttgccttctcctcccagctttactcagtctagtccagcccccagtgcccctccctgaccttcatctcaggctgtccccttccctggactcctggccgtgggctctggtaactgccgtcccccaccaccaagacccttgagtccctgcagtcagctcccgagtcaccctctgcccgatccccttcacccagaggccacctgtagcatgccccattccgcaagtccccagcacctgagtttctaggttctcaaggctccacctctcccaaattctctccctcagcccctatttctggctcccccttctccacttccccagctcccagtcttgacccattctgctccctgcactccctctgaagccctgtccctaagcctccaggtcccctagcccccctgccccagcctgtgcaccttctgcttaattgccctggctccccccactcccttttcctcccggatccgccttgacctttcctctctccgttcccctccagccttccaagccctccactccccgccccgggaggactccggatgcattcctgcccgcaggttccctcttccctcagggccccctatttccccaagcctgggctcatctcacctgtgttgaaggtggccggtgcaaggacccacagggacagggatggaatgggcgggtggctttggcgttgggtggggctggggagtgggcgtgcctccctttcctggtcctcctccctcggctaggctgtagcttcagaattttgtttggagtcccacaagtttgttacctggtacggggggagaaatccgccttgtcctccctcgcccctccctgttcccctcccagtcgctcactggcaggtcctagggatctggaacccagaggttgggggaggaggcagggatggtctttttcccagtcccagaaacacacacactgctcagtgaggctgggtcacttcacagtcacctgtaatcacacagtgtcacagagatgcacgcagaaacacacatcatagtcccagaagcaaatctagctgctcttaagacagcctcagccaggcacgatggctcacacttgtaattttagcactttgggaggcttaggtgggaggatcacttgagccaggagttcgagaccagcctgggcaacatagggagatccccatctctattgaaaaaacaaaaagacagcctcacataactatggttacccagaggagcagtacacactgtcacagaaccttccagggtcacacaagacacacctacctcgacccctcctgcctccatcacgcatatataaggcaggtggaccctgacatactaggctctcctctttcatacacacggctctcccaacggtctgaattccgtcatgatcacgccatgtaacaaagacacccacacaaccagccaagtgccagaccccacccagacctcagaatgccttcacacacacagtcatactccactgcaaggaggttttactcccgatcttccctgtgcaaagatgcagccatgatcacacaccaaatgcaaaaaccctttcctcagtgcggtggcacacaatcccaggctcagagcggggcctgaggttcaccaatcttgcaaagacacacacaacagccacccctccctcaagggtcccctagctatcaccgctggtgaaattcaccagcatttgtacaccaatatgtgaaggcaaccccctttccaacgctccctcccggcggcaggcccacacccacacccacaggtctcagatactctcagcattgccatgaacacacaagcttggggacacaaaaccttgtcctgcatttggcatggattctgggcagatgttcattcttcacagacaca

SEQ ID NO: 1560033 - DNA, 4001 bp, Homo sapiens
tcagggtaataagaacatagcacacccactgtagagttacattaagacataaaaactctttgcttgaaatcaataaccgcgctgcacatgggacatctgtcaactgcttcagcacattgtttacaagtgaccagatgtccacaaggaataaaaacaacagcgatatgtctgtccatgcagattttacaaagcttctcctcttgcagacgccttagcggctcttcagggctgatttctctctgcaatgaagtctgattcaattcattttctgtagtgtctttctgagcgctcactagatctgcaacaagaacctcaagcgttttatagttgctcccagatgtttgaattctttcctccattattttcttaacgtccttgaaatcaaatcccattcgtatagcttcttgtagcataggattagggaagatggtatcactgattcttttagttagtgatggtgttttcttggtagtttgtaccagagctccctcaagtgaacgggttaaatgaatgttgtttatatattcatgtcccttctcttctagcagatatttgcaacctggataccatttagcatgctgttcccaaggatcttccttgggcttccagttggctagccctcctccacagtgaaagcactgtactttatcctcttgacctatagcataaaatccagctcttgcaagctgctctttgttaacggagtacatccatgtcccaaaagtaatgagccgggcttcataacccgtcatggatggattccttggagaacttgttgaatttgagaaattcctatcagaactcgcaacatcagattcacctcgaatattaacgttgtggcccaaaataaagaagcaattaggaaaatgtctcctgtgttctgaccaggcacgatcaccaggttcccagtttttcagttttccgccacaacagaagcactgcacttggtcatcagtgcctgtgtagtacagcccagcactggccagctctctcggggtcaagtgggcagaggctggccagttgtgaaacgactgttatctagcttcttcactatgcatggcggggctcctcgggtgtatggagtctgatctatccaccacctgtccagctctcaaaagccggtctgcacgagtctcagacggcctgtctaaagcacaacgcttttcctctcccagatggttttcaacttggtattgactatttgggacaccaggatttgcaggtttcgtggcactgtcttcaaaataaaagctgcggataaacctgcaattcggcgctgctttcttgtgtttgtcaactcctgagcccccacgttgccacctgtctaccgcttcagggcagctaaggccccccagggcgtctcctccaacgcgccgatgcccaggcaggcccaccacctgcaaagccagcaaacgtttttgatctattaatctcttctactaattcttcatcctcattgatgtctgcagacacatacgttttagatccttcgaaactgttcaaagttatcttctcttgaatataggacttgtccaccgtctcgcgccaggatagcggctccaaccgcccaggcgatcggccttgtcccaacgggagggtcccgcggagggacggtccgagccccctaccattggaaatgccaaaccctgccctaagccgggcccagccacccaggctgacgacccacgattagcaccgcgcgctctggggagccgccaaggtgcagccacttcccagagctccgaagggtcagcaagaaaagaggaagccacgaacgctcccagcctccagctggaaaccacgcggtggagtgggcgcttgcgcagtgagcacctcgtgccccacgcccgtgtctcgttcttttttgtgcttgtttcactttgcataattttagcatgatatcgtccagctccatctacgttgttgcaagtggcattttttttaaaggctgagtattagtgcactgtgttttatacacacgcgcacacacacgtgtgtaggttgcatggcactatatgtatatatagtgtgtgtgtgttgtatgtgtatctcacaaagtctttatccatttatctgttcgggcacattgaggttatttccgtatcttggttattctgtataatgctccaaaaaacatgggaattcaagatatattttggggattgtgttttaaattcctttggagattttatatatatgtgtgtgtataaatatatattttttcatataaatataattatataaattataaaattatataaattataccaaatgttataaaatatatttttataaatatatattaaataaatatatattatacatacatatatttttgggggggcagagtcttgctctgtcacccaggctggagtgcagtggcacgatctcagctcactgcaacctccacctcccgggttcaaggaattctcctgcctcagcctcaccagtagctgcgattacaggtgcctgcaccactcccagctaatttttgtattttgggtagggatggggtttctccacgctggccaggctggtctcgaactcctgacctcaagtgatctgcccgcctcggcctcccaaagtgctgggattacaggtgtgaaccaccgccccctgcctcctttggatatttacccagacatgtgattgttggatgaaatggcagttctatttttatgttttttgagatacctccatagtagtttccacaatggctataccagtttacattcccatcaacaatgtgtaaggatttcccacatcctcactgacacttatctttgtctttttgataatagccatcctatcaagtgtgaagtggtagctcattacagttttattttacattttcctgatgattagagatgctgtctctttttcatgtctgttgactatttggatttcttcttgtgagatgtgtctatttaggtcctttgcccattttaggacgagttattcatgtttttggtatcaagttgtatgagttccttatatattttggatatatgtgtgtgtgtgtgtgtgcatatatgtgtgtgcatacatatagatagataatatttttttcagttgtattgcctttctttttcttattgatttgagtacactatatatgctggaaacaagtaattccttggtttttgttctatctttcttatctttttattaatatcagctcttaaattttttataaactgaattgtcatttctccttttatacttcacattaatgcttttcgggctgtgtgagaaatcattttgttctcctttgatctattctaaaaatttcattagtcatctttacaatttaaatcagatatccattcagaattaagttgttgcattgcactaacaattgatactatgttcagttaagcctcatgacttttactggatggaaaccatcatgtttcattacggtttctactctttctctcatcaccactggagctcacatttctgtgaagccttgtggtcattctctcccttcttcctgcctactggacatgttagcaatcccacagcactacaaaacaaagctttgtgtccagaatctttaatgggccttttttctcaaagtatcaattattttcatatatatatatatatatatatatatatatatatatatatatatagacaaagttttgctcttgttgcccagactggagtgcaatggtgtggtctcggctcaccacaacctcccccacaccgcccccgaggttcaagtgattcttctgcttattcattttacaaataaaataaaataaaacaaaataatcccacctactctcctgaatagctgggattacaggcatgcgccaccatgcctggctaattttgtattttcagttgagatggggtttttccatgttggtcaggctggtctcgaactcttgacctcaggtgatccacctgccttggcttcccaaagtcctgggattacaggcatgagccactgcatccggcctattttcatattctaaagggagaagtcc

SEQ ID NO: 1560034 - DNA, 4001 bp, Homo sapiens
ctaaaaacaaaacaaggacccagcctagggtgaaggcagttctggaagtggagctaggatgggaggcgtagccaactgagtgaaggaagacggcagggaagctgtgccacatcctgggttcttgtgggaagaacgggaacaagctccccaccataagcagaaaccaaactcagaaaggcagagcagagcccagtgtgtggtggctcacacctgtaaccccagcactttgggacgccacagtgggaggattgcttgagcccgggagtttgagacaagcctgggcaacatagtgagaccttctcccctcttcaaaccgacagaaaaaaattaaccgggcagctggacgtggtggtgcaggtctgcagtcccagctactcttgaaggctgagctgggaggatcacttgagcccaggaggtcgaggttgcagtgagcagtaatcccgccactgcactctagcctgggtgacagataaacaccctgtctccaaaaaaaaaaaaaaaaaaaaaaaattggtgagcccccagggtggaaacagattaaggagcaactatgtaacaaaggctggagccaagccccaggggaaggctcagaaccaggcggcagggtcaggatcgggagaggaaccagatctaaggatagtggggccctggtctccgcagtaggggttgaactatatccaatataaagcattatccaaggggaccggattagcccccatgggtgacaccaagatgggagcgggggtggggggtgataagagacacaggagacagagtcaggtcccagaggcagcaaggcctacccccaaattgcagtcaggttgggaagtagaatcatggctaggcccgcggccccgggtctttctcaggctcggtccctggcacgccgcggatgtccggcagcaggcggcagccagccacgatgtccagacgctcggccagcgcacaaaggtccccgcgcgccaggcgcacgctgtgggccgccgccagccccgccgcctgggctgccgccagcctactagccagggcggccacgtcgcggcctgcacggcggtagacaccgctcacggcggccgccacgtcgtggtccagccgcgcctggctctccgccagccgaagttgcaggagcgagcgcgcgggggcgggcgccggggcctcctccgtgccccaggcctcctccgccgattcccgctgcaccacgagtggaggcaggtccctcggcgcggccgtcggttccggctccggctccggctccgagtcggtctccgcggcttccccagccacccgcagccccgtggggcggccgcgcgtcgggcccgaaggacccaggtacagctcctcctcctccgacgaggacgcagagcgctcggaatccgtctcggtcgcctcccccggcaccaccgtctccggcctccgcaggggcctccgccgacgaccctgggacgccatggcaccgaactaggggagaagagcgaagggactgcacgtgagaccggcgccgcggtgggtaaaaggcgcaggtcctggattcccagccccttcgctgattctcttaacgacttggtgtcagctgctccccgtctgggcctcagtttcctcttctgtaaactgggtgatgatgggggttactggaccccaggctcttcagcgtacagatggggaaactgaagaccagctcgaacaaggatctggggcccgagttcccggagtcccaagccgaggtctttacgaatttgcctcctagtagaggccacaccctccacctggtccaccatgccaatctcagacccggaagcacacgggcccgtgagctgctcgggaccagcgccagagtcgcagaaaggatgacagtccgactggactctgctgggggcactcatgggatgggagaagcgctaacgccaaagaccgtacccggcagctgacgctcggagcttgcgagatccgcttcctaacccgagtgctgcgttctcaccgtggcagctgaagggctgtgatttcaaccaataggggagcgggttgggcgggcattagcggccaagtcacgtggattcgcccggctaccaatcaggaagcaagttctcagcatcagctttgagtgagcgtgcagaagagtcacatgaatggaggaaccgccaatagagaaacagctgggccggctcttccaggttgtgcgacgaggaaagtctggagtggaccaatagggattttaaaagccgagtatgtcacgtgtaaccagtaatttggccaataggaatgctcgagaacccggaaatagggaagggacggcagtaagagcagaagatgttgccacatgtggccagagaaggcgtaggcccgccccctagtgtcccaggctcacgcgcacaccacctgagtccggggcggggaggcggggctagtctaaaacaccaatggaagccggagtaggagggctcgcgccatgacgcaagaggcgtggcttaccaagcctggccaatgagagctggaagcgctgggcgcatctttaggcgtgcgaggagggggcatggcggatactgtgttgtttgagtttcttcacacggagatggtggctgagctgtgggctcacgaccccgaccccggcccgggggtgagcgccgggctccgtggggaggaagcgggggccaccaaggtaacgcctctgggagagcggagggcgcgtcaggcgtccgggttcgaacccggcccagccccggccttgcagggcaacgtctggccctggcttcctcctttggaaagtggcgttcgcgacggtgccggctcggggttattgctaaattgagcgcgatgattcagggtaaagcacttagctcaaggcctgagtaagcggctagtaatcataataatgctgttattgggcgtgtgctgaggactcgcctcccccacttactaggtgtgcgacccaatgacttaatctttgtgtgtcctagttttctcttttgtaaaatgagtatcataacgtacctaagcctcagcgtgggacatttatttattcgacacccacttattgagcgtctgttgtattccaggcaccgttctaagacagaatcccttccttgtgaagcttacatttcactaggggagtcaaataataaaatgaaatatgccggctgggcgctgtagctcccagcactttgggaggccgaggccgtcggatcacctgaggtcaggagttcaagaccagcctggccatggtgaaaccccgtgtctacaaaaattagccgagcatgatggcgggtacctgtaatcccagctactcgggaggctgagacaggagaatggcttgaacctgggaggcggaggttgcagtgagccaagattgtgccattgcactccagcctaggcgacagagcgagacttgtctcaggaaaaaaaaaaaagagataatggggttttgccatgttgcctaggctggtcttgaacccctaggctcaagtgattctcccgcctgggcctcccaaagtgctaggattacaggcgtgaactaccgtgactggcccgggactgtgtgtgtgtgtgtgtgtgtgtgtgtgcgcgcacgcgcatcctgctcggtcgcccaggctggctggagtgcagtgatgcagtcatggctcactgctgcctcgacctcctgggctcaagcgatcatcccacttctcagcctcccaagtagctgggaccacaagcgctgctggcgccaccacacctggctaattttttgtattattattattttttttagtagagacgggttttcactgttagccaggatggtctccatcttctgacctcgtgatctgcccatcttggcctcccaaagtgctaggattacaggcgtgagccactgcacccggccaatttttttttttttttagtagatacggggtttcaccattttggccaggctggtgtcgaactcctgaccttgtgatccacccgcctcggcctcccaaagtgctgggattacaggcgtgagccaccgcacctggccatgtaag

SEQ ID NO: 1560035 - DNA, 4001 bp, Homo sapiens
atgcagtggcgtaatctcggctcaccacaacctctgcctcccggattcaagctattctcctgcctcagtctgccaagtaactgcgattacaggcaccagccaccatgcccggctaatttttcgtatttttagtagagacggggtttcactatattggccaggctggtctcgaactcctgacctcgtgatccacctgcctcagcctcccaaagtgctgagattacaggcgtgagccaccgcacccagcctctttttctttctttttatgtatttttttaaatttgagagacagggtctcaccctgtcacccaggctggagtgcagtggtgcaaacacagctcactgtagccttgaactcctgagctcaagcaatcctcccacctgagccttctgagtagctgggactacaggcatgcatcaccacgcccagctaatttattttttttttgtatttttgtagagatggggtcttgctacgttgcccaggctagtctcaaactcctggcctcaagccatcctcccgccttggcctcccaaagtgctgggattataggcatgatccaccgtgcctggccagcccttccctttgctgagggggacagcaaagctgagagctgggaagagatttttcagagccacagctctgaagctccctaggctccagttcttaaccctctgagtgcagtcccagctatgaccagcagggtgggcgagtggaattcggtggaattagtggatttccaggtgactcagcgcctctcaacttctctctcttacttccttctccattactcccgaataaatgcttatcagcaaactggtttttactgagaggcccacagctccccattctccacaagtcaagatcctcacgtggtctccctggggaaggggagagttatggacctagagaagaactttcagagtccctccaagggagacagcagagtggggtcctgttggcctccacccttttggggcacgcagatagtcaatatcttcagcgtccccaaggcctgcaagggtggggccccatatctggaagtcccaggcccagctgggagttggtcaagtctgggctgtgggggcagggagtgctgggggatggttatccccttttctgccctctctcctggggcaactccaaattttcagccctcattgactttcccaggactgctgtccccaagtcttcactcatgtctctctgtgactccttcccattaggtactcgcagcaacctgaccccccaactttttcagtttccagcctggggacttgtggtggttaagagcatgagctgagttcaaatcccagtcctgtcagttaacagctgtgtgatattgggcaagtcactctctgggtctcagttttctcatctgtcaagtagggtgatactagttcccaccccattttgaaagctctcatgtgaagagacgacagagcaagcttggcttagtaaatcctctctgggagtgcgaacaaccaccaccacaaccacaataatgacaaccgcattgcataagagccctggacttacacacgactgtgccagtggagtcctcccggggctcccggggccaattcctctctggcttggactcacataaacttggatctcacatctttccccatttctgcccccgtggccacttgctttggcccctgagtcctcatacacctggctggggcgctcatggccccaatcagcctcggcccgaccccatggtgccccttcctaaagttctgcccgtctgtcccgtgacatgccccgcccgccccggctcatgcctgcttgcaccgcctgcgccagggtggtgagcccggtctggccagtggcgccgaagatcgcgatcttcttgacggccatcgtacgggatcgtgggggtgcaaggcctcagagtctcggcacgcgcgggaacccactggctgctgggcggtgctctctgccctactcaagccaggaacaacggggcggagctggctcgaagggccacgcctcagactctccgcccgcggctcaggtcaaggggcggggcctaacgcggatgggcggggcaggcgtcagcttgcattcgctcaccgtccagcaccgccctctctgcgcgccacttagactggaaggcggggccacagaaggccacgcctccacatagcaacaaatagagtggacggagccgagataacttgtcactcagcgccctgcctccgcgctccacctcccggagaggggcggggccaggcgagcctcacccacggcctctcgtagctcacgccccctctcccggagcctggagcggatctggggcgcactctaagccccagggcctcccagaaccagcaaggggagaaagttaggaggacagagtgtgtgtgtgcacttggatgtaagacactgtgtcacggcgtacctatgcacttatatgaccctgtgtgactcagtgacccggagggcaagcaggactgtgggtgacaccttgtgtcatcctctgagtgtgatcccgtgttacagtgtgactacacgtgcgtgacaccacgtgtggcaggcattgattctgttcttttgtgaccttgtggtgacaccgtgggtgacactgcgtcagcctgtacgatagggtgtgggacgtgtgaggtgtgctacatggaagcgtgagactaattagactgtgacagtgtgtgacaccacatgtctcgtgtaaggatgtgtgacaccgggaccccattcgagtgtgtggctgtgggtgtctgtgttgagctgctcattgtgaccccctgtgactatgatgtgtgaggtgcggcggtgcagcatgtgcggggcgactgctatgaaggttcgagtgtgtagagtgtgtgacactgtggctgtgaagctgtgcgtgatgtgtgggcctatgacactgtttgtgactgccggggagtgtgcggctgtgtgtgacaggtgcatttgtgtgtgacgccgcgtgggcggtggttaccctattggatttgtgtggtggtgggtgacaccgttccagtgtggacgccgcgtgtgacggcgtgagggtgtgaccccgtgagaccccacaggagggagtgacggcgcgcaagcgcgtggatgcgggggtgagtttgtgcgccgaggcccccgcgagtatggcagcgtggcgagcgtgaccccgtgggagtgtgcagcgcgtgacgccgccgtgccctcgcgagtgcagccgtgcaccccacgccgcggccgggtgtgactgcgcgtgggcctcgggcggcggggcgcggggaccgcgggcgggagggggtcccgggggcgcgctgagcgcggcggcggcgcgagagagggaggcgcggcggcgcatgcggatctggctgagccgcgggccggcggggccgagctgagccgggctgggccgggccgggccgggccgggcagcggacgccgacagggagggcggtcggtcgcggcgagcagcggagacagcgacgctggcggccgcgggcccaggtgagctgctaggggggccgacagcccctcccccaagtatgtccccacctggcgagcatccctcctccgcgcgcacggggcatggctggagccccgggtctccccggctggagggaggcaaagggtcgagggcaggacgagcccacaacccccccacccggtctagcttccgcgccacgcgtgggtcttacccccaggccttgtccttcccaggccccctccttgggcgcagtgtctggaccgcagggagagaggcgcggcctgggaagggttaaagcctctgatgccaccgcagcccagcgccccaccagcctttgcgggggggggggggtgttggggggaggctcgcaggacaccccttcccggcttccctattacctgctcccttccttcccattcaatcgcgttatggccagagctgatcctcggcctggccagagggctaacaggagtgctaagggcctccccatctctaagtgtcttccactgaagaaaacagctgtaaccaccgttt

SEQ ID NO: 1560036 - DNA, 4001 bp, Homo sapiens
ttgaacccgggaggtggaggttgcagtgagcagagattgtgccactgtactccagcctgggcaacaaagcaagactctgcccaacccccgccaaaaaaaaaaaaaaaaaaaaagaaataactatggttatgtaagaataaaatatatattcctgtttttttttttcagacagctacacagttgttgagacattggtacttattctgctgcttgtgcttaaccacctaataaacaatattgttggctacttcctctggcctgaggcatcacagaaaaaactgagacgtttaaggatgttgtgaaccaagaaaatttgggaacttctgggttaatgaaaataaaaatgtaaattttccctctaaattcatagacctctgattaagcatgcctgttttcttttcttttttgagacggagttttgctcttgttgcccaggctggagtgcaatagcgtgatctcgactcactgtaacctccgcctcccaggttccagcaattctccggcctcagcctcctgagtagctggtattacaagcatgcgcctgcacgcctggctaattttgtatttttagtagagatggggtttctccatgttggtcaggctggtctcaaactcccaacatcagatgatccgcccacttcggccgcccaaagtgctgggattacaggcgtgagccaccgcacccggctaagcatgcctgttttcaaagatgttctttgcaatcataatatttaagtgaattttgggaaaatattagggatagacagtacttaacagagaacacaactgtaatgttttataactctgaacaggaaacaaactgtttccttggactaactttatttacaatctagtcaatagttcagacaaattagaaatctaacaaaagatatagaaaacaaaaaatccaaaaccagctcagaaagtttgaacactttctgcaatgatggagtccctacttgcaaagtggatggcagcaagccctcttcactggtatcctccatcaagtcatagttctctccatcgcccgtcccaattagctcctatccttcaaaggggctttcagggtctccagacaggctttgttctgaacccactcatcacaaagcagtctggccccaagcaacctgttcccagaccaggaaaggagattagaaagcaggatatagatagatacagacatgcagggcaggcttagttctgggactctaaaggcaagccagagaggaaaagagaaagaccacaaacaactgcccagaatctgctgattgctggagattcagttcccagttccgtccatcacaagtcactgagaaaaccaatgggttgggaccagctatactttgtatttgcagttctacctgaagtcctggcctcccagcggacctcttgaaacccagtaatcctgccttcattctgtctggtctgttcagactcacccctctcctaaagtgatggagcacacaggtagaaagacgccagggaaggcagaagcagtcgccaagacgatggctggttaaaccacacttagcagagctttatgcaagccatcatcacacagacctgcaccagggcctagaagagctccacaggaggtacctgccacttcttgagctgatgctgttatcgagcacttcatctgtattggcttagttatccacacaacaaccctaaaaagcaggctgcgactttatcatcttcatcatcatccccatggggacagaggcagagtggatggtggcctggttggctggacgtcatttggaacagtgtgtgcttcaagtcctctgctccacagctgtctccactcaccaagcacagtggcaacacccacaaggggcagaggcccagtcatcctacacgggtctttggcttggccagcagcaccacactttgctgtacccatcagtggcctgccttctctgcagaagcagctgggtgccatgtggcccataagctgggtcttaagtcagacttctagcagtagtattccaaagaatttcatcctcgtaaacaaatcagagccaagacctctccctgcagcacctggccatctgcttacaatgagatatatcccgtgtcataggtgaaatctaaaacataccactgtgctgaagtcatgaggtgtgggggcaaggggaagggacaccaagttgttatttatgcttcccaagcagtaagatgcctgaggggacatggcttaaatttgttttattccatacagactgccagccaatgccaactgactacagcccctcatgaaatcacaagttcacagtcacacatacccttcaggtagaggaggtcacctctccaccgctccaaggctcttgaataaacaattattttcagggaatgctagattctgcccagggacaaaaacaagaggatgagggaccctgactggtaaaaacctggtaatttctcaatacaattcaatttacagcaatttacatcttatcttgtcctagaaacatctttgctgaaatgctgattacacaacatcaatatcagaaggtctgttcccctcctaggtgctagagtggcatctacttcaaattcctgacagcggcttctttaattgtgcaatctgtgtcagtggggaagcacaaataggattacttttccatctgactggctcaggcagctggtgagaacagcgctcgtgtcatcagccagactgcgccgcctggagccgggccagtggccgtgcgccgaggcagctcttagaggccttaatcctccttcacgcagtgtgtatacaccctgccccccaccccttggaccagccaagtggtggggccccattacctcttgactctgcagtaccccagaccctgcaacttgccttggattagacaagccaaggcagagatatactggccttgctgctaggggagagtgtgagccacactcaagctctctgttccccactggaggggacacaggcacacaaggatcttgcagtcaggaggccaggaaactgggcgggacacaatctcaccaaccagaattccagtctctctgcttttgaaactcatcagcaggctaattaaactagtagcactgaaaatgctgcagcatcttttcactgcaaaagctgccagcaactggagggacaagtggctcaggtacagtgaaaggatccattgttacatgtgggttacatcatgttgctgattgttaaatctgggcggatggattcatgaaatgtaaaatgttcctgtgagaagcatgtagcaaaaacaaaactttgacatggacaagatcaaaactgttgggttggccaggcatggtggcttacgtctataatctcaacactttgggaggccgaggcgggtggattgcctgagttcaggagttcaagaccaccatgggcaacacagtgaaaccctatctctactaatatacaaaaaattagccaggcatggcggcgtgcacctgtagtcccagctactcaggaggctgaggcaggataattgcttgaacttgggaggcagaggttgcagtgagccgagattgtgccactgcactccagcctgggcaacagagcgagactccatctccaaaacaaacaaacaaacaaacaaacaaaaactgttgggttaaaatgtattccagcaggggcaggctaggctaacttttcctgtaaagggccagagagcaaatattgtcagctgtgcaggacaaacagcctgttaaaatattccattctgccatcatcataaaatgaaagcagccacaaataatcctgaaacaaatgagcctcactgtgtgccaaaaaaactgactggcctgcaggccatagtttgcagcccattccatagatttctagactttgtgaaggtaagagaatgtgatgttacatcagaaatgcaggatgcaaaattacagatgaaattaggtaacaatgccaggtgggtgggcacaaagacccacagaatgaagccagaggtggtggcaggtgtgtggatgacaacacctacttacactgaaaacca

SEQ ID NO: 1560037 - DNA, 4001 bp, Homo sapiens
aatccagcccccccagccccttcctccctcagacccagcactccaggcccccagcccctcctccctcagacccagcactccaggcccccagcccctcctccctcagacccagcactccagacccccagcccctcctcccttagactcagcactccagacccccagttcctcctccctcagacccagcactccaggcccagcccctcctccctcagacccagtccaggtctgaccccttcttctcctgtaactcaggaattcaggtcagcaacaccttcacactcttaccactcaggatctgggactttgaccctctccttttccctagggtctcagctcccagttacggcccagtcggtccccactcctgccagctctggccctgagcttcatagagactctgggcgttcagctcccatgtcacctccacccaccatccatccggcaggaaggaggccgcggccggtggccagcgttcagcaacagcagaggatgaacgccctttccacagccgctccaggagacgcgcctgctgcagcccaccttcccaccctccatcctgtttcccactctgagccagcatgccagagaaggggagaatgtcttaggccccacggcccctgtcaccccaacctgctgcctggagaactggaggccagaggacagtggggagggaagaggtttcccaggatggatgcactgcaccccggtctgcagctgtactgcagcaagaacctcaggtcccagcccggccccactctgcaggccgcctccatcccctccctggccctggagcccctccagcctctgcccctatggggactggagcactggggccccaaactccctgtcccaacactcaaggttccgaccgccctcctccctcagactcaggagtccaggcccccagcccctcctccttcagacccaggagttcagcacccctgcccctcctccctcagacccaggagtccagaccccagaccctcttccttcatactcaggagtccaggcccccaggccctcctccctcagacctgaaagtccaggaccgcagtccctcctccctcaaacccaaaagtccaggaccccagtcccctcctccctcagacccagaagtccagacccccagcccctcctccctcagaccctggagtccaggcccccaagcccttctccttcagacccaggagtgcaggccaccagcctctcctccctcagactccggagtccaagcacagcccctcctccctgaaacccaggagtccagacccccaggccctcctccctgaaacccaggagtccaggcccccaggccctcctccctcagacctaggagtccagtgcccagcccctcctccctcagacccaggagtccaggcccccagcccctctcctccaggacctgagtctgcgccccccaccccctccatccagggacccaggagtctgaatcccaagtcccttctctatgaggggcccaggggtctgggcagccagcccctgccatttgaataccctgagtcccgcctctgccgccacctccaccctgccccccgccccaggtgtccccttctgctaggctcacctgtctgtcctttgcccagcgtcttctccagccgataggggcccacatattgggcgtgctggggtgggtgggggtgggggtgggggaggtggtaggcgggagagcccccacctccctccttggccccggacgacatggtgcccttggtcccggcccgaccggtcccccggccgccccccctgcggccgtcgccccgtctctccggtgggggccggcgaccgctccgtcccggcccccccggctgccccccacctctccgggggtccccagggggctgggctggccccccccagtcggcgggccgcggagctgggggagggggggctggcccgggggggtcaggccccgggagtcagcatggcccaggggggctgcggggccccccctccccagcccgtttctggccggccccccgcttcctgcgcctccccccgccgggggggtctgaggtgcgggccggcggatgctgcaggccgaggtcccccccgcccccccacgcgccctctctcctccgcctcctcctcctctccgcctccccccgccacctcgtcctttctctccggcacgctgacatcaccatccggggactccgggcccttccccaaagttaaccctttcggaggggggagggggagcgagggggggcagggggcgggcctccagctggagggatggagaggaggtgggaggatgcaggagagaggatggagggaaggatggagagagagagagaggacccaacagatggggcagagatggagatacacaaagagagatgctggctgacacagagacgggagacaggcagagacgccagagggatggagaccaccagagacaggctgaggcagagagggaggaagggcagagatggacagggacagaagagaaggaaggaatggcaagccgggaaaacagacagggagagggagagaaagctgctggaagccgacagagggatggagagagtcagagattcagagagacagagagaggaagaccaaccagagaggtgggggagagggggcgcagatggagctgtagagagggccgggggtacacacaggtggagggacacgtgctggggagaggtggggacatatggagggagacagagacagagaggggaaagaattcttggagttgctgacccaaaattcatgtctgtttccccagccccctaaggccacccattcagggtaagggtaagtctgtgtccccaccaatgtcaaggccccatatctacccacagcccagagtgattttggattctctttacagagaagcttccagaaccccctcagtttccctgtgttatgtttttagacccccatatattctctgtgctcgtcatagggtcctttatatcttcatgtggaccccagtacagcccatacatccccactgtagcaggtccacaagcatgtgctctgcctgtgagtaacccgcctgcccccattagctttccgcataaaccatagatccctctatgtcatgtacccgcaagtgttagacacccatttaattctcaagtcccctgtaaagcacacccagggctgggcaaggtggctcatgcctgtaatcccaatactttgggagacagaggtgggaagatcagcctgggcaacacagtgagaccccatccctacaaaaatttttttaaaaattagccgggcatggtggcatgtgcctgtagtcccagctacttgggaggctgaggcttgagtcagtgagttctaggctgcagtgagctacgtttgcaccactgcactccagcctgagcaacagagtgaggccctgtctctaacaaaaataaaataaaataaagtgcacacaggagcctattggctcctgtgagatttcccagtcccccattcaacaccttgagtccacacatctttaatgagtgccaaatctcagccaggcactgttcctgttggtaagaacgtggcagtgacctaaatcagcaaaaaggcctgtcctgtggagcttccatgctggtggatgaaacagatgatcagcaaggtcaataggcaaaatgtatggtgtgttagataatcatgtccgtgctgaggaggtgactacagcagggaagggggttaagaggggcctgttgagcagggtacaattttaggcgtccggctttttttgtatttttagtagagatggagtttcaccctgttagccaggctggttctgtagcctttttttttttttttttttttttttttttttttttttgagacggaatcttgctctgtctcccaggctggagtgcagtggcacaatctcagctcactacaacctccacatcctgggttcaagcgattctcctgcctcagcctcccgagtagctgggattataggcacccgccaccatgcctggctaatttttgtatttttagtagagatg

SEQ ID NO: 1560038 - DNA, 4001 bp, Homo sapiens
cagactccctagcagctgggactacaggcgcccgccaccacgccaggctaattttttgtatttttagtagagacggggtttcaccgtgttagccacgatggtcttgatctcttgacctcgtgatccgcccgcctcggcctcccaaagtgctgggattacaggcgtgagccaccatgcccgacctcttttttttttttttttaaagacagagtctccctgttacccaggctggagtgcagtggcatgatatcagctcactgcaaccttcacctcccaggttcaagcgattctcttgcctcagcttcctgagtggctgggattacaggcgtgcgccaacacgcccagctaatttttgtatttttagtagagatggggtttcaccatgttggccaggctggtcttgaactcctgacctcaggtgatccacccgcctcagcctcccaaagtgctgggattacaggtgtgagccaccacgcccggcctcactataaatctttaacccagaaccaaatgggggtctcaacaaaggaagaaattttctatgaagcaagaaaggatgtcatgcttttctcccggaaaaacacacctcaatccatttcccaaatgcgctctccaaaccacgtttgcccaccctcaacacacggccctcctaagacagcactggaaaccgaatgcgggtcagagtcggctaaaaacgactttctcactatttcctgcgctgaatcgggtggccagggccccctcactgtgaccttggaacctcgacttcccacagggctgtttcctcgcctgtaaaggaggaggggcgttcagagaccacctcattctgggtgctgaatccaggcagaatcagagggagattccgccttcccttccacgcagggcccctcgagggagcctgcgaggtcttaagagtctgggagaacacccgggggcaggtgcacgccctaggcaagacgccagggctaaatcccgtgaagaacggtaatcccttcccgatccggagggctgacccactcagagcctccatgtgctcttggaggacaaaagccccttttccagaagggagcgccaagatgatcgctccaggccgcacgggcccttgcgggggccccagagagtctcaggggagggtctctgaccctaacactcgcaggcagggtggacccgtctccagattccacgcccaggccgctttccccaggtcctgcggagtccagccccagcaggacgggttgggcaggcaccaaccagcccctgacccctggctccaggccaaaggggacgctcacccaggctttgggtctcccttctcctggccgatgggaccggcgggcgggccacctccaaccgccttcgcagacgccctcacccaggaagcaggtcacccccaaccccaggtgaccgaaaagcaagacgcccacctcccctgaccaagaccggcctggccaggaccccctggctcccgcctccaagcagggagcttcacgcccacacacagaggccgggctcgaggccggagcgcccgggggagcccggcaggccgcgccgggaggaacctctagtcccccctcaaaccctgggacttcacccccaagctccatgctggcgcgggaagcccccggggccggcctttcgcaccccaggccgccccgcgccgaggccccaggctcccgtcggcttcgggtcggcaccgcggcctccattcccggcccctgcaggaccgcacccccgccccctacccgctcctcaccagccccggaggctccgtgggtgcccagcagcgcgaatcccagcagcacgaacagcgcagccgccatgattcctattcctcgccggtcctacaacctccaaccgctgccgccgccgcccgcggccgctataaaaagcggcggaggcgcggaccgggcgcgcgcacgcacggcgtcatctcgggggcggggcgagcgccggggacgccggtcgccccgcctgcgcacgcgcgcacacgctcgcatgtacgcgccggctccggcaggctcacgctacggaatccgggcggcggcgcacgtgacccggcgttgctaggaaacgggagtggggcctgcggggacgcggctggagcctgcgcatttcttccttcctgctttcaaagttgcaatgagcgcagagcggtgcgcccgagggggttgaagcgttgaaagtgtgttacccagattttatctgagttaaacacgggccggccgctgtggctcacgtctgtactcccagagccttgggaggtcgaggcgggaagatcgcttgagcccgggagctcgagaccagacgcggcaacatggcgagacgcacatctctgcctttaaaaatgtacatatatatatatatatatgaacgtattaataaattaggtgggaggaagtgacctcctccgcccaaataaaaatacttaaagggcacttgaatctggatctcagaaaatgaataatttcttagtataaacgtcctgtgcaccatttggttgggacaagtaagttcctcttcagaaactcaacttccaggtctaaagttgtcaatcaaccttacccccttcttctttcctcgcaggtggcgcgtttaccctattttaaaaaagttttaagttttagccaaccgggatcagcttagattgtgggcgtccaaccccagccaacagggaaaggacagaggaacagaagctcccttcctttgtcccgtgtgctctggagattgcatcccacgcaggcagcccccttccgtacaagtaaagtggtctcgctgagaaattttctaagtgctggtttctctttgcgggaccgactcgccgcccccaaatatcccatttggatcccattctgtttcaggagaggctggcggttacctttcttggggagacgcgtccgactgcttcattgtgggggcctcaggagcggaggatcgggtcccgcccgaggtgacgcgtaaacccagactctcagcaacgcgggtaggaaggacccttgaagttccgcggcgaccacggtgagaaaagtcgctattggggcgacacaggtgggggcgtctcttggaggttgaaagtgtgtgttggaagttaaactcggagtcgcaatgcaagaggaccgcagactaagccgaacgcgaagggctaactggaaaggggcaggaatgtggctacactggcgggaagagcccgtggcgacgggagggggatgtgcagagtgggtggcaggtgccatctctgcagatcaggaccggcgggaaacttgtttactgagactcagacggggaggcccagagggtgaggaagtcaggttggccttggaagtaggaaacgaagaacgagggcgctgaacgagccaaacctttgaagaggaacttgtgaatgaatgagacgcgccatatcttttgtgtgtgtgtgtgttggagtctcgctgtgtcacccaggctggagtgcagcggcgcgatctcgactctctgcaacctccgcctcccgggttcaagcgattctcctgcctcagcctcctgagtagctgggattacaggcgcgcaccaccacgcccggctaatttttgtatttttagcagagacgccccatatctaaagaagggtgggatcctctagaccaccttcccccactcacccctccgcccctcccaacccaccccctccgcccctcccaacccaccccctccgcccctcccaacccaccccctccgcccctcccaacccaccccctccgcccctcccaacccacccctccgccccccccacccacccaccccacccctccgcccctccccaacccgcccctccgcccctcccacccacccctcgcccctccgcccctcccccacccgctcctccgcccctccatccctcccctatagaaccacctggaccttgccacccacatccccgctggacagccactagaacatgccccttcctcaggaaagctccaacgggaaacagaacaatgccaaagggatattcgaaactttcggccg

SEQ ID NO: 1560039 - DNA, 4001 bp, Homo sapiens
attccacgcccaggccgctttccccaggtcctgcggagtccagccccagcaggacgggttgggcaggcaccaaccagcccctgacccctggctccaggccaaaggggacgctcacccaggctttgggtctcccttctcctggccgatgggaccggcgggcgggccacctccaaccgccttcgcagacgccctcacccaggaagcaggtcacccccaaccccaggtgaccgaaaagcaagacgcccacctcccctgaccaagaccggcctggccaggaccccctggctcccgcctccaagcagggagcttcacgcccacacacagaggccgggctcgaggccggagcgcccgggggagcccggcaggccgcgccgggaggaacctctagtcccccctcaaaccctgggacttcacccccaagctccatgctggcgcgggaagcccccggggccggcctttcgcaccccaggccgccccgcgccgaggccccaggctcccgtcggcttcgggtcggcaccgcggcctccattcccggcccctgcaggaccgcacccccgccccctacccgctcctcaccagccccggaggctccgtgggtgcccagcagcgcgaatcccagcagcacgaacagcgcagccgccatgattcctattcctcgccggtcctacaacctccaaccgctgccgccgccgcccgcggccgctataaaaagcggcggaggcgcggaccgggcgcgcgcacgcacggcgtcatctcgggggcggggcgagcgccggggacgccggtcgccccgcctgcgcacgcgcgcacacgctcgcatgtacgcgccggctccggcaggctcacgctacggaatccgggcggcggcgcacgtgacccggcgttgctaggaaacgggagtggggcctgcggggacgcggctggagcctgcgcatttcttccttcctgctttcaaagttgcaatgagcgcagagcggtgcgcccgagggggttgaagcgttgaaagtgtgttacccagattttatctgagttaaacacgggccggccgctgtggctcacgtctgtactcccagagccttgggaggtcgaggcgggaagatcgcttgagcccgggagctcgagaccagacgcggcaacatggcgagacgcacatctctgcctttaaaaatgtacatatatatatatatatatgaacgtattaataaattaggtgggaggaagtgacctcctccgcccaaataaaaatacttaaagggcacttgaatctggatctcagaaaatgaataatttcttagtataaacgtcctgtgcaccatttggttgggacaagtaagttcctcttcagaaactcaacttccaggtctaaagttgtcaatcaaccttacccccttcttctttcctcgcaggtggcgcgtttaccctattttaaaaaagttttaagttttagccaaccgggatcagcttagattgtgggcgtccaaccccagccaacagggaaaggacagaggaacagaagctcccttcctttgtcccgtgtgctctggagattgcatcccacgcaggcagcccccttccgtacaagtaaagtggtctcgctgagaaattttctaagtgctggtttctctttgcgggaccgactcgccgcccccaaatatcccatttggatcccattctgtttcaggagaggctggcggttacctttcttggggagacgcgtccgactgcttcattgtgggggcctcaggagcggaggatcgggtcccgcccgaggtgacgcgtaaacccagactctcagcaacgcgggtaggaaggacccttgaagttccgcggcgaccacggtgagaaaagtcgctattggggcgacacaggtgggggcgtctcttggaggttgaaagtgtgtgttggaagttaaactcggagtcgcaatgcaagaggaccgcagactaagccgaacgcgaagggctaactggaaaggggcaggaatgtggctacactggcgggaagagcccgtggcgacgggagggggatgtgcagagtgggtggcaggtgccatctctgcagatcaggaccggcgggaaacttgtttactgagactcagacggggaggcccagagggtgaggaagtcaggttggccttggaagtaggaaacgaagaacgagggcgctgaacgagccaaacctttgaagaggaacttgtgaatgaatgagacgcgccatatcttttgtgtgtgtgtgtgttggagtctcgctgtgtcacccaggctggagtgcagcggcgcgatctcgactctctgcaacctccgcctcccgggttcaagcgattctcctgcctcagcctcctgagtagctgggattacaggcgcgcaccaccacgcccggctaatttttgtatttttagcagagacgccccatatctaaagaagggtgggatcctctagaccaccttcccccactcacccctccgcccctcccaacccaccccctccgcccctcccaacccaccccctccgcccctcccaacccaccccctccgcccctcccaacccaccccctccgcccctcccaacccacccctccgccccccccacccacccaccccacccctccgcccctccccaacccgcccctccgcccctcccacccacccctcgcccctccgcccctcccccacccgctcctccgcccctccatccctcccctatagaaccacctggaccttgccacccacatccccgctggacagccactagaacatgccccttcctcaggaaagctccaacgggaaacagaacaatgccaaagggatattcgaaactttcggccgggcgcggtggctcacgcctgtaattccagcactttgggaggcagaggcgggtggatcacgaggccaggagttcaggactggcagcctggccacgatgatgaaacctcgcctctactaaaaatacgaaaattagccggacgtggtggcgggcgcctgtaattccagctactcagctactcgggaggctgaggcagggaatgtcttgaacccgggaggtggagcttgcagtgagccgagatcgcgccaccgcactccagcctcggcaacaagagcgagactccgtctcaaaaaacaaacaaacaaacaaaaacccacagaactttccttttgcctcctgctcaaaaagacctgcctcagcccttttcccctttagggaaggaccaccgggaggaagggatattgacttcgtaaatgccccctttaaccagttcagaggttagaaatctaaaagaactcaaaccactgttagatgacccttttggattcgcggatcaaattgaccaatttctggggccacagctgtacgcttgggctgaattaatgtctaccctcagtactctcgtctcaggagagagagaaccatgattcacaggccgctgtgttagtctgggagcgtgaacaccccccggtcagaacgtcctttcagcggagcgtaaattcctggcccaagatcctgggtgggatgacaatgtgacctaaaaaacatgagcgatctcggagatgggataattacaaggattcgggaatcagatctgcaaacccaaaatacttcccgagcatttaacgtacaacagaggaaacatgaagggcccatggggttttttttggagacagagtctcgctctgtcgcccaggctggagttcagtggcgcgatctcagctcactccaacctccgcctcccgggttcaagcgattctcctgcctcagcctcccaagtagctgggattacaggcgcccgccaccacgcctggctaattttttgtattttagtggagacagggtttcaccatgttggccaagatggtctcgatctcctgaccttgtgatctgcccacgtcggcctcccaaagtgctgggattacaggcgtgagccaccgcgcctggccaggcccgtggaattcttaaacagacttaataaacagataagaaaatatgcagctgccggctcacgcctgt

SEQ ID NO: 1560040 - DNA, 4001 bp, Homo sapiens
gcaagggagagagagggagatagtgaataggcaacagttctgcagatcaaaagtagactagcaccacatcatttaaaatacaggctaacgagcccggggcccatgagtttttattctctgatgcattattaaaagaaatgcttcatcagtaaggctctgaatagcacaagtattatgtggaaaaatatgacatccataaattaggagaccagacattgacagcggagaagctttaggatcgtcttaatttgcctttttccacttatctatattcctttttatgtatctacaaacatgatgtctgatttaaaaaaaaaacctgtggccaagtacagtgttatttttcagtaagtataaaataattctagtggataagaaagcagtggtcatagttacattgggagtatattttcttttctgttctttaaaaaaaaatagcaagcagtgttatttttttttaatgcaaagatgtcctgaagaatacttaaaagaaatatctgcaagatcattcttcttggtcattccataaaaaattgtttttgaaactatgcttagtcctcatcaaacgttgtcagatgcatccatagtgaattcccttcttatttttctatttcgcttcataattgttacaggcaacacgactttggaaaaggaataaaatcgactttatgaaaattagtctcattttcaaaacctctgcaggaggcatttaaaatctcctagcatgaagggaggagacacatggttttcaagtaacatgtcactaggattttccaatttacattcttagtctttcattattttattagccgaactttcttattttttaaaaaatctttacctatggattgtgtttctgacatggaagggagagtatctttttctttcttaaggtacctaaagcaagggagactgttgccctccatggcgactgggatttgattacatacagcagccgatgtgcaggactccgtcccagccagggtcacctgtctcctcaccttcttccagaacgttaaatacagcgccgaccacaccaccgaccacaccgcgaatcaggcagacccaaaccagcaggagccccatgtgccgggccatgctcctgtcagacactcgtggtcgaccagctgatgtccaagattttatagcccctggaactaaccacaaccacttcccctccctgtccctcctctctttccctcctccccacttcttccttgtccctctcctttttcaccttctcctcctcctcattctttttctcccttctccttctcctctcctcctcctccttcctttcctcctccttcttcttctcttccttctcctcctcctccccctccttttcctcccctcctccttttcttctttcttcccctcctcccggtcatcctcctcctccctctctttcccctctgtctccccctcctcctcctccccctcttcctcctcttccctcctcctcctccttcccctcctcctccgtctgctcctcctccccctcctcctcttccttctctttctcccctcctcctctcctcctccttcttcctactctccctcattcccctccttctctccctcctcctcttccttcttcacctcctccccccttctcccccctttccctctttctcccctcctcctccttcctctcttcctcctcttccctcttccacctccttccctgcctcttctccttcctcctccttcccctcttccccttcctcctcttctttcatctttcatccccaccttctccctccttccttgctctcactctgctccaaagttaagctatctaccttgcataggaagaaatatagaaaaagaaatacttaaaataacagggaagatgcaagctgaggaatttcgcgtcgtttccacgaagagaagcatcagggagcccatgggcagtcacaggcttcccggtatctcagatcttcctggtctttgtcagccagggctcaagaatcccctggagaggcccagggaggcttcttggaaaagcaggtttgcttccctaatataagcacctttgttgatgctccacaaaccttcagtgtgggccactgttctctggaggcccttggtgattaacctaatgggctgcagatggctttgaagttctgaggaacaagtggtgcagccttatggacacctacatttccaactatgaaataaataaataaataaataaaagtatttaaaaaagaaaaatcagattaatcctgaattctgaaacccaacgtgttcttagttactgttccttttttttttgagacagaattttgctcttgttgcctaggctgtagtgcaatggtgcaatcttggctcactgcaacctccgactcataggttcgagcgattctcctgcctcaccctcccgagtaaatgggattacagaagcctgccactacatctggctaatttttgtatttttagtagagacagagtttcaccatgttggtcaggctgatctcaaacaaggtgatccacctgccttggcctcccaaagtgctgggattacaggcgtgagccaccacgcctggcccttagttactattcttagaagaggggctgggcacagcggctcacgtctgcaatcccagtgctttgggaggttaaggtagggggatcgtttgcaaccaggagtttgagaccagcctgggaaacataatgagaccccccatctctacaaaaaaaaaattgacgaattagccgagcatggtggcatgtgcctgttgtcccagcactttgggaggttgaggtaggaggatcgtttgcaaccaggagtttgagaccagcctgggaaacataatgagaccccccatctctacaaaaaaaaaattgacgaattagccgagcatggtggcatgtgcctgttgtcccagcactttgggaggttgaggtaggaggatcgtttgagcccaggagtttgaggctgccaggagctatcatcgcaccactgcactctagcctgggcaacagagtgagaccctgtctcagaaaaaaattgtggaaaacgggctatcttttcatctccatttttttttctcagtaagatggaatctcctttggaaaaaagtgtcaaaagaaagccctccccccaactaaactgtcaaaaatgtcagcaactatcaaattagaaactcttatgaaataaaagcctatccaagactttaaaaatacctttgaggaatcctagtttttggaaatgactgttgccttcacttatttctaacatttcttttttcttttctttttttttctttcttttcttttttttttttttttacatggagtctcactctgtttcccaggctggagtgcggtagcgtgatcttggctcactgaaacctccacctcctgagttcaagcgattctcctgcctcagcctcccaagcagctgggaccagaggcgtgtgccagcagacccagctaatttttgtatttttacaaaaatacaaaaattttatttttggggtgtgctggggtgtgccagcagaccccagcagagatggggtttcaccatgttggccaggctggtcttgaattcctgacctcaggtgatccaccggcctcggcctcccaaagtgctgggattacaggcatgagccactgtgcctggcacctctttccttcttgtttgaacatcttttacagatcttgattatattctacaacataatgggtggtctctggcacactgcctttttgctattattattgatactttatgaagaccaagtgtgctaagacattgtacatttgcggagccacccattctcccctttaacatctttgtttcatgtcactcttcactgcattgcatgtcatcagtttcccattctgcaagtatttcttcaatcagtttccctttattattagccatacgagatccaaaaatcccttagcaggttaatgtggactgggtgcagtggctcatgcctgtaatcccagcactttaggaggccaaggtgggtagatcacctgaggcc

SEQ ID NO: 1560041 - DNA, 4001 bp, Homo sapiens
tccctcccggggccgccccctcctcactgaccagcttcctgggatctcactgcagcagagcgctgaggcccagcagcacaatcagcagctggggcgccgcagcggagctggagtcctgggagctggggtagtacttcttgtccgcgattctcacgcttaagacctggttttctcttctgcggtacagatggcaaatcaggcatctgctcgtcctggctcctgccgccctccctgtaagcccaccgcccccgggagttccccccgcaccgccccaatccaagtcaccggggagggaatggacagcggccacccatggctctgtgaccctaggggctaagttatccttttgtgggactcaaactttatcccttggggcaatggggattttgggagcaaaggagatcctgggtcttgggctagggatgtgggggtgagaggaatgtggcaggtggagggtagcgggggaaggctatctctgacctcagtcgctccacctctgcagacgcgtcctgaagcttatggtttaatgtagtgatctctcctggtagggtgggaggacagaaacagggggcgggtcagcatgtggccatgctggggccctgctccactctgggacagaacctcccccttaccccaacctccagccctggtctccctgcccccaccccctcttccatacctgactcacccctccccggccctctcccttctccctttctcaccctcaagctcctccactttcttttgtccttgggccttctctgcatccagggaagccattagggccatctaagaagagttagaatctggggttttggcctggggagtttggctgctgcccctgggacctgggcctcctccctaggtcctggggacagaggggcttaaatgcaaacccctttcaggttttcttccaaccctctctgcaccatggtctccaaccttaaagaacagccacaaccacacactctcccagggccacccataagcatgtgggtcctcaaaatgggagttttgaggccaccccacgtggaaacttggaggctatcgataaccaaagtttagtggacatttccagattgcctgagcaatggcccaagaaaagttagagggccctaccaaatccagaatgcagtgggatttccccgcccaagtgacatgcccagcgagagtttcaagatcccccatatcaggacccaggtgaatatttcagtttcttagggatgaagtgaaaatttcaaaagccccctttttcagggtctggtgaggtcccccttcaaccctgaatagggatttctactcccccaggactggtgcccacgaggagtttcaaggcccccgacaccagtgccctggaaagaatttataaattcacctaagtcccagggggatactgaggtccccgatttgggggatctggagagttttaacaccctgcccctacaccagtgccctggactgggttaggggcccacaaaccctggtaggggaacctaggtcccttgatgtgggggcccaggagcagtttcaggacctcccctgcatctccctggagacccaccctgggtcagatttctggggagagattcttgtccctcccaccgcctagtactaggccatccaaaggagttgaggagcttaccacagtgtggttgcaggtggcggcctgggcctccacatcctgaaagcccttctgggcctcggtcagctcttgttgcaggagatgggtgacattgcgacactccatcactgcccgaaggccgtcccggcaggcctcgctgttggccttgatggtgaagataatcaagggcacccccagaatcacgatgatcaggagcaccagaattcctatccccagcagaagcttacagcgcttatccccgtcttccatgggcactctgcaatagtcatacgaagtagatgccatccagatctcccctttagagtctggcctggagttaggggagggtgctggaatcttctacgggccacccctttattagcataggaaacgtcctgaccaatagcaagttccaggaagtgctctgaccagcagctcttgcatgaggcacctacaggcagaggattaattaggttttcagtttcagtttcccagaaaggaggtgggcttttttttcaccctgctttaaaagcccttgggcccttcccagctgggtgccagccaactgtggctgcctgggacactccatcttaagtccctgtgcctctgctgtgtgttactgagtgcctaggccgtgccagcctgtattcatctgtactatgacctgaagaggcagaggccatcactgttggtccggtctccacctggggaaactgaggttgcacagttgcgtggtggagtgagggcagggcctgggtctgggggcggggcctgggtctgaccccagggactggtttttgtgttcaggtgtctctgtggtgacgagcagggcttcatccagtgcctctgtccccaccgaggggactatgggagacatggagggtgtgtgagcaacaggtgagactggagccagctgaaaactgggagaccgacccagccaacaaacaatgtcggtctctgtcttggcacctgcaggaaacaagctcctacttccagaaaaagtgctcctgggactccaggataccaggtaaactctctgagcctgtttcttcatctgcaaaggggaataacagggccagcctcagacactgtccatgtggccaagagagccagggcttcctacaggaaatcaggcccattatcggcacccaactgctgggcatgaccgctgaaaggggactgcatgtttttcttgtggcttcttcagccacatcctgaccacagcccagattctgttaggtctgccatttccatgtttttttttcttttcagcagggccagacagtaggcgaggtcaagtccagagcccaggcctcccagaaggcctggggaactccccccaggccctgactccaacatccctcagaaggaccccattaaagccacttagagccaggcatggtggtacatgcctgtggtcccaggctgaggctgggaggctgaggcaggaggatcactcgagcccaggagtttgaggctgcagcgagctatgattgtgccacggcactcaagcctgggtgatagagtgggatcccatctcttaaaccaataaacaaaaaaatcacttagaaccaagaaccaattaacaagctgtgggagatgatcttgctgaaaattctgagggtgaacttgtcccaggaggagggacctaccagcctggccaggactccaggtgcaaagacacgacctttgcctgacttatttgactaagctgacttatttgagcagcactgttctggcctgctaactttagggttagtttgggaccaggtcggaaatcacaattgcatgaattgcacattggaggccagggtggtgcacctctgggcaaatgaatttcctctcttagcattgatttccccagctgtaaaatgtggataataatagattgatgtcctctctaaattttgcagctgtaaacagtcccagccctgcaaaccgaaagtttgttgctcttccctttaaaattactgtagggaccagccccacagggtcagtgggtctctccctgtgtgcggcgacgagagagtgtagaaataaagacacaagacgaagagataaaagaaaagacagctgggcccgggggaccactaccagcaatgcgcggagactggtagtggccccgaatgtctggctgtgctgttatttattggatacaaagcaaaaggggcagggtaaagagtgtgagtcatctccaatgataggtaaggtcacgtgggtcacgtgtccactggacagggggcccttccctgcctggcagccgaggcagagagagagagaggggacagacagaaagacagcttatgccattatttctgcatatcagagacttttagtactttcactaaatgactactgctatctagaaggcagagccagg

SEQ ID NO: 1560042 - DNA, 4001 bp, Homo sapiens
gggcagggggtatccctggaggggagcagcatggtttgaaggtctctgatccagatcatgtgctgagcctgggggtctccggtgggggtcactgggtctggaggcagcagggaggacgcagggagcaaggcctaggggtcttggcgcacaggggtgcgggtgggagtggcagggtccctggatggtgggggaagagggaggggtcttgtggtcatgggtgggggtggaggaaatagcacgacccctgaagggaggggtcctggagttcaggagtcataggttgggggttacggactgaggtggtgaggactggggacggggggtctcaggtgagagcggagaagtctctccatcctgggatgcaggggtgacacacttgagtgtagtggggtcccagggggccccgggagtagagagtggaagggcagtgggcaggggtgaaggacctggggaaggaggggtcctggagagtccctgggtacagggacggaggggtcaccagtaggggtcccagggggagaggggcggcaggcaagggtgcagggcctggggatggaggggtcctgaggatccccgggtatagggatggaggggtgtggcatgtggggtcatgggtcctagaaacagtgggttggggtcctgggaatggaggagcagataggggtacacgtcccagggttggagggtcacaggagtcccaggggtggtgggtgggggtgcagggccagggcatggaggggacccagggatgcaggccaggtggggtccagggatggaggggcctggggtgtaggcaggggttccagccggaggtggaggggcccagggatctgggggcagaggtgtctggggacctggggtgcagggaggggtgaggtccagggatggagcgtcctggggatggaagaatggagggtcctagggtgcaggcggggggtggagggccctgaggatggggtattcagggttctggggtgcgggctgggtggggtttgaggatggaggggcccaggggctccaagtgcaggccgagttggagggtcccaggaacggagggtaccggagtgcaggctgggtgggtccagggacggaggagagcaggggtcccaggggtacagggcctgggatcccggggaacaggctgggggcgcaagccagaggtggaggatccaggggggcctggggatggaggggtgcagaggcccagagtgcaggcctggtggggtctggggacagagaggtgcagaggcagggacagaggggtgcagagcccagggaactgggtggagtctagggatggaagggtgcaggccccggggtgcaggccgggtcggtttcaggaccggaggggtgcaggggtcccagggacagaggggtgcagggcctcaggtgcaggccccggggtgcaggccgagttgggttcggagcctgaggatgcaggggtgcaggggtcccggggacagaggggtgcagggctcggggatggaggggtgcgggggtctcggggacagaggggtgcagggcctcaggtgcagggcccgggcagcaggctgggtgggtcggggccagggctggcggggtcggggcgcccacctgtgcgcggggatgcgctgcgagctgagccccttgcccaccaggaagtgcacgtcgcacagcacctcgttgttgaagaggaaggcgaagcgctcctgcacggtgggcttgctggcctgccagttgtacgcggcctcgcgctgcagcgccgccgcccccgggcccgccgcctcctccgcccgctccgcgcccgcggcctgcgcgtctgtcccggggcccggcggggcgggcggcgtcggcccaggggcggcggcggcggcggcggcggcggcggcggcggcggccgcgttgccgggggccggggtggcggcggcgttggcgctgggcccgggactgccccccgtgcccgggccgaccccgacccccggcgggcacgacgcacgcccgccgctcccacccgccgccattttgtggctgcggcgtgggcgggggaggggaggagggaaggagggaggggaggagggaaggagggaggggaaaggaggagagtagggggaggagggggaggagggaggggaggggaaaagaggagggaggggaaaggaggggaggagggaggggaggggaagcgggaaggagggaggggaggagagggaggggaaaggagggggaaggagggaggggaggagagggaggggaaaggagggggaaggagggaggggaggagagggaggggaaaggagggggaaggagggaggggaggagagggaggggaaaggagggggaaggagggaggggaggagagggaggggaaaggaggggaggtgggaggggaggagggaggggagaagggaggtgaatgggggaggctgttgcaggggaggggacggggaggagagggaagagtaggaggggcctgtagaggggaggagctggtggaagacctcttgctccactccctaagcatcctgacctgaagcccagactccagaccgaggtccagaatttggggtccaggcaccaggccccagactccagaccgggaatcctaaaccctggagcacagacctcagtccgggatcccaggcctcagaccttgaatcctagatcccagactctgaaccccagacttcagactccggattccagatcccatacctcagacccggaacccccaacccaaagaccaagcgcaaactccagaccccagaccccggacccaggtggcgggcctgctccgtggcgcaggctccgctgtacagagacatagcctgaggccgggaagctgcggatgagcgagcaggatgcaggccacgtgcactgacactcagcagacgcccagcaccctctccaggccaggtgtggggggtggtcagtgtggacggagctgggactcccccaaaacgcttactacatacataatgtcaaggtagacaaatgccacaaagattgaggaaccaggtcgggcgcagtggctcacgcctgtaatcccagcacttcaggaggccaaggcggggggtgcatcacctaaggtcaagagttggagaccagcctgggcaacatggcaaaaccctgtctctacaaaaaatacaaaaattagccaggcgcggtggctcacgtctgtaatcccagcactttgggaggccgaggcgggcggatcaccaggtcgggagatcgagaccatcctggtgaaaccccatcatggtgaaaccccatctctactaaaaatacgaaaattagccaggcttggtggcgggtgcctgtaatcccagctactcgggaggctgaggcaggagaatcacttgaacctgggaggcggaggttgcagtgagccgagaccgcgccattgcactccagcctgaacaacaagaacaaaactccgtctcaaacaaacaaacaaacaaacaaaacaaaacaaaaaaaaaactaggcgtggtggtacgcacctgttgtcccagctactcagaaggctgagacggaagcatcacttgagcctggaaggttgagcttttgatgagctatgactccaccactgccctccagcctgggcaacagagcaagatcctgtctcgaaaaaaaaaaaaaacaaagaagaaaaagaaaatagggtattaaaaaaacccaagtgataatgctattttcagttctccagagtgggtggttgaggtagttacaatttttttttcttttttcttttttctttttagagtctccctctattgcccaggctggggtgcagtgatggcgatcttggctcactgcaatctcagcctcctggttcaagcaattctcccgcctcagcctcctgagtagctggggttacaggtacccgccaccacgcctggctaaggctaatttttttttgtttgtttgttttgtttttgagacagtctcgttctgtcgcccaggctggagtgcagtggcgcgatcttggctcactgtaagctccgcctcccagattcacgcca

SEQ ID NO: 1560043 - DNA, 4001 bp, Homo sapiens
tagaataataacagcagaatctgtcgtcactgtttaatgccaatactctccctttttattggtttaggaagagtcattcaatgagtgtaaggtgatataggtgagacccaaccctgctgtctgctacagaacatctccctacaacaatggatactgtcacagtaagctagagggaattttgaacaactcacctcattggtccctccttgagaggcgtaagtgaacatacacgtatatttgtcctagagaatggaaggaaaaaaaaggtttggtagaaggaaatttttattttgtttaagagacggggtcttgctgtcacccaagctggagtgcaggggcacaatgacagctcactgcagcctcgaactcccaggtttgagtaatcctcttgcctcagcctctcaagtaactgagacaataggtacgcaaccaccacacccgactaatttttttttttttttttgaagcagagtcttgttctgtcgcccaggctgaagtgggatgatctcagctcactgcaacttctgcctcccgggttcaaacgattctcctgcctcagcctcctgagtacttgggattacaggcacctgctaccacacctggctaatttttcgtatttttgtagagatgggttttgccatgggacctggacaagtgaaaacttttctgagcctctagtttctctctgtttctcttttttatgtgaagcattttctcatctgtaacttgggcctaacatataaaggacttggcatcacacctaactataaggaagtagtcaacaaactggcctggcacagtggctcacgcctgtaatcccatcactttgggaggccgaggtgggcgggtcacctgcggtcaggagttcaagaccagcctggctaacatggtgaaatcccatctgtactaaaaatacaaagattagtagtcccagctacttgggaggctgcggcaggagaatggcatgaacctgggaggcagaggttgcagtgagccaagatcgcgccactgcactccagcctgggcgacagagtgaggctccatctcaaacaacaacaacaacaattatccgggtgtggtggcacacgtctgtaatcccaggtactggggaggctgaggcagaagaattgcttgaacccagaaggctaaggatgcagtgagccgagatcccgccactgcacgcaagtctaaaaagaaatagtcaaaaaacagtaaagatactgttattacaggcggggaaagggaggctgagaggggaaaggactttgccgacaagctgagtacagggctgagggcccggcctcacaccctcggtgaggggggaccttgtgcaatggaaggaaggagcacttcctccctcttcggagctgcagcgactgatttccttcaggcccaggagggcagatgccctttagcctcctgccgctcccatcactgacccctccccacctctgcgtctggagggcaggggtgcctggacactccaggcaggcgacaggtgacaggtgatcacgccccctcaacgccgccggggcccacaaggccccgctccctatgagttcagtcctgccccagtgatgaccccggcctcacggtcccgcgccccccactcagcctccgaccctaacaatccgcaccccttcttcagtacccacctccgcggtccgcgccccctcctcgggccccgcccccaatgctccgcgccccctccccgggcctgccagcactcaaatatccgggacggcggtggcacgtacccccgggcccacgttatgggagaaggaatgcacgacgccgccgggccgcacgtcaaacgccaccgtcgtgggctcggacaccgcctccgccggcctcagcgccacggcccctaggagcagcgcggcccacaagctcgcgccgacgccgttccaccctccgctgggcgccgccatgttggactagggtcctcagggcaggggcgggtagacggggcgcggcgagggacacgtggagcgtccgccggaggccacgtcggcgtcggctgtccacgtgacccggcacgccccgccctgtccaccgcccggggccaccatcttgggggcgggactttgtcgagggggcgggacttttgccgagggggcggggccgccgagggggcggggccgccgagggggcggcctcgtaccctagggaccctgcgtagcccggcgatccttggagggtccctcaggtggtaatggagttcgttttggggtctcagggtccctcaccagccgtgtgactgactgcagctctttcagttaggagatgtacagggagtgagggaaatcgaaggtcaccattaggcgaacttctcataatcgttgcagccaagatgtgtgtgcatcgatattcaaaattagcagagggaaagtaggatgagaagcaggatgcttgcttttgtttccctcttgttgcccaggctggagggcagtggcgcgatctcggctcactgcactctccgcctcccaggttcaagtgatgcacctgcctcagcctcccgagtagctgggactacaggtgttcaccaccacccctggctaatttttgtatttttagtagagacaggttttcaccatgttggccaggctggtcttgagctcctgaccccaagtgatccgcctgcctcggccttccaaagtgctgggattacaggtgtgagtcatcacgctcgatcagtctgtgtatttgttaataggattatgtgggtgttcacttcctggctttgataacctggcttgtcctaggggttacagacgatgttcacattagggggagttggatgaagcgtattaggaaaccctacagtttctgcagattttctgggaggcaaaaattatttcaaaataaaaagttaaaaagaaaataatccctacctcaaggagttgttgggaggagtaagtgagggaattaagttcccacaccgggacgaatgaactgagaattatatattgtagctattgctatcattagatcccaggttttcaactagagaaggaagtcattctttggttacaaatggcttaacatttcaagaaaacaccagtggccaggcctggggggtcaataattaagctggtgtttctagtccttcccaactggcaaaaaacagaatccagagagaaaacgtcatagatgactcctaagatgggttataattcaccctttgaggaattaaatcactctactccatagctacggagggtggtgagccccagggaggtgagaaggatccccgtggaggctgactcctctgccaatgacagaagtccaagccagttgcctttctgcagtggcagcctgttctaaattgggatacctgcttgcgttaggaaatttattggccgggcgtgatacttcatgcctgtaattccaacccttcgggaggccaaggtgggtggattgcttgacctcaggagttctagaccattctgggcaacatagtgagaccccattcctatatatatattcatatattcacatatgtgaatatatatattcatatattcacatatgtgaatatatatattcatatattcacatatgtgaatatatatattcatatattcacatatgtgaatatatatattcatatattcacatatgtgaatatatattcatatattcacatatgtgaatatatattcatatattcatatatacttatatattcatatattcatatatacttatatattcatatatatgaatatatattcatatattcatatatatgaatatatattcatatattcatatatacttatatatatattcatatattcatatatacttatatatattcatatattcatatatatgaatatatattcatatatatgaatatatatattaatatattcatatatatatacttatattcatatattcatatatatacttatattcatatattcatatatatacttatattcatatattcatatatatacttatatatattcatatattcatatatatac

SEQ ID NO: 1560044 - DNA, 4001 bp, Homo sapiens
gggaagaaaggttagtaactccatctcctgagcccttgctaaaaagctcagcttcctgaattctccaggctcaccagattgagagggaagcccaccctgctccttctcccaccgcaaggctgcctttgtctgtaaatgacagggaagtgggtgaggagggaggatggggacagaccttagggggtgggagtgtggctccccctcccccactgtatcacacctatttcacactcagatttatccacataccaggccttgatcacaggaagcccatctgccagccacagggaaggcaaatgccaactggaagccccggtttcttgcaggcgcccaggctgctctgacaggtacagagagacggagacaagcccatctcaccgagagcggcctagctttctgagtttggaccagattgtaagagataagggagaggaaggcttcagatagctatgaagagagctatctgacctccaagtacccttttctttaacaaaaaattagatctggctcttgtcaacattgacctcccacctctccataccccagcgcaaaggcagtaggtggatcccaccagcaaacagttttggattagctcatagttgttgtttttttaaaacaaattagttgccaatatttaaaaatcaggagattttgcatgcacctcagattcctgatttctcctgaaaaatcagaagaccagatcacattggacctgccattctgtgtagcaatggaggccagggctgagcaggggccgtcccctgcccacccccatacagcagggccctgccctccctaccccagctcctcctggcagcatgcaccttacctatctacttgatcaataaacagatcacttcaaagcttctcaaagtatccctctttctttttttctttctttccttccttccttccttccttttctctttctctttcgttctctctctctctctttctctttccctctccccttccttcctgctttttgttgttgctggtgttgttgttgttttttccagaaacgcagtctccctgtgttgcctaggctggtcgggaactggcctcaagcaattcttccgcctcggcctcccgagtagctggaactacaggtgctattccaagatggtgaaaccccgtctctactaaaaaatacaaaaattggtcggggtggctcacgtctgtaatcccagcattgcagaaggctgaggcaggtggatcgcaaggtcaggagtttgagattagcctggccgatatggtgaaactccgtctctactaaaaatacaaaaaaattagccaggcttggtggtgtcgcctgtaatcccagctactagggaggctgaggcaggggaattgcttgaacgagggaggtggaggttgcagtgagccgagatcgcgccattgcactccagcctggacaacagagcaagactgtctaaacaaaagctcaacaaactacctgccatccccaaaactaatctcacctcctaaagcattaacgacccttcctgaccaaatctaaactagcgcccagattttcttcccatatggctcagcccagctccgctgccccacaggtgtcctgtcaggatccgcttcacatttataatacctagcaccccacccccagccccgcccctgccccaccagccacccccactctaccccacccctacccatcacattccgcaccccacccccgccaaacccacatccccaccccacccaacctcacccactcccaccacatccaccacccgcaccccacccccacccaccacacccatgcctacgccactcctgggtgacagcgagccagggcccgggactctagtcccagctctgctgcttacttgtgtgacttcagcctctccatgcctcagtttctccatagggacaatgactacactaacagtgtccaccccggcaccgggagggccgggctcccggcagggcggggaccctctccccaaggcactcccgggtctccaggcctgctcttggggtgccccctcctctcgcggggcgcggcctgggaggcgccccgccccggctccgggcgctcctttacctgggggagcggaggtctacgcggcgcgctcggcgatcagacgcggctgcagcccgggcctggcaggccccgggctccccgcccagctccccagccccgcggagggtcgcgcaggccttggtggcggccccggcgctggccccgccctccgtcccaccttccggctgcgccgggccttccgggaagccacgcgccgggccagctcctggctccgagctgcgcccggccttagggggagccgggggtcgctgctgggcaccccctccccggtcctggcccaccccgccgctgtcaccggggccctggcttgggttgcgggtggcgtaaggagacgaggcgcccggagaagagtcctgggaaccgcaaggccgcgctcccgcaggcccagccctgcctttctcccacgcgcacgcatgatcacatccgggccccgcgcacctgcctccaggaccgcggggacctcccggagacctccctccctttggcctggaggacccctctctccccgcagcctgggcacagaagagagcacaggggcatctggaggtcaagggtgctgcgtcagtatttggtgaatgtgtgggccggagccagatttcctctgttccagagcctgctctggagcctctgggtctgggggttgcaaaaggagaagcaggttgggtgggactcgtaatcccagctgccagtgaggctgaggagggaggattgcttgagcccagcagttcgagcgtgggcaacacagtgacatcccatctctacaaataataataaaaattaggccgggtgggtgagtcatacctgtgacctacagcattttgggaggctgaagcgggaggattgcttgagcccaggagttcgaggctgcagtgaactatgatcccaccactgcacttcaacctgggtgacagagtgagaccgtctcttaaagaaagaaaaaaaaggaaaagaactggctttgctcttaggagtcttggatggggaccaaagctgaggcaaggcagcctcttaggaaggtgcaaagggcatgaggctggggttgcagaactgcctgggaatactactttattgaggcctgtggaaagctgtccctactcttgtcatgcaaggtctggccttgaaccatctcaaatccaaaagtggcttctggggggctctatagagaattaatcctaacaggaaccctgcaaagcaggcatggttgtcactgctatattacagatgggaagctctaaacacaggctgctctgcccaaggccatcctggttagaaagtttcagggcccaaactccagcctcggtctcggtatctcaaagtctccgcctgtgaccagcactctgcctgctttccagggtgccatgggcacccagaggacggacccttttccatttttaaaagaatggaacaaacgctcttaataccaagcttccccaggccttggctgggataaaacaaccccatttattcctgaatcggagcttttgcttgagtttgggtgactttcaagagggaaagtgaactgaggccaggggaactcagcttgctgccttcctggggcctgagtgtggcgctcccgtttctctgcgggcagctccctctggcggcacattgcagaactggcctgcagactcctcccccagagatagtggggaagagggcctgtgtagggaaagatgctgggagtgaaagaagcttcaaagtccaggccctccagagaaggcaagcatgtaagaggttcatgcagcccagcgcggtggctcacacctgtaatcccagcactttgggaggccgaggcgggcagatcacctgaggccaggactttgagaccagcctgggcaacatggtgaaaccccatctccactaaacatggaaaaatgagccagacatggttggtgcaagcctgtagtcccagctactcgggaggttgaggcag

SEQ ID NO: 1560045 - DNA, 4001 bp, Homo sapiens
acaaaaaattagatctggctcttgtcaacattgacctcccacctctccataccccagcgcaaaggcagtaggtggatcccaccagcaaacagttttggattagctcatagttgttgtttttttaaaacaaattagttgccaatatttaaaaatcaggagattttgcatgcacctcagattcctgatttctcctgaaaaatcagaagaccagatcacattggacctgccattctgtgtagcaatggaggccagggctgagcaggggccgtcccctgcccacccccatacagcagggccctgccctccctaccccagctcctcctggcagcatgcaccttacctatctacttgatcaataaacagatcacttcaaagcttctcaaagtatccctctttctttttttctttctttccttccttccttccttccttttctctttctctttcgttctctctctctctctttctctttccctctccccttccttcctgctttttgttgttgctggtgttgttgttgttttttccagaaacgcagtctccctgtgttgcctaggctggtcgggaactggcctcaagcaattcttccgcctcggcctcccgagtagctggaactacaggtgctattccaagatggtgaaaccccgtctctactaaaaaatacaaaaattggtcggggtggctcacgtctgtaatcccagcattgcagaaggctgaggcaggtggatcgcaaggtcaggagtttgagattagcctggccgatatggtgaaactccgtctctactaaaaatacaaaaaaattagccaggcttggtggtgtcgcctgtaatcccagctactagggaggctgaggcaggggaattgcttgaacgagggaggtggaggttgcagtgagccgagatcgcgccattgcactccagcctggacaacagagcaagactgtctaaacaaaagctcaacaaactacctgccatccccaaaactaatctcacctcctaaagcattaacgacccttcctgaccaaatctaaactagcgcccagattttcttcccatatggctcagcccagctccgctgccccacaggtgtcctgtcaggatccgcttcacatttataatacctagcaccccacccccagccccgcccctgccccaccagccacccccactctaccccacccctacccatcacattccgcaccccacccccgccaaacccacatccccaccccacccaacctcacccactcccaccacatccaccacccgcaccccacccccacccaccacacccatgcctacgccactcctgggtgacagcgagccagggcccgggactctagtcccagctctgctgcttacttgtgtgacttcagcctctccatgcctcagtttctccatagggacaatgactacactaacagtgtccaccccggcaccgggagggccgggctcccggcagggcggggaccctctccccaaggcactcccgggtctccaggcctgctcttggggtgccccctcctctcgcggggcgcggcctgggaggcgccccgccccggctccgggcgctcctttacctgggggagcggaggtctacgcggcgcgctcggcgatcagacgcggctgcagcccgggcctggcaggccccgggctccccgcccagctccccagccccgcggagggtcgcgcaggccttggtggcggccccggcgctggccccgccctccgtcccaccttccggctgcgccgggccttccgggaagccacgcgccgggccagctcctggctccgagctgcgcccggccttagggggagccgggggtcgctgctgggcaccccctccccggtcctggcccaccccgccgctgtcaccggggccctggcttgggttgcgggtggcgtaaggagacgaggcgcccggagaagagtcctgggaaccgcaaggccgcgctcccgcaggcccagccctgcctttctcccacgcgcacgcatgatcacatccgggccccgcgcacctgcctccaggaccgcggggacctcccggagacctccctccctttggcctggaggacccctctctccccgcagcctgggcacagaagagagcacaggggcatctggaggtcaagggtgctgcgtcagtatttggtgaatgtgtgggccggagccagatttcctctgttccagagcctgctctggagcctctgggtctgggggttgcaaaaggagaagcaggttgggtgggactcgtaatcccagctgccagtgaggctgaggagggaggattgcttgagcccagcagttcgagcgtgggcaacacagtgacatcccatctctacaaataataataaaaattaggccgggtgggtgagtcatacctgtgacctacagcattttgggaggctgaagcgggaggattgcttgagcccaggagttcgaggctgcagtgaactatgatcccaccactgcacttcaacctgggtgacagagtgagaccgtctcttaaagaaagaaaaaaaaggaaaagaactggctttgctcttaggagtcttggatggggaccaaagctgaggcaaggcagcctcttaggaaggtgcaaagggcatgaggctggggttgcagaactgcctgggaatactactttattgaggcctgtggaaagctgtccctactcttgtcatgcaaggtctggccttgaaccatctcaaatccaaaagtggcttctggggggctctatagagaattaatcctaacaggaaccctgcaaagcaggcatggttgtcactgctatattacagatgggaagctctaaacacaggctgctctgcccaaggccatcctggttagaaagtttcagggcccaaactccagcctcggtctcggtatctcaaagtctccgcctgtgaccagcactctgcctgctttccagggtgccatgggcacccagaggacggacccttttccatttttaaaagaatggaacaaacgctcttaataccaagcttccccaggccttggctgggataaaacaaccccatttattcctgaatcggagcttttgcttgagtttgggtgactttcaagagggaaagtgaactgaggccaggggaactcagcttgctgccttcctggggcctgagtgtggcgctcccgtttctctgcgggcagctccctctggcggcacattgcagaactggcctgcagactcctcccccagagatagtggggaagagggcctgtgtagggaaagatgctgggagtgaaagaagcttcaaagtccaggccctccagagaaggcaagcatgtaagaggttcatgcagcccagcgcggtggctcacacctgtaatcccagcactttgggaggccgaggcgggcagatcacctgaggccaggactttgagaccagcctgggcaacatggtgaaaccccatctccactaaacatggaaaaatgagccagacatggttggtgcaagcctgtagtcccagctactcgggaggttgaggcaggagaaccgcttggacccggcagatggaggttgcagtgagccgagatcgcgccattgcatgcaaatctgcaacccatcagcctcctgggcctcattctgatacgaatgcaggcataacatgaccgcacactctgaaccccagagatggagcacacagtgcctcatgctcctaaaggcaactgcggcctcctgcacagtgagcaaggcgtgccgtggggtctcggtggtggcgcggaaatggcactggcccagcacacagcgatgctttatgctgcttacagtgacctagggaaagttcttccacgtctccgtgcctcagtttcctcatctgggaaatggcaacaagagtagtacttatcctatagggttgttctcaacataaaaggaggtaatatatatgaatctagattattcttgtttacattacagaatgtgaaaatgagcggcttctccaaagtcccatgagcctcatgggcccaaggtagtggga

SEQ ID NO: 1560046 - DNA, 4001 bp, Homo sapiens
gaggccagggctgagcaggggccgtcccctgcccacccccatacagcagggccctgccctccctaccccagctcctcctggcagcatgcaccttacctatctacttgatcaataaacagatcacttcaaagcttctcaaagtatccctctttctttttttctttctttccttccttccttccttccttttctctttctctttcgttctctctctctctctttctctttccctctccccttccttcctgctttttgttgttgctggtgttgttgttgttttttccagaaacgcagtctccctgtgttgcctaggctggtcgggaactggcctcaagcaattcttccgcctcggcctcccgagtagctggaactacaggtgctattccaagatggtgaaaccccgtctctactaaaaaatacaaaaattggtcggggtggctcacgtctgtaatcccagcattgcagaaggctgaggcaggtggatcgcaaggtcaggagtttgagattagcctggccgatatggtgaaactccgtctctactaaaaatacaaaaaaattagccaggcttggtggtgtcgcctgtaatcccagctactagggaggctgaggcaggggaattgcttgaacgagggaggtggaggttgcagtgagccgagatcgcgccattgcactccagcctggacaacagagcaagactgtctaaacaaaagctcaacaaactacctgccatccccaaaactaatctcacctcctaaagcattaacgacccttcctgaccaaatctaaactagcgcccagattttcttcccatatggctcagcccagctccgctgccccacaggtgtcctgtcaggatccgcttcacatttataatacctagcaccccacccccagccccgcccctgccccaccagccacccccactctaccccacccctacccatcacattccgcaccccacccccgccaaacccacatccccaccccacccaacctcacccactcccaccacatccaccacccgcaccccacccccacccaccacacccatgcctacgccactcctgggtgacagcgagccagggcccgggactctagtcccagctctgctgcttacttgtgtgacttcagcctctccatgcctcagtttctccatagggacaatgactacactaacagtgtccaccccggcaccgggagggccgggctcccggcagggcggggaccctctccccaaggcactcccgggtctccaggcctgctcttggggtgccccctcctctcgcggggcgcggcctgggaggcgccccgccccggctccgggcgctcctttacctgggggagcggaggtctacgcggcgcgctcggcgatcagacgcggctgcagcccgggcctggcaggccccgggctccccgcccagctccccagccccgcggagggtcgcgcaggccttggtggcggccccggcgctggccccgccctccgtcccaccttccggctgcgccgggccttccgggaagccacgcgccgggccagctcctggctccgagctgcgcccggccttagggggagccgggggtcgctgctgggcaccccctccccggtcctggcccaccccgccgctgtcaccggggccctggcttgggttgcgggtggcgtaaggagacgaggcgcccggagaagagtcctgggaaccgcaaggccgcgctcccgcaggcccagccctgcctttctcccacgcgcacgcatgatcacatccgggccccgcgcacctgcctccaggaccgcggggacctcccggagacctccctccctttggcctggaggacccctctctccccgcagcctgggcacagaagagagcacaggggcatctggaggtcaagggtgctgcgtcagtatttggtgaatgtgtgggccggagccagatttcctctgttccagagcctgctctggagcctctgggtctgggggttgcaaaaggagaagcaggttgggtgggactcgtaatcccagctgccagtgaggctgaggagggaggattgcttgagcccagcagttcgagcgtgggcaacacagtgacatcccatctctacaaataataataaaaattaggccgggtgggtgagtcatacctgtgacctacagcattttgggaggctgaagcgggaggattgcttgagcccaggagttcgaggctgcagtgaactatgatcccaccactgcacttcaacctgggtgacagagtgagaccgtctcttaaagaaagaaaaaaaaggaaaagaactggctttgctcttaggagtcttggatggggaccaaagctgaggcaaggcagcctcttaggaaggtgcaaagggcatgaggctggggttgcagaactgcctgggaatactactttattgaggcctgtggaaagctgtccctactcttgtcatgcaaggtctggccttgaaccatctcaaatccaaaagtggcttctggggggctctatagagaattaatcctaacaggaaccctgcaaagcaggcatggttgtcactgctatattacagatgggaagctctaaacacaggctgctctgcccaaggccatcctggttagaaagtttcagggcccaaactccagcctcggtctcggtatctcaaagtctccgcctgtgaccagcactctgcctgctttccagggtgccatgggcacccagaggacggacccttttccatttttaaaagaatggaacaaacgctcttaataccaagcttccccaggccttggctgggataaaacaaccccatttattcctgaatcggagcttttgcttgagtttgggtgactttcaagagggaaagtgaactgaggccaggggaactcagcttgctgccttcctggggcctgagtgtggcgctcccgtttctctgcgggcagctccctctggcggcacattgcagaactggcctgcagactcctcccccagagatagtggggaagagggcctgtgtagggaaagatgctgggagtgaaagaagcttcaaagtccaggccctccagagaaggcaagcatgtaagaggttcatgcagcccagcgcggtggctcacacctgtaatcccagcactttgggaggccgaggcgggcagatcacctgaggccaggactttgagaccagcctgggcaacatggtgaaaccccatctccactaaacatggaaaaatgagccagacatggttggtgcaagcctgtagtcccagctactcgggaggttgaggcaggagaaccgcttggacccggcagatggaggttgcagtgagccgagatcgcgccattgcatgcaaatctgcaacccatcagcctcctgggcctcattctgatacgaatgcaggcataacatgaccgcacactctgaaccccagagatggagcacacagtgcctcatgctcctaaaggcaactgcggcctcctgcacagtgagcaaggcgtgccgtggggtctcggtggtggcgcggaaatggcactggcccagcacacagcgatgctttatgctgcttacagtgacctagggaaagttcttccacgtctccgtgcctcagtttcctcatctgggaaatggcaacaagagtagtacttatcctatagggttgttctcaacataaaaggaggtaatatatatgaatctagattattcttgtttacattacagaatgtgaaaatgagcggcttctccaaagtcccatgagcctcatgggcccaaggtagtgggaaatccagttctacccccaccttgacaaaacattctcttgctgatgggcccaacaatgccctagggtgctaggtggtgttcacacggccagccagagtcaaaactcagacggggccagcgttctatgccctcactttctcccaaagctgagtgcaccagctcctaaaacttccatggctccttcaggctaaagccacccacctagaccagggctggatgatccgcaatgtgggccacacccaaaa

SEQ ID NO: 1560047 - DNA, 4001 bp, Homo sapiens
agagactttaagatggtttaagatgaacttgggaaaacaaggaaataacttagcattagagaaggacgccgaacacacagcttccaaatatctaagatgggatgtgttaatacattcctcccaatgcctggcagcaatgtgtgggttaatttgcagaagcctggtgagcctgctgttctttttgcacctggtgcttcctgtcatgaagaatgacctttaggaacaggatacttttggtttctggtctccttttgcagtcatacaagttgggaaatctctgcccaaattaaggacctggagagacttagagttgaaggggctacgacctcattagaaggtcagcaagggttgggcacagtggctcatgcctgtaatcccagcgaggaaggcagatcacgaggtcaggagttcgagaccagcctgaccaacatggtgaaaccccgtctctactgaaaatacaaaaattagctgggcatggtggcacgcgcctgtagtcccagctactcaggaggctgaggcaggagaattgcttgaacccggcggtggaggttgtggtgagccgagattgcgccactgcactccagctgggtgacagagtgagactccgtctcaaaaaaaaaaaaaaaaaaaaaaaaaaaaaaaaaaaaaaaaggatcagagagccaggcagagaggccagggaaccaacaatagtgtcctttcctcggacacaaattacatgcaaatgtatcacacagacagcatttcccttgcatggaatggagattatttacaagcatcatatatctccacaaagggttgctgagcttcaaagattgtcggggttggttttgctgttataagataaacaaacatcctctagtactcaaattagaagggaaccatagaaaatgcttataaagaattctcggctgggcatggtggctcatgcctgtaatcccagcactttgagaggccgaggcgggcggatcatgaggtcaggagatcaagaccatcctggctaacacagtgaaaccctgtctctactaaaaatacaaaaaattagcttggcgtggtggcgggtgcctgtagtcccagctacttgggaggctgaggcaggagaatggtgtgaacccaggaggtggagcttgcagtgagccgagatcgcgccactgcactccagcctgggcgacagagcaagactctgtctcaaaaaaaaaaaaaagaaaaaaaagaattctgtacactcacaaaccttctgtgtctagacttgcatgctctactgccaaatgtgcaccaaattcaagtcagacaggcatacctgtgtaatctggatgggatcaaggtttttgtgtgcgcttattaaagtgaaatgaaaaagagaagaaagtggcaatccctaaagagaaagcagttaacagagagtgaagagcataagatctaatttccaagcaaatgtttatctaattatactctattttatggacctttctaccagcaagcacacagtacacattcacatggcagataagaggactccaggctacgattctcactccactgaatgaggaattcaatgactcacccgtggatctcgaggcagccccttgaatcccaggcaactgggttttatgaaagaacactttgggctctttggtgatgtttctgggtggttgtgaccgtttactgccttgaaaagaaaactttttgcggtgaaatgtaattaccttctttttatctcccctgaaacagcttttcaattctccctgagtcacataaaaccagtggttgaagctacctggtaagcctgttatgtttccagtgggatggagtccatctgcatacggcaagcataaatgaagttggcattccattaaaaacaaaaacaaaatgaggaaaccactctgaaccttgtccatcactctcaaattatcagtattttatcccgtagatgaaaggaaatacttagctacagtccagcatctgtcctctatttatctgaggaatcaagaagttctactcccttcagaatgtttgggcagtgacttggagccaccagtgtgaggtcagtccttgctgtgataatggagttccttcatggaaccatgctgaccaatggggagactacagtgtaagagggcagtgcttggaggtgcaggcatgatgagaccaggtccctgcctgcagtgtgcagattagtgaggaggcagaaagaaatcaattacagtcagccctccgcatgcatagttccccatccgtgatttccaacaacctcacttggaaaatgttcaggaaaaaaggaatgggcacggtggctcacgcctatgatcccaacactttaggaggtcaaggtgggcagatcgcttgaggccaggagttcaagaccagcctggccaacacagtgaaagcccatctctactaaaaatacaaaaatttgctgggcgtggtggtgcacacctgtagttcaagctacttgggaggctgaggcatgagaatcacttgaacccaggaggtggaggttgcagtgagctgagatcatgccactgcactccagcctgggcgacagagcaagactctgtctcaaaaaaataaaacaacaaacacaaaaacaaaaactagccaggcatggtggcgtgtacctgtagtcccagatactcgggaggctgaggcaggaagatcacttgagcccagaaggcagaggtagcagtgagccaaaatcgtaccactgcacaaagaaagaaagaaaagaaagtggaaggaaagcagtcacccttagaagggaggcaatgtgcacaggggagacccacagcaggaaggtaaagggggactcctgatgactgaaagtgggccctaggcttcagagatgggaggaatagaagacgggctcaaaaaaggcaatgaactatgtcatgtatgagggagacagaggggacctgggagtgctggatgttagggaccactgaaatcaatactgtccaggctgtgcatgataggtgagaggaagggaatacttccaggaagaagcagaagtctgggactttcttttgactcgtgatgtgacctgaccaacaggaggcccttttttttttttttttttttttttgagatggagtcttgccctgtcacccacactggagtgcagtggcacaatcttggctcactgcaacctccacctcctgggttcaaacgattctcctgcctcagcctctggaaccgctgggattacaggcatctgccaccacacccagctaatttttgtatttttagtagagatgggctttcaccatgttggcggccaggccagtctcgaactcctgatctcatgattcacccaccttggcctcccaaagtgctggggtgacaggagtgagccactgtgccctgccaggaggccctttaagacattaaaaaaactcttatctgtttaaacagagatgggatcttgctacgttgcaaggctggccttgaactcctcagctcaagcaatcctcctgtccctcccaaaatgctggcatgagcctcggtgcccggcctagaaattttttcaagataataatcttagtaataaggttataagttaccaggatgcttgtggtatattgcatatgacttatgaaatcctttggaatctctaaatcagataatttggattcactctggctattagaatacaatatccacatcctactggtagtatgattctggatatattatgctgctttctccaagatgagataatactgctaacttcattctctccaagggcctttgcacaaatcatgtaaaaaaaaaatccatcaataactaacttgcccctgccacatttatcaggtgaccactaatgtgtcaggccttgaaaggactacaatcaaatgttacacacctaagtgagcccaagctagaagagtcagaaggtgaaaataacagcctcccaatgacatcactaggccatcatttctcaaccactgggaagccatgggccctttaaaaattagatgagctttatgagcccaagttccact

SEQ ID NO: 1560048 - DNA, 4001 bp, Homo sapiens
ctcaaaaataaataaatgacaaacatttaagtttaaaaaaaaaaagttgtaaatggaggctgggagaagggatgagccctgcccagtggggccatggcctgactaccgctgtcagctgtgattgcagggaccactccatggcttggccaagtccccagggtcctgctgagtctccagcccagcctgcccaccgaggccccagagctggggaagggtgcacaccatctcagattccgggactcaaacaccgtctcctcgtcgctgtccagcgaggccatctccgtggggtcctcagtgttggcgaggaggccgtatcgcctccgctgaggcttcttcaacctggaagtaggtccaggcatagtcagtggcccctccccgccaaccctgcctcctccttccctcaggactctcattgccgtcctctactggagccccgagccctgctgcagacctccctggttttgctgtgcctgcttctttcatgtcctaatcgccaagtgattaccattcactcccatggcgatgacagtaagaagacatgtgccctaccaggccctcccatctcccctgcgccaggaccccaggagaggcacgctgatgtcactcccattgcactgatgaaaagactgaggctcacacaggggtgagactttgccaaagacaacagaatggaagcctgtctcagggccaagcccctggtggccccagcagcccgggaggcagggagggcgcggcatacaggcaggggagagcgcgcagcaggtgcttccacaggaagaggtgtggagcacaggggaggctctgcacagggcccataaaaagcagcatggcggagtgcaggtgctcacatctataatgccagcactttgggaggccaacgaaaaaggatcacttgagcccaggagttcagaccagcgcgggtaacatggcgagaccccatcgctacaataaaaacttataaaaaataaaaagcggcttgactttgccagggtggtgatggggagggataaggtcctcgctgtgtctctcccacccgggagaagcagccacactgggtagtcaggagcccagaggagactggagccacaggccagggaagccggggtggcctgaacacgcagaagcccctcctgcccaggggctgcctacagctggagacccccgcgagggtctggggacgcagctgcacctcccgggctgtgggagcacccaaggcgggcacgtggccgaccctggcgacgaaccagcttcagtgggtagaagcagaaaggaaaatatcgggaccccacggaaaggcctggcggcaggcgggaagatgagaacgaggacgggcatccggcgacaaggagccaaggaggccccctcgccccgccagggcctgacccctgcccggcatgctccggcttcagtggccccacctgggaaacgggcagcgtcacccccgagttaagaggcggcgcgctgggcacctccaaccccaggcgcaggctggagagcgggtgagtcccgtggcccctgcaccgcccacaccacgtgacgaccccgcacagcaccgcccacgcccactccaacagggagagagggagggagggagggagggaggggaggaccccgcggcccggcacgtgacgcactaggcgcgcgctaattggccaaggctgagagacggcgcccacgtgcgcctgacgcacctaaacgcccggatcaggaagtagagcgcggtcaggccgcagaagcccaggatcacgtagaaggagcgcgtcagcgccgagcccgacgcccccggcggacgcgtgtgcgtgctgttgtgtggcgcgcccggctggctcccgttcgtcacggccggcggcggcgacaacgtgacctgcgcggggcgcagcggcgaggcctcttcggcaccgcacggcagcgccgccagcagcagcgccagcaggagcagcagcagcggcggctgcagcacgcgcggccccatggcccggcggaagcggtggcggcgccccgcccctatgcgcgctgtcagtcaggcgcgcggaggtgatgccagccaatggggcgcggaggcggagcttgacgccgggccccgcctccgcctggtgagccccggcgctacccacagtgccccgcgcgcccgccgcggaacttgcttcgtcgaaccgctccaagggatcaggacggaggcccggagcccgcccgtgggagtcccggcaaggcgcagccggcagagcccagaactgccagcccagcgtggggggtcgcggcttccgaggaaatcgggctggcagcggggagacggggcggaccccgacttcaggacctcgggccgctcattcccacccacttcggggcgacccccgccactcctgccccggcctcacggacactgagaacgcgtcggccacgtccagggcccaggaaggtggcgccccgctcccaagcctgctacagggaacccgggactcggcccaagacggggcctgacagcggctgcgcggccgccgctccctcgaagccgagtgcgcctcagatcccgcgagactggagtctccgcgctgcgaaccccctcagtggcgagccccccgcggtcactgctcggacaatgacccttgcagtcttccctgtcgggtcctactcgtgcgctgaaccgaggtccgcaggcttttcttccagtggccccgctccgccgacagacccccctgaaccacagactcggctttctgggtgcacacgtggccctttattcgaatccgactttcacagggctccacatcgttgtgggcaaggactggccgccccgtaagctgccggcgcaccgcagcccgtgctccaggagagactcgaggccctgagcccgcacctcactggcgaagcgcctcctggaaggaggaggaagggagggagaacaggcgcgggctccaggcgggggacccggcgctcccgggaggcgctgccctgcacccaacacacaccgaaaggcgcccgccatggggccataggtgcgggagagcaggactcactgaaacgcccaggtgccgcccgggacagggctcagcgccacatgccactcttcccgaaagcacttacaggggacaagcctcctgggcaagcggctgcctccagctcttgttccaggtgaagtccctcctgggacagtgaccccagaggtcatcgctgctctcaggccacccttccccgagtcctggccgggccccttcaacctgccaaagcaaagcagcgttactcccaacgtcctccacagggctcacagctgcccctcccggcctccccggaaacagccacagcccctaggaaggtctcaggctagtcagggggctgtgacctcaggctccgtcacaggccagcatgcccagggcgggtctgcaccttggcgcagctggagccagctacccgtatgggatggagctatgtgggccagtgtgggctctagaaaaaaactaatggcggcaacagacatcagagaaagctaagttaagagtgtgacttaaagaggtctggaaaagacggtcaattgagcaaaaaatccaaaaggcgggggcgttcactggtcttcaatcctgcttaagggatttcatctatgagccaggcatgactgggcccaggctgcacctggctgcacgtggggagcgtaatggctgggcctgactttagttccagcttaattgaaaaaaacaaaaacaaagttaaaaaaaaaaggaaaaacaaaaaacagtcacaggaacattccccgggcacatgactttcagtgagctctcaacaagagggatgtggacacgagcggaaggagttacctcgaattacagggctatttccacatatgagctagccaagggagcagcttgcgtctcagagggttctgttgggcgcacaacacttctgtcctccgagggctgcagcttccataggctagcagagaatgctcagaactcgtgaagcaacagcagaactagctaaccggctggccgtctgaggtcgccctgggatgc

SEQ ID NO: 1560049 - DNA, 4001 bp, Homo sapiens
gacctcaaatgatccgcccacctcagccacccaaagtgctgggattacaggtgtgagccaccgcacctggccgattcatcttcatttgtttcccgccagccccagaacagcctggggcagacattcttgtttcttttgttcacttgtccattagcagtgctctaagcgcagagcccagcacacaggaagtgctcaagaaaaggattgttgaatgaatgaatgagcctcatccagaacacaaaattcacccaactgcactgctgaatcctttggtctctgactagcttccacctcgtaaatcaggagtggacaagctttcctgccaaaggctggagtctctgctcccactactcaactctgcccttctggtgtgagagcagccactaaccgtatgtgaatcatttggctgtgtgccgtaaacctttacttaccaacactgaaatctgaatttcatacctctttcaggtgtcagaaatgttctttttcacccacccccatttaaaaatgtgaagtccattcatagctcccagaccttaaaaaaacagccaggggcagggtttggggggccctagcttaccacctctgttttactttatttatttctatttattaattattattataattattgaaacagagtctcactgtggtccaggctggagtgcagttgcgtgatctcagctcactgcaacctccgactcccaggttcaagtgattctcctgcctcagtctcctgagtggctgggattacaggcccatgccaccacacccggctaatttttgtatttttagtagagacaaggttccaccatgttggccaggctggtgtccaacctctgacctcaagtgatccacccacctcggcctcccaaagtgctgggattataggcgtgagccaccgcaccggccacttatttatttttgagacacagtctggctgtgttgcctaggctgtatcctcccactttagcctccaagaagctggggctacaagtgtccaccaccacacccagtaatttttttttttttttgagacagtctcgcactgtcacctgggctggagtgcagtggtgcgatctcggctcactgcaaactctgcatcccgggttcaagcgattctcctgcctcagcctcccgagtagctgagattacaggcgcctgccactatgcccagctaactctgttttgtttttgtttttgtttttgttttgttttttcatttttagcagagacggggtttcaccatgttggccaggctggtctcgaactcctgggctcaagcgatcctcccgcctcatcctccgaaagtgctgggcttacaggcctgaaccacagcgcccggcctccacccctgtcagaagaaccctctgaaaatcggtcccactctacggaggagtagagggagactcggagaggatacggaccgtgcccatgttgcgggggttcccagggcgtggggtcaggagttaggggtgtgcttctctcccgtccccttgctgccggggtctcaggtccgcttttccccgggaccgggctccccctaccttccggggccaggatggtgaacactggatcctctgccggcgcaccccgcacatcctccaggatctgctccaccgtggggggcgctgggcgggtgggcagcagcacgcgcttctttgccttggagcccatctctgaaggcggggaagggggcgctgaccggggcgtccacctctccgcccttgcccgggctgctcctcccgcccagcgaactcgtacgcacccgtcgcggtcccgctcccggggaagcccgccctgtcccgcccctctgagctcgccccaggccctgaccctccctccgcccaaaaacacggtggccaaggcttcagggtctggctcaacctctgcctcagtttccccgcggtcaccccagtcgccggcctcttcccacctgggcgcgggacccgaaagcccagcgtcgacgacgcagccacttccgattccggtcggagcaccgccccgtccccgaacacgtgacacacacttccggcctcctctcccgccggcccgccgctcatcgcggggctccgccccgtcttaaagggatagtgcccttgagactcggatctcagcctctcaggcgaacccgaacctggacgcgctacgatgagagcgagttcgagtccaggctccactggctgggtagaaaagcatccgaggctcgtctttctgaaaaggggaacacggcactaggggacacgccacccatgtggctgacgggagcacaaaattgctgtccacctaagggagcctggtggtgcatgagcactcggcggccggaacacagcgggggcggggcggtcgcggcgcctccacttccggccaaggcgggtcctcccacctcggggacggtgctggaggtcaccttttcctctccgctgatgcctgggaaggcagaaagagcagagggcccttttcctctctcaggggctttattgagatgcagtttacataccataaagttctcctgtttatttcgttttgttttgtttttttagagacagagtctcactgtgtcgcccaggccggagtgcagtggcgtgatctcagctcactgcaacctccgcctcccgagttcaagcaattctcctgcctcagcctcccgagtagctgggactacaggcgcccgccaccacgtccgtcaaaatttttttttgtattttagtagagatggggcttcactgtgttgcccaggctggtgtcaaactcctgagctcaggcaatccgcccgcctcagcctcccaaagtgctgggattacgggcgtgagccaccgcgcccggccaaattcgcctgtttaaactgtaaattcagcctgggcgcggtggctcatgcctgtaatcccagcactttgggaggccgaggcgggcagatcacttgaggccagtttgagaccagcctggccaacatggtgagaccccgtctctactaaaaatacaaaaattaggctgggtgtgttggctcacgcctgtaatcccagcgctttgggaggccgaggtgggtggatcacgaggtcaggagatcaagaccatcctggctaacatggtgaaaccctgtctctactaaaaatacaaaaagaaaaacaaaattaaccaggcatggtggcggttgcctgtagtcccagctactcaggaggctggggcaggagaatggcatgaacccgagaggcagagcttgcagtgagccgagatcgtgccactgcactccagcctgggcgacagagcaagactctgtctcaaaaaaaaaaatattgttgagagagaaggaaggaaggaagggacagagagagggaaaaggaaagaaagagaaagaaaggaaagaaggaaggagaagaaaaaggaaggaaggagagagagaaagaaaaaaaagaaaaaggaaataaagagaagaaagtaaagaagaaaagggagaaaagaaaggaaaggaaggaaagagaaggaagaacggaagaaaggaaggcgagagagaaagaaaaagaaaagaaagaggaagaaagaaaaaggaaagagaaagaaggaaagaaagaaagaaaaggaaaggaaggaaggggccaggtgcggtggctcaagcctgtaatcccagcactttgggaggccgaggtgggcgaatcacgaggtcaggagatcgagaccatcctggccaacatggtgaaacccatctctactaaaaaaggaaggaaagagaaggaagaaaggaaggaaagaaggaaggaagtaaagaaaaggaaggaagggagggagggaggaaagggccaggcacagtggctcacgcctgtaatcccagcactttgggaggccaaggagggaagattgcttgaggccagggttcaaggctgcagtgagctacaatcgcaccactgtactctagcctagtcaacgtagggagaccctgtctcaaaacaaacaagaaaaaaaacaaaggaatcaccgcaggagaggattctgggccatggtgagccatg

SEQ ID NO: 1560050 - DNA, 4001 bp, Homo sapiens
ccaccgtggggcgtccagtggcattgtcccacgacgtcgtcagggctactgtggcagtggtggtggtggtggtggtggcggctgtggccatggtggctgtgggctgcattctgaactggggaggagggccctgtggggaggaagcctggtcagctccagctagacctacttctcctgcaggagccactgcagacaagctgggtcttccctgcaggagcaggagcccacacagggggcagtgactcatggagaggtagcagagccggaggcagcctccacccggcttggctctgcccagcgggccccgggggctctctctggacctccatctcccatccccatggcgggggaggaggcctggccctctgagggtgcgcctgtacccatcacaactgcacacagccggtgcggcctgtcctgcaaggtagcgccaggccctggagctcagcgctgggcagggcaagcactcggaggaatggggacgccaaggcggtgcagccggctcgagaaggactccagacgccctgtccgccccatcacgggggtggggggctacccccaccccaagaagttcagctacaccctggcagggcccacccggccatggttgggtagagggagacctcccgctgcctgcgcgccagggagggtgcaggggctgggcgcgtgctcccgggtcacgactccgggaggtggaggtctccccggtgctgagtgctggtgggagtgcaagggacaaagaaggcgcatctgttcccagccccggagaagctggttcccatggcgactgcggagcaggccgcggctgggggggcgggttgccagggagcggcggggagggggcgcgggggcggcggcctgggggggggcggcggcctcgggggggcgggcgcgaagccgcaagatggccgcggccgcctccccgccgtgcccagcccgggcgcccggagcatccccggccgccttacgctcgggggaaactgaggcggggcgcggcaccagggaaaggagccgcctggacgctgtgcggcgcagccgggtggggaggcccgggaatcgcagggggtcggggctggcgccggggtgctcggcggccccaggtcagcaccgcacgcgcgagacctttcccggagcgagaggagcgcacaggcggcagccgctcctgcccttcccggacttccgcccacacgcgacagcgggaaactgaggcccaaagccgggcagggtcccggcgggggctggtgtcctcagcgctcccggtcacaggctgcccgggccctggtactgggggaaggggccgcatatgtaggtcgggaaatgagttcaggctggagggggtggggacaggcgcaggatggtgaccggaggccggggaagatggcaggaggccgaggggaagaggggggctcctgggggaggcggctgcgggagccgagggcggaggttccccacggggcagcaccgcgcccccgagccggccaagggtggggatggcgagccaggggaggcagggacccgacgccagggctgagccgagacgccatcgtcctcgcccgacctcacagggagaaactgaggctggggcggggcctgagcgggggtccctctggaggcagccgggtggggggcgcaaggcccggatctcggtccccacgcccgccggactcctccgcgccctccctccggccgcttagcccacagccggctgcgatccccggcctgtcccccgtccgccccccgcagccccgagcccgccgcgcctacctcagcgccgggacgagcggcccatgggcggcgggctggcggcgggcggctgcgtggcgctcgcggctggctccggcgcccggtggccgcggagcaggcggagaatttatgaatggagagcgcggcgcgggggaggccggcgcgagaggaggggccgcgcacgtgaccgcgttggcggcgcgcccgctccgcgcgcccggtgctgcccggtccccggcccgccgcccccgctgcgctcgccgctgggtctggctggctccgcgccggccaccgcctccccttcccttccggcggggcggggggcggagcctgcgctcccgggcgcccactccgcacgcggagccgccccccgcacccgccgcggcggccgagccccgcccccggcccatcggcacgattcacctcgcccggtcctgaggtcccagggacgcagctgggggtgtcctggaattcacgactctgcagcccgaggtgcgccgcgtgcgcaggagggggtggggtccgggggggcacggactcccctctcacgttgcttggtccgtgggggttctggggcggcacagccagggcccctcggccacaattcccctttaagctgcacagcccagggtctctggacacaggcgccccgcctgcttccccacgcaggtcccctctggcactgtggaggactcgccatgcctctcctgccccctcccctgtgtgacagcgatcacagaccccggcacaaagctgagcagagcccatcggggcccaaacgtgcactcacagaggcctgctcctcgtggggtgacatcagaacgacacccgcagaaacccaaagcccaaagctgcccccgcttctccctcttagaccatcgaacctcatcctgcagatactcaggccacacacctgccaccagcctggcccgagcgccaccccaacccctctgagcccacgcctaacaccccacagcgcctcctctttctcgtcccaaagaaaggctgacaccgctctggcacgtggctggcccagctcagcctccccgcctctgcccttgcaggtgccctgtacccaggcctctgtccatgcagccagagattcaccccggtttccttcaactccttccccagcttcacagtctcggcgcttctgctcttggcttccagcccatgcctgggtcccctcctctgctacgtccctccaaggccctatgccttgcgccttgcctgttcctgtgtgctgtggggccaccactccgatagctgtgaactccaagggcagccccagggaacctggtgccaggcaaatgggaattgcatgggcaaaggttttgaggcaaaaaagtttgcaagtcaatgcctgtgaaggaagcagagaaatcgtcttgttcccagcaggaccatgacatgggcaggcttcagggttttttgtatttcggttttgctttttggagagacagagtctcgcactgtcgcccaggctggagtgcagtggtgtgatcacggctcactgcaacctccacctcccggattcaagcaattttccagcctcagcccggaaggtagttgggactacaggtgcgcgccatcatgcccagctaatttttgttttgtttttttttgtagagatggaatcttgctatgttgtccgggctggtctcgaacttctgggctcaagagatccttctgtctcagtctcctaaattgttgggactacaggtgtgagcccccacaccccgccaggtttctgatttttaataaagactccctctggctgtgtgaagaaaaggtacctgtactaaacggggggaggctggggcctcctaggcaagagatggtagccgcggtggccatgctgggtgcacaggccgggacagggcggaattccagaggaaccccaggtttggggctggagtaatggcgccctcacccgtgggcgaccctggagtggggactggagggaagtggttccacgagtgagactgagtctattaggcctcccagtttcctggagtggcagctggatatgcggtcctgagagccaggaggtgcacaggtcacgactcgaaaagtgaacaggcctcctcctctgcaccccccgagccagggccaggatgaccaggctccaagtgaccgtcacagcgctggcccggtgggaggagccaggcccacgccttcatcctgagtcggaccagcagggccttcttcaggtgcttgggttccaggggacagtggcgcccgccattgcactggcc

SEQ ID NO: 1560051 - DNA, 4001 bp, Homo sapiens
tggcgggatcttggctcactgcaacctccgcctcttgggttcaggagcaagtctcctgcctcagcctcctgagtagcagggactacaggcactcaccaccacgcccagctaatttttgtatttttagtagagacggggtttcatcgtgttggccaggatggtctcaatctcctgacctcgtgatccgcccgccttggcttcccaaagtgctgggattacaggcgtgagccaacgcaccaggccagagaccctgtcctttaataaaaataaagatagcatttctggcgtgtcttcagaaattgccgtgtggccagcataagggggggcagcatcctgggccacgtctcccaccccctcaggccgggtgtccaccgggaagtcccccttcacccgctccaagaccttgcctggcatttgagtatggaaccttctcagattttgcccacagggcccggggagaagcaaatcctcaccatgttaggaggtttggggaaactgaggccccgggagcagaaacctgaggctgcagagggccagggacttgtccccagctgcctggggcttctaggcagaggctggaagtatgtccgggctctcactctggcccagagggctcaagggtaaatcccttggttcctctctctctttcccacccagatccggacgctgcggctgaagatcttggcagacgcagcagctgagggggtcccggtgcgtggggcccggaaccagctgcgcatgtacctgaccatggcggtggcggcggcgcagcctatgctcatgtactggctcaccttccacctggtgcggtgagcgcgcccgctgaacctcccgctgctgctgctgctgctgggggccactgtggccgccgaactcatctcctgcctgcaggccccaaggtccaccctgtctggccacaggcaccgcctccatcccatgtcccgcccagccccgcccccaacccaaggtgctgagagatctccagctgcacaggccaccgccccagggcgtggccgctgttacagaaacaataaaccctgatgggcatggcgtggacagcctctccttggcctcgcgcacgaatgggcgggcccagcgctgggcagggggcagggagctggggacgggccagagtaggcaccacgctgaccagtcgcagaaggcagagaggaaggtttaatgagccctgtccagggcccttcagtggggagcctccttcttcttgcccttctccttcttgcccttctccttcttcttcactttgggcttcttggccttgcccgggatgctctcgtgctgcttggagccagcagcgtgggactgtggggccgagggcagggatgggagagaagagatggttctgggctggaagcgagacagggggaccactccccgcaccctccccgccagccccagtgcggggacgcctctctggggtgcagggcacgtgcttggggacgctggcgagagccccttaccttcacatccgtgtccgaatcgctggagctgctgctggagtcggaagagctgtggtgtccttgctggatggaggtgcggcagtgaggcggcgccccttacccagccccctgaagttggaggcctaaggcaggaccctggggtcaggggcaaccccagccttcccgcccctccgcagccggtgatgaggcgacttacctttggacccggacctgcccctgcctccgaccggccctgaactttgtggggactgagcttgggatctcccccgtggcccgcccccacaccgggcttctgggaggtgggctccagggctgtggagagaagttgggtggttggtgcaggcagcttctgggcttgagtccggccccctgcacctccagtccacactccccaggagctcacctgctcccaggtcgaactccatggcggtaagagaagttgggtcctaaggccaagggcgcctgggccctgcagaggagcggagcagggggaggagcgctgagacctgcccgttggaggaatgctgagacgccccacccaacctctgtcctggtcctcagccctgactcattgcccggcaccacccaggatttcctctgtgagaagtgggggagatggacaggtgactgcttccgccagccttggtgcctcaggggaggccgactgaggggggctctgtggatggcattcggggagctacaggtttcccccaaaagctcagatgctcgttcttgaagagggaggtgctgcccctgccttcctgcgtaccgcgacaatacagcttcctccgcggcgctttaacacgcagggcgctgctgccaggggcgtcccgtgttctaactcgctcccacagcccctccggcttggtgagcagcgtctgaggggtgaggggcatagacttggagccagcctgctgcactagatgccagctgtgtcacttagcagcaaggtgacctcagcaaagttgttttacctctgtgcctcagtttcctcatctgtaaataacagctacccatgggattgatgtgaaagtcagaggagttaatttcctagaatggtgtctggcatgaagtactgataatgtgttggttttttaaaaaataaaaggtaggtgttttaggccagtcatggtggctcacgcctgtaatcccagctgctccggaggctgaggcacgagaatcacttgaacctgggaggcagaggtttcggtgagccaagatcacaccactgcactccagcctgggcgacacagtgagactccgtctcaacaaagaaaaaaatatatagatataaaagataagtgtcaggccgggcatggtggctcacgcccagcactttgggaggccgaggcaggtggatcacctgaggtcaggagttggagaccagcctggccaacatggtgaaaccctgtctctactaaaaatacaaaatttagccagccatggtggcaggtgcctgcaatcccagctacttgggaggctgacccaggataatcacttgaacccgggaggcagaggttgcagtgagccgagattgcgccattgcactccagcctgggtgatggagcgaggctccatctcaaaaaaaaaaaaaaaaaaaaaaaaaaaaaaagtgtcttaatcagtgtgggctgctgtaacaaatatagagagggtggcttcaacaggaaacagttctcacggtcctggaggctggaagtctgagataggggtgttggtagatccagtgtcaggagtgccgcttcctggctcgttgacagccaccttctcccttcctcccggcatggcccagagcaagatcatctcatgttgtgtccctttctataagggcacaaatcccattaataagggctccacccacatcacctgatgacctcccagaggtcctacctccaaataccatcactcagcttcagcacaggagtttggggaagacacaaacattcaacccctactgttccaacccctgcttcacagatgagaaaactgagggagtaggtaagaagacgaggggcaaacatatagcatgggccaggtgaagtggttcatgcctgtaatcctagcactttgggagggaagcaaggcaggaggatcacttgggcccaagagtttgaaatcagcctgggcaacatactgagaccatctctacataaaattaaaacttagccaggcatggtggcactcgcctgtagttccagctacttgagaggctgaggcgggaggatcacttgagcctgggaagtccaggctgcagtaagctgtgattgagccactgcactccagcctgggtgacgaagcaagaccctgtctcaaaacacacaggctgagcacagtggctcacacctgtaattcccagcactttgggaggctgaggcaggcggatcacctgaggttaggagtttgagaccagcctagccaacatggtcaaaccccgtctctactaaaaaaaatacaaaaattagccaggcatggtggcgtacgcctgtaatcccagctacttgggaggctgaggcaggagaattg

SEQ ID NO: 1560052 - DNA, 4001 bp, Homo sapiens
ctcccgagtagctggaattacaggcatgcaccaccatgtctggctaatttttgtatttttagcagagacaggttttgccatgttggccaggctggtcttgaactcctggcctcaagtgatcctcctccttggcctcccaaagtgctgggattaaagggtgggattacaggcatgagttaccgtgcccagcctctctctctttttaatggtatatatttttttctatttcatggctcactgcagccttgacctcctgggctcaagggatcctcccacctcagcttcccgagcagctgggactgcaggctcttgacaccatgtccatctcattttttttgttttgtagagatggggggcgggtctcattatattgcccaggccggtcttgaactcctggcctcaagggatccacctgcctcagcctcccaaggtgctgggattacaggcgtgagccaccacgccccgcccaccaacccacaggttatttttcagccctggcctactccgggccttcccggaggtcactcattttaccagctgctgctgttcccagaggccatggtgcccggcaacctcctgccgctccctgcacccacctgccgctccctgcacccccctgccgctccctgcacccccgcagcccagggctccctggggagctgcttaccaaggttgctatacgtgggctgagtcgaccaggtggggttgtcgggctcggggggctctgtggggggctccgggctgctcatgttgctggggaaaggtcaaacggggcgtgtgtggggtgaccgtgtgcacgcacagggcgacatggggaggggtccgtgagtgctggggcctgggagaccgtcgaggcctcctgctccagggcccttggtgagaacaggcgcacccacactccactcccttgtccagttttgaccctgctgtgtgatcccgagtgggtttcctgtcctctctgggcccctgctgtgtgatcccgagtgggtttcctgtcctctctgggcccctgctgtgtgatcccgagtgggtttcctactctctctgggcccctgctgtgtgattctgagtgggtttgctgccctctctggggccctgctgtgtgatcctgagtgggtttgctgccctctctgggcccctgatgtgtgatcccgagtgggtttcctgccctctctggggccctgctgtgtgatcccgagtgggtttcctactctctctgggcccctgctgtgtgattctgagtgggtttcctgccctctctggggccctgctgtgtgatcccgagtgggtttcctactctctctgggcccctgctgtgtgattctgagtgggtttgctgccctctctggggccctgctgtgtgatcctgagtgggtttgctgccctctctgggcccctgatgtgtgatcccgagtgggtttcctgccctctctggggccctgctgtgtgatcccgagtgggtttcctgccctctctggggccctgctgtgtgatcccgagtgggtttcctactctctctgggcccctgctgtgtgattctgagtgggtttcctgccctctctggggccctgctgtgtgatcccgagtgggtttcctgccctctctgggcccacttcctcaatcatgaggcaggtctgtcacccatcaattttccaggcagtgggaaggacccccctctgcacgtttgggatggggacagagtgttcagcctgaggacaggcctttgggggtcagttgcgggggagacagtgtccagggacccagggatccacactcaggcctcatccccgagggctcagccgtgcggttgctgccggcagccaggcctcgacccacccccgcccagatcccaacctcaaaaagtggccgcttctgtccagctccccgctccaggagccccctaccttcaagactggcgtgccctctgggggaggaggggtccgtggggacaaactcccaatggccacagcccctggcctcgcaggaggggtctgacctggcgccggcagctgacaggaaaacgtccggcccactgtcagaccgcagcccggggtggggaggggacatttctgcaacacttccccagcagccgaggccgccgcctcccctgcccgcccgcagaggacaggatgtaaccgggagggaacagcctggacagagaccaggaggtgggatctgaaagtcaatagccccagggctgacagccgggtgggggcagtggaaggccccccacagcctcagaggccaggctggggtgcggggcagtggggagccctgtgagatggggagagaggggcagagctggcccaccgtaggggagcgcacagaacacggtggcggctgtccctggagaaggtgcaagtggggtctgtgggtttcacttccccgggaaccacctcccctcctgcggcagcatctgaggagcccccagcggccccctgccccatcccagggcccccgaatgtggagcgtgggcgaggaccctcccggctctgccgcgcctcgctgtgtgactgcgggcaaatccccaccctctccgtgctccggcgaagaaagaagagtggctcccacatcccgcctgctaacagccacgcctgctggatttttctttgaaaagatggaatcggctcgttttcccccttcccccttcctcactgcctcgatgcatttatttagaaaagacgttttagataaaatcaccataaatggaaaaatcaagaatggaaaaaacccaaggaaaagcagacgcggggtgaaattccagctgaactgcgtgcctgtcaaaactgtctttttctttggagacagggtctcacactgttgcccaggctggagcgcagtggtgcaatcccagctcactgcagcctggaacgagctcctggggcgatcctccctcctcggcctcccaaagtgctaggatcacaggtgtgagccaccctgcccggccccaaagatgtttttgctgcaaggattgagtgtattttatgtgggatccccgatcccgtttcccttagggaaaatgggcccagaaagagtaggggctccatccagggtcacgcagcagctcgaggctgggagcagaggtccacagagccactgctgagtccccctggcctcccccaatcccctgagaaggggcaggaggggaaggagactacatttttcttatgaacttcccttgagtgggtcccatgccacacttttttttctttgaggcagggtctagctccgtcccctaggctggagtgccgtggtgtgatcatagctcactgcagcctccgcctcctgggctcaagtgattctcccacctcagcctcctgagtagctgggaccactggtgtgcaccaccatgcctggttaatttttattttatttatttatttttgagatggagtctcactctgttgtccaggctgcagtgcagtggcgcaatcttggctgactgcaacctccgcctcccgggttcaagcaattctcctgcctcaggctcccaagtagctggtactacaggcgtgcaccaccacacctggctaatttttgtattattattattatttttagtagagttggggtttcaccgtgttggccagcctggtctcgaactcctgacctcaggtgacctgcccgcctcagcctcccaaaatgctgggattacaggcgtgagccactgcgcccgccacagagtttaaaatgatgcaaaggctgggcacatgcctgtaatcccagcactttgagaggctgaggtgggtggatcacttgagcccaggagtttggtaccatcctgggcaacacagtgagaccccatctctacaaaaaataaaacatgagcctggcacagtggcgtgtgcctgtggtcccagctactcagaaggctgaggtgggggcattgcttgagtccaggaggtcgaggctgcagggagctatgatcataacactgaactccagcctgggcaacagagtgagaccctatcacaaaaataaatcaataataaataataaaa

SEQ ID NO: 1560053 - DNA, 4001 bp, Homo sapiens
cgctggtccgtgggggcctgcaggagctggaccacctgcccccctcgatacagtgtgaaattcgcccccgggaagttcccaggggccatgcatgcgatgtggatggggtcctcttggctgcttgggtacgggggcaccagccggatggatggtgctgggatcgccaaggagcctgcaatgcagagggtaaggtgggtgggtgcgtggtgagagtggaggctgccctggctatgtggcctcgggcaagtagaccaccctccctcagccttgtgttttctgtgagtcaggaggctagtgaccctaccccacactgcctggcacatggtgacggctccctgtagttgaattacttttcttttttcttttttttgtgagtcggagtctcactctgccacccaggatggaatgtagtggtgtgatctcggctcactacagcctccacctcccgggttcaagtgattctccagcctcccaagtagctaggattacaggcatgtggcactatgcctggccaatttttatatttttagtagagatggggtttcactatattggccagactggtctcgaactcctggcctcgtgtgactccccccacctcggcctcccaaagtgctgggattataggcgtgagctaccatgcctggccatcagttttcaataatagcattggttattacatagcaacacaactatactcttattttttatttaatttattattactttatttatttatttagagacaaaatcttgctttgtcgcccaggctggagtacagtggcctcagcctcctgagtacctgggactatgtgccaccatgcctggctaatttttatatttttagtagagacggggtttcaccatgttggccaggctggtgaacctggctagctaattttgcttattttgtgtagagatgggatctcactatgttgcccagatcctcacctcaagtgatcctcccaccttggcctcccacgagctgagtcctgagtggtgaggaaggacccatttggagagctggggaagggcattccaacagagggaacagcataggcaaaggtccaggggatggaaggggaatgggggtgtttaaggaggagcaaacacctgatgcagtggctcacgcctgtaatcccagcactttgggaggccaaggtgggaggactgcttgagcccaggaatttgagactagcctggagaacacagtgagaccctgtctctatttaaaaataaaaataaatattaaaaaaggagcagcaaggaggccatcatggcaggagggagggggtgagtgaggtgggtggcaggaaggggagggggtgagtgagagggagggcaggagaaggaagggcagaggacttttatctcctttcccaggcttgggtgaagaatacggattttggagcacggcttcctgcaggatggtctcctggggatccatctctctcctgattgcccacaggcttctgagcagagtgtctggccaggtgaggtctatacaaaccctccctcgtccagcctccaacccccacccacccctgccacactgatatccccctaggtagaccctcctgctgccccagcactcaaggagccttcagagacgaagcggggctgaatcatggggtgtgggcacagctgactccagaggggtgatatttctgatattcataaacttgggggtgatgaggagcctaagaagaaaaaaccaacactactggagagtttccaaggctcagggggaaaacccatctgccaagggctcagcctcctcgatgccctgagaacggcagcccctgcactggtttctgcccctggagcggcaaggtggacagaggatggggggaaaggcgtgggggatctgagaggggggcttcagactcaccagctgcaaagagcaagatggtccagggcatctctctctgcgtttggctgggaaatccggctgaggccagaggggcccaaggctccccgccaactcctcctgtgaggccagatcggggaaaggagaaccagggctgattctcgagctgagagtttcctcactggcaggaagttgcacacacaggcttgggcactgaaagggactctctcccctccccaccccttccccaaacacacatcagacccgcgcacctctctggttgcggttctgcagattagaggggaaaaaaatggatgagatgtttaggtggttttcacaattttttcctctttttttatttttattttttgagacagagtcttgctctgttgcccaggctggagtgcagtggagcgatctcggctcactgcagcctccacctcccaggttcgagtgattctcctgcctcagcctcctgagtagctgggactacaggcaggagccatcatgcacagctaatttttgtatttttagtagagacggggttttgctgtgttggccaggatggtctcgatctcttgacctcattatctgcccgccccagcctcccaaagtgctgggatttcaggcgtgagccaccgtgcccagccttttgtctctccttctaagagaactcctgggaatgagacagggtgacagcagtgggatgtttggaaacccatgcccaagacacaaaccatagcctaaccagcaccaacatttaaacaaatatgggcaggagtgggaggacatggtggttagggcttggcctctgtgacctcaggcatggcttacctcctttgaggcttcagtatactgctctgcagaatggggctaagagtagtagacattaggccagacgtggtggctcacgcctgtaatcccagcactttgggaggctgaggtgggcagatcacctgaggtcaggagttcgagaccaggccaacgtggtgaaaccccgtctctactatatacaaaaaattagccgggcgtggtggcacacgcctgtaatcccagctactcgggaggctgaggcaggagaatcacttgaacccaggagatggagattgtggtgagttgagatcgcgccattgcactccagcctgggcaacaagagtgaaattccatctcaaaaaaaaaaaaaaaaaaaaagagcagtggacattagattcaaagaacttgtagtaggaaatgcaacgcctagtgggtagtgcatgctcacaaggtaaagttacagggaggaaaaagactcagaagtttgatcagccacatgaaagggaataccagttccagatcaattctggatatagtttgtgatatagttcacaggataaactgcctcctgtttacagcccagaaacttccaagtttctcttactactgggtttgcatttatctttttaaacatttctgttcaagccagtcaggtttgcttgggggtttggacccaagaaggatgtggcatgtggtcatcaaacaccaaaatgcgtcattagagtaaacttttttctttggacacagaaagttcaatccaacctcagggcctttgcacacactatttccctggcctggaacacaattctgtcaacctggtcaaatcctgcttctccttcaggtctcagtttaaatagcacttctgggaaaactttccaggcccctctggacttagaacaatcccctagctaaattctcccacagtgccctgtaatattcctttattgcaattggcatgcttgtatcttcaaggaatttgctcatttcatcagagttgtcaaatgtattggtgtaaagttatttatatccccttactatccttttaatgtctgtagggtctgtagtgatgttccttctttcattcctgacacataaattagtgaagtctccttgtctcttatcggtcttcctaggagctaatcattgttattgatcttttcaaagtgccacagtttggatttgttgttttattttctattttattgccttttgacttgactttattcttttcttttttctggttaccttatgttcaattggctcttcttttcctagctcatgttttgtttttaaatttaaacttcaccagcagaaattt

SEQ ID NO: 1560054 - DNA, 4001 bp, Homo sapiens
ctcaccaactggatgacgaggcaggatgcttccatctggctggccactggaagcagcaccattccaaggtccagcacagtaaacttctgtagggctgggaagtattgttcactcatccgggttttttcaacgactacaattcctttaagattattggacttgaaaggaaaaaagacagtaagtcattttgcaaccaaattgcttttcaggttaagaatgctatcacttcgtgcctgacctggccaatgattttaaataaatgataccaagggatggagggaagggtggggtgagacaaatcaatgttcgagtttctttaatccaatgcttacatttcttttttgtttttgttttttgttttttgagttggaatctcactctgtcgcccaggctggagtgcagtggcgtgatctcggctcactacagcctctgcctcccaggctcaagcaattctcccgtctcagcctccctagtagctgggattacaggcgtgcgccaccatactcagctaatttttgtatttttagcagagacagggtttcaccatgttggccaggctggtctccaactactgacctcaggtgatccacccgccttggcctcccaaagtgctgggattactggcgtgagccacagcacccagcctaatacttacatttctaacccgaacaagcctctttctgtagccatttcctgccaccaaatcagcttcggtgacataaagaatgcagcatctgttcgacagataaaagtctggtgtcaagccatcctcgaaaatgagcttaattttcccttaaaatacagagaagaaaatgagttccataagctttggatgaaaagatggcaataataggcagattttttttttttaatatgtcaggggaggaaagggctggcagagggcaggccaccgaccttgcatctcctgcgccagctgtgacccgcgccatttctcattggccacaatatgccccaaaggcacgtgcacggggcccgtatcatcaggggggttcttttccatggatggtctccacctaaggagggaaaagccaggcggcacttgagcaggctctcctgcacacggccctgcattccactccaagccagggcctctggggcaggatcccctctgcaaactgaattatttgtcaaagaactgtcaaataagattccctttataattactaataagaaaacacaggctgggcgcggtggctcacacctgtaatcccagcactttgggaggccgagcgaggcgggtggatcacaaggtcaggagttcaagaccagcctggccaagatagtgaaaccgcgtctctactaaaaatacaaaaaaattagccgggcttggtggtgggcacctgtaatcccagccacttgggaggctgaggcagagaattgcttgaatccggaaggcggaggttgcagtgagccgagatcgcgccactgcactccagcctgggcgacagagcaagactcgtctcaaaaaaaaaaaaaaaaaagaaaagaaaaagaaaacacaaaggcctgaatgaaggccagggtggctggagacgggatgtgtggtggtggaggtggtaatggcattggattccaataaggccagaggcacgatcagatttaagttttaaaagaatcctgggctgggcatggtagctcacgtctgtaatcccaacattgggcaaggctgaggcgtgaggatcgcttgtgcccaggagttcgagaccagcctgagcaatacagcgagatcccgtttgccaattatttgtggcgaaataaattctctaagaaccaggagattcctgtcctggtgtccgcgtccttcattttcatcacgtgcctagcccctgataccccagctggatccgcaccgtagcttctcagtccagtccaaggcccgaatacagccggcaggaaccccaccgtcccagtctagagatcatgttactggtggccgcgccaccttccgggttcacgccctcggtgctcgcccagtccttcatccagcccgccctccgcctcccgcagcgccggataggctgtggcgtcagaaatggacgtctaacctgaccaataagagaacggataagggcggacgtttccgccctggcggggatttgaacggtacccactggttgccaagaacgaccggtgtggaagtaaccttagctctgattggtcgagggccgagctgagccaatggccgacgtggttgctgcaaagtccattgcgaagagaaagcgtgagggctgggcctgcggcgggctttagggagtggtccctggctgtggatagatctgctgatgagtccaggccccggtccattctcctcgcgctgcaaggatgctcctgggatttcggagaggccgcaggagtcatttcgtaagtagatgctcgcccgccgcgcgtggggctctgtggggccgggaattaggggtaaagtgttggggcgggttggggtttggcctgagatccagtcaagggggcggcacaagagaaagtggttttcagttgaggaagccttgatttttcgtgttctaaacttttttttttttttttaagaaacagggtctcgctctgtcgcccaggctagagtgcagtggtgcgatcatagctcactgcatcctcgaactcctgggctcaagcgatcttcccaccccagcctcccgaggagctgagactacaggcgcgcgccactactcccggctaattgttcaatatttttgtggaaacagggatcttgctatgttcctatggtggtcttgagctccttagcctcctaaagtgttggtatcacaggcgtgagccactgtgcccggcgttaacaatcttctgccccagggtcggccacagttggacaggagcaccctgcctcccctgtagcattcgtccccgtgcccggagttaactcctggacgacgtacacctgctgcactgctggatatagccattcttcatttttccctcctccacccaccatgtacaccccatcagcaagtcccatccgatatacccactacatacatctgccagctgttcccatctccacccacaccccggcctccagcatctgtctggactgctgcggcagatcctcactggtttctctgcttccactctcgcccttcccctaggtccattctccacgtagcagccaaggggattcttatatttatttattatttaatttagttttagagacagggtcttgtcctgatgcccaggctggagtacagtggcatgatcatagctcactgtggcttcaacctcttgggttcaagtgatcctcctgcctcaggctcctgagtagctgggactacaggtgtgcaccaccacacctaggtattttttatttattttattttttgcctcacactctgccaagtctcaatgcctggctaattttaaaaattattttgtagaggccacgtgaggtggctctcacctgtaatccagcactttgggaggctgaggcaggcggatcatttgaggtcaggagttcaagattagcctggccaacatggtgaaaacccatctctactaaaaatacaaaaattagcgggcgtggtggtgggcacctgtaatcccagctacacgggaggttgaggtgggataatcgcttaaacccgagaggcagaggttgcagtgagccaagattgtgccactgcactccagcctgggcgacaaagctagactctgcctcaaaaaaacataattttttttttttggtagagatggggtctgggtatgctgcccaggctggtcttaaaccttggctcaagcaatcctctcaccttggcctccagagtgttgggattacaggtgtgagccactgcatctggcttgagtttttatttaaagccccaaacattaatgagtccctgctgtgtgctgatacccacaactgacagcttatggccacacggtctgtaggatagacaagcccataaataattctgtacacaatggtaaaacaagaactgctgttgatgtgtgtacca

SEQ ID NO: 1560055 - DNA, 4001 bp, Homo sapiens
agtagctgggattacaggtatgcaccaccatgcctggctaatttttgtatttttagtagagtcagggtttcaccacgttggccaggctggtcttgaacccctgacctcaggtgatctgcccgcctcggcctcccaaagtgctgggattacagggatgagccacagagcctggcctgctgggattatttcacaccgattttttttttaagatactctcttgttctgtcatccaggctagagcgcagtggtgcaatcatggctcactgcagcctgaatctcctgggctcaagcgatcctcctgtctcagcctcctgggtagctggagctccaggcatgtgtggcaccatgcccagctaattttttaatttttttttgtagagatgcatttttgccatattgtccaggctggtctccaactcctgggcttaagcgatccacccacctcgacctcccaaaatgttggaattacaggtgtgagccactgcacccaacccacgcccatttttaacaaatgaagaaactgaggcttgcagaggttagatcatttgcccaaaatcacatgctggatccagaactagagcccccagtcttgttattctcaacactttttcctccacactacagggacttgatcttaacaccacagacatggcaagctcagagccaaaaatcaatatatgccctatttacttaatccagagtttctcaacctggcactaataacattttgagctggattattctttgtttgggggtgggagggcgctgccccacgcatggtaggaagttgagcagcatccctggcctctacccatagatgtcactagcaccccctcccgcagttctgacaaccaaaaatgtctccagactttgccaaatgtgggggtggagggaactgccccaattgagaaccaccagtttagcccttcctggaagacaggctctgtgctaaccacttttccaggatcacctcataaaaccctcaccacatcaagagatgctatgatgtctatttttgcaactagggaaaatgagggtaggcaaacccagaggctccaggaaagcagcgatcttgtctgtaagctcaccactgcataccagcacctagcacaatgcctagcacgaggtaaattgctcaataaatggaggttggtcgaataagatacaaggaagtcaagcaattgtcctagataagtaattgtccttacatagtacgtggtctgagtctaacacatatagctcagagtccagacttaaatttactccctttcctcacaattagtggtggtcccatgacccaaggtccgggtaccactcaaacaggaatcctgatatccacgtttcctcattctccacagtgctgattcctaggcaattcctcagctcccagttcccacgggcaagctcctggagtccccactcccgcccctagaccccagttgtcgggaatccaagttccacaccctcagcgggtgacccggacgggcccctcattcagaacggaaagtggacttcggtcccgatcccccttcacgggccccgactcccgctgccaagacaggccgtggcgcccgcccccacccccacggctccttacgaagctaagtgtggagcccggaccgcccttcctcttcggatccccggggccagcggcggcggccgactggtcgggtcgctgcggacccgggggcggctcctcctgccgctgccgctgctcctcctccatcttccgcttgaacagctccaggaagctgccgtcgttggcgaacaagttcacgccgcccgacaccgggctcgaacccgcgcccgacacctcctcgtccccgctctcgggcgacgtccccgatcccgactcagcccaacggctcccgccaccgccaccgcccgcggggcccggagcctcccggccctgaggctccgcccgtctccctcgggcagccattttgtcgccaggtgccgcgcaaaggactccgggaaggccgctccggccccgcgcttggcgcccgactcgcctcgtcccgaacaatgcatgccgggaagagcggtcaggccctccagcgcccgcagcgggggcggggcgaatgagggaaccaacccgaaggggcggggctagggggaggagcccccgtctcgcgggtttttttgtttcgttttttttttttctttttttttcagacggagtttccctcttgtttcccaggctggagtgcagtggcgcgatctcggctcaccacaacctccacctcccaggttcaagcgattctcctgcctcagcctcccgagtagctgggattacagacatgcgccaccacgcccagctaattttgtatttttagtagagacgggatttctccatgttggtcaggctggtaatctcccgacctcaggtgatccgcccgcctcggcctcccaaactgctgggattacaggcatgagccaccgcgcctggccttgttttttaaaaattagagacgggcgcctggctatattgcccaggctggtctcgaactcctggcctcaagcgatcctcctgccttggcctcccctcccaaagtgttgggattacaggcgtgagccatcgggcccagtcttgctgttttggtttttggttttttgtcttgttttggagacagagtcacactccgtctccgaggctggagtgcaaaggcatgatcagggctcacttcagcctcgacctctcagggctgaggcgatcctcccaccacagcctcccgagtagctggaaacacaggcatgcgccactacgcctggctaattttatttattcatttatttatttatttatatttgtggagacggggttttgtcatgttgcccaggctgttctcaaactcctaggctccagcagtcctcttacctcagcctcccaaagtgctgggattacaggcgtgagccaccgagccctgcctctcgggttttcaaaattcagcagtactcaggctggagttccccatacaggggctcccggagaatgagactgtcgtctgagactggggctgtagcttgctctctggagttggtttcacttggggctaggaacagattcgctttccagggctagaatccccgtctgacgacaccaagaataatctctatgagtggaaggacctcatctggggctgtgtgctcagctgacacctgggaacttgaatccctaactggggaatagagagcatgtctagtctgggccccccaagtagaaataggggtatctttgggttgggtaaccatctctgggataaagctcacatttgttggggacatagctggctctgtggagctgaagtccccgtctgagaatcagcttacttttttattttattattgttattattactttattttattttgttttattttattttttgagacggagtctctctctgtcgcccaggctggagtgcagtggcgtgatctcggctcactgcaacctccgcctcccgagttcaagcgattcttctgcctcaacctggtctcgattcctgacctcgtgatctgcctgcctcggcctcccaaagtgctgggattacaggcgtgagccaacgcgcccagcctattttatttatttatttagagacggagtttcactctttcacccaggctggagtggagtgaagtggcgcaatctcggctcgctgcaacctctgccctccgggttcaagcgattctcctgcttcagcctcctaagtagctgggattacaggcgcgtgccaccacgcccggctaatttttgtatttttagtagagacaggttttcaccatcttggccaggctggtcccgaactcttgacctcaggtgatccacccgcctcaacctcccaaagtggtaggattacaggcgtgagccaccgcgcccggcccgagaatcagcttattttatgagctgtagtattcagatgaagtcggggttatttctagtctgtagtctccctctaaagttaagagtgtcatgggctggggtctccatcaagggcctggaa

SEQ ID NO: 1560056 - DNA, 4001 bp, Homo sapiens
accctatctctaaaaaaaataaagaaattggaaccctcatatgttgttgggggaattgtaaaattatgtagtcctcaatgtggaaaacagttggttcctcaaaaggttagacatagagttaccatgtgatccagggattccactcccatgtggcccaagagaaatgcaaatgtatgcaaatgttcgtaatagttttgttttgttttgagacaggctctcactctgttgcccaggctgagtgcagtggtgttatcatggctcactacagcctcgacctcccggggtcacgcgatcctcccacctcagcttcctgggtagctgggactacagacacacattgccatgcctagctaactttttgtagaaacaaggtctcactgtgttgcccaggctgttctcagattcctggggttctagagatccgcagcctcagcctcccaaaatgctgagattacaatcccacatcatcatacctggccccataatatttattactcctagtagactaaaacggaaaacaatgtaactatccattaattagtgaatggattacaaactatggtccatccatacagtgtaatacagttcagcaatttaaaaaacaaatactaatataacagcacgcaggaatctcaaatacatcacgctaagggaaagtagccaagccgggcgcagtggctcacgcctgtaatcccagcactttgggaggctaaggcgggcggatcacgaggtcaggagatcgagaccagcctgacacacatggtaaaaccccgtctctactaacaatacaaaaattagcggggcgtggtgtcatgcgcctgtaatcccaaatactcaggacgctgagacaggagaattgcttgaacctgggaggcggagttcgcagtgagccgagatcgcaccattgcacttcagcctaagtaacagagcgagaatctgtctcaaaaaaaaaaaaaaaaggaaagaaaaaagaaagtagccagacactaaactccacacaccctatcatttcatttgtaagaactgtcaagaaaaggcaaaccaataaactcagaaagcagatcgggccggtgctgtgactcacgcctataatcccagcactttgggaggccaaggctggcagattacgtgaggtcaggagttcgagaccagcgtggcaaacatggtgaaaccccatctctactaaaaatacaaaaaattagccggagtgcagtggcatgatcacagctcacagcagcccttgacctcctggacacaagcaatcctccctcctgcctcaacatcctgagtagctgggactacaggcgcgtgccactacacctggctaattttttatttttatcttttttagagatggggtctcgccaggttgcccaggctggtctggatctcctggcctcaagtgatcctcccgcctctgcctcccaaagtgctgggattccaggcgtgaatcaccgcgcccggcctgacgcaaagttctaaagctggatgagctggatggtggcgacggcttcacaactttgtagatttactaaaaataacggagtcgtcagcttaaaagtggcgaacactatggtatgtaaatgaaggctcaataaagttgttacaaatcaacaaaccaaaacttgaaaaccctggcgcccctgagaccatcctgctcttctccccagctatgaagcgacccgcgcaggaccatgctccaatagaccccagacagggaaactgaggcgcgggaccatcctgcagcggcccaaccagctcagccccggagaaggccccatttccccgtatccccctcgcgagcccggacgcccagctaggtcacctccccaccagccctgccgacctcttcccacgccgtccattcgcagaggcagccgccacattcacgcctgaaggagcggttgccctgggcaacagagccagagcagaagagactacatctcccgggaagcaccgcgccccgcagaccaatggcgccccgaatcacaatcgcggggtgtcatgggagcggtagttccggggcgggcccaacgtgccccgcgccgcagcgaccaatgggaccctcaggtcataatcgcgagttgtgacgggagttgtagtttcgggacgcgcctgaagagccgcagagagagctgggagctaaggggtggcggcgaccggaagcgcagtgcacacccccatggcccgggctttggtccagctctgggccatatgcatgctgcgagtggcgctggctaccgtctatttccaagaggaatttctagacggaggtgaaggggccacgcccgtggtggcggaggtgtaagctcccccatctccgccccctaaggctggccagagtcgccacggggtccacggcagcgaaccctcgaatcctcgagggtccccttcacccttcccttagcccaaattaaccattatcacctctaaccggtgttatttccccttccccacagagcattggagaaaccgatggttgcagtccaccaatgactcccgatttgggcattttagactttcgtcgggcaagttttatggtcataaagagaaagataaaggttagtgtagaatcaggaccaaattgagcctaatgttacatttccatagcaacctctctaggtagttgtggcacagccaaaacgcttttattcccgttttacagatgaagacattaaggcaaaggtagaacttaaggggctcctttccttgtttttttgtttcttctctcctttttttttttttttttttttgagacggagccttgctctgttgcccaggctggagtgcagtggcgcgatttcggctcactgcaacttccacctcccgggttcaagcaattctcctgcctcagcctcccgagtagctgagactacaggcgcgcgccaccatgaccggctaatttttgtacttttagtagagacagggtccacgttggccaggctggtctcgaactcctgacctcatgatccacccaccttggcctcccaaagtgctgggattacaggcatgagccacaacatccagcctcctctctcctttctttattgccaaagattcctttttttttttttttttttttttggtagtaggagtctcgctctgtcgcctaggctagagtgcagtggcacgatcttggctcactcaaacctccgtctcccgggttcaagtgattctcttgcttcaggcttctgaggagctgcgattacaagcgtgcgccaccatgccctgctaatttttttagagacagagtttcaccacattgcccaggctggactcaaactcctggccttaagtaatccacctgcctcggcctcctaaagtgctgggattataggcgtgagccatggtgcttggcctattatcattattattacttttattggtattaggtcccctgaagtccaaggagacatattcagcttatttggtataataaaatcatacttgaagcactgtcaaatatgcaatggtatttaaccttctttggattatatttatatgaatgtgttattagtaggcattaccaaaattgcccctcttaatagacactagtcaagtgcatttgaggatcaagggccatgcccctcagaaggaaaaggttagtgggtactttttctcattttaattttcgtattaaaaagaaaaataggccaggcgcggtggctcatgcctgtaatcccagcactttgggaggccttaggcgagcggatcatgaggtcaggagttcaaaaccagtctggccaatacggtgacaccctgtctctactaaaaatacaaaaattagctgggtgtggtggctcatgcctgtagtcccagctactcgggaggctgaggcagaagaatcacttgaacccgggaggcagaggttgcagtgagcagagatcatgcccctgcactccagcctcagtgacagagtgagactccatctcaaaaaaaaagaaaaatatggtcaggcacggtggctcacgcctgtaatcccagcatgttgggaggccaag

SEQ ID NO: 1560057 - DNA, 4001 bp, Homo sapiens
gtctgatacaagaaccgcgtcttctcaccctcagtcagttgtcaaggccacggttttctccttcttcccctctgggggacccatttttgttcctctgcctaactccagccctgcaccccagccactggccatctccgtttctgccacactttttctcccttctctccccctcccccgcccctcccccctcccctccgctcctttcacttccctaccttctctctctttctttctttccttttctttttgtgacagagtctcactctgtcccccaggctggagtacagtggcacgatctcagctcactgcaacctccacctcctggattcaactgactctcctgcctcagcctcccaagtagctgggataacaggtacctgccaccatgcccgtctaagttttgtatttttggtagagacggggtttcaccacattggtcaggctggtctcgaactcctgacctcaagtgatctgtctgccttggcctcccaaagtgctgggatgacaggtgtgagccactgtgcccggcctgccacgcactttcttactggttttcccctgctctgcagttgtcctaggtcctgcctattctcaatctcttcctgtcttcacaccttctgagagttagctctctcctctgaccttcagcttcagactccaagcctcccctgaccctccgcctctgctcagtcacctgggactttcttgcctttgcttagatcacaagtgtctcccatgctctcctctctgtctcccttggagaccagcattccaagttctcaggctcacctcttgcaggaagacctcccagatcacttcaacccacaaaacctgcttacctctacctatttagaaaacatggatcagacgggtgcagtggctcaggcctataatcccagcactttgggaggccgaggtgggcagatctcctgaggtcggagttcaagaccagcctgaccaacatggagaaaccccatctctactaaaaatacaaaattagtcaggcgtggtggcgcatgcctgtaatcccagctactccagaggctgaggcaggagaatagcttgaacccaggaggcagaagtcgtggtgagccaagattgcgccattgcactccagcctgggcaacaagagcgaaactctgtctcaaaaaaaaaaaaaaaaaaaagaaaaaaatacaaaaattagctgggcatggtagtatgcacctgtcatcccagctactcagaaggctgaggcgggagaaccgcttgaacctgggtggcagaggttgcagtgatccgagaccacgctaccgcactccagcctgggtgacagagcgaaaccccatcacaaaaatagaaagaaaacatggatgaagggtgtgtgtgtgtgtgtgtgtgtgtgtgtgtatgtgtgtgtgtgtgttttaatgaaaccacagtttttcagtgtgtaagtttgttgcttttttttttttctcagctcactgcaacctcttcctcctggattcaagcgattctcccacctcagcctccagagtagctgggactgtaggtgtccgccaccacgcccggccaatttttgtatttttagtagagacggggtttcgccatgttggccagcctggtctcgaactcctagcctcaggtgatccaccctcctcggcctcccaaaatgctgggattacaggcatgagccaccgcgcctggctgagtttgctgctttttgaatcatttgccccctgcaatagttgagagttgaatatgacctccaaaatgggtcatcagagaatccaacaactgagactactagccaggtaatcttggaataagtcattaagctcccatgagcctcagttttcacctctgtacatcagggacgaggacagtgcacctacctcaagggatggcgtgtgaatcaatgagttttagaaaattcacttagctacagaccagatctttgggtctccctctgtccctggtctctcagaggatcctcatgttccttcccaggctgcatccaagggtggtccagccctgcgcattgtgaccccaagagcttcctttgtgtaatgatactgtcacaatgaccactcagcacctctaggggcagccgggaggaaaattagcaggcaggcttggtgcgaatactgcctccttagagctccaggaacccaggcaagtaattgactttttggagcctctggggttttgttcggttggttttgtttttgaggtaagctctcgctatgttgcccaggctggacttgaagtcctgggctcaagcgatcctctcgcctcagcctcccaagtgggtgggtccacaggtgtgtgccaccatgcctggctaggacttaggttttgtcatctgcaaaaggggactaatgatggtagccagttcagaaagcagtgtcagtattgaggatttgattaaataggctgctggtgtccattattattatcatcctctaaagtttttctgtccctctaccttctacacaccccacacagaatggacccacttccctgaatcactgcacctcttgatattattctagggctcacagatctccctttaaaggggccggtcacccctccttccccagtcaaagaccaccaggaatgtacctgtgattgaacacattcaagcttattattcatcagagagagagagagaaagaaagagagagggagagagagctcatacatgtcatagggcactatggcggtctcagtagggaggtgttagaaagaactttttttcgctatttatttatttatttatttatttgagatggagtttcgctcttgttgcccaggctggggtgcagtggcacgatctcagctcatcgcaacctccggcttcaagtgattctcctgcctcaggctcccgagtagctgggattataggcatgtgccaccacacccagctaattttgtatttttagtagagatggggtttttccatgttggtcaggctggtttcgaattgccgacctcgggtgatccgctcgcttcagtctcccgaagtgctgggattataggcgtgagccaccacgcccggccagaaagcacttattatgggatttgcaattctgctcggtgttttgggggcacagcttaaggaagtaggggatttgggtgggatgaatttattggttggaaattttactttcttttttgagatgagcagataaaaacaaataaaaacaacacacaggtgaggcatggtggctcacatttgtaatctcagcctcccaaagtagcgtccagaaaagggctgttgtggcttggtgtggtggctcacgcctgtaatcccagcactttgggaggccaaggtgggtggatcacttgaggtcaggagtttgagaccagcctggcgaacacggtgaaaccctgtctctactgaaaatacaaaaattagccgggcgtggtggctcacgcctgtaatccccgctactcaggaggctgaggcaggcggatctcctttggtcaggagttcgaggccagcctggccaacatggtgaaaccctgtctctactaaaaatataaaaaatagccgggtgtggtggcgggcacctgtattcccagctactcaggagcctgaggcaggagaattgcgtgaacccaggaggcggaggttgcagtgagctgagatcacgccattgcactccagcctgggagacaagagcaaaactctgtctcaaagaaaaaaaaaactagctgggcatggtggcgggcacctgtaatcccagctactcaggaggctgaggcaggagaatcgcttgaacccaggtggtggaggttgcagtgaactgagatcgtgccactgcactccagcttgggccacagagcaaaactctgtctcaaaaaaaaaaaaagaagcaagggcggctgagtgcagtgcctcaggcctgtaatcccatcactttgagaggctgaagcgggaggactgcttgagcccaggtgtttgagaccagcctgggcaacacagtgagaccctatctctataaaaaattaaa

SEQ ID NO: 1560058 - DNA, 4001 bp, Homo sapiens
gacccttttttttttttgagatgaagtcccactctgtcgcccaggctggagtgcagtggcgtgatctcgtctcactgcaacctctgcctcccaggttcaagcaattatcctgcctcagcctcccaagtagctgggattacaggcccccaccaccatgcccggctaattttctgtagttttagtagagacggggtttcaccgtgttagccaggatggtctctatctcctgacctcgtgatccgcccgtctcggcctcccaaagtgctaggattacaggcgtgagccaccacgcccagccaaggacccattcttaaaggtgttacaaggattaaacgagttaataaacagagtccttagaacaaagatgcacggcaggtggttaagtgcgatgttaagtgtgcatcaaataaaacaaatcttcagtaagctagggaaacagtgggacagtcactgacttaatgctagttttatacaaagtgtgagctgggaacaagtataaggacaacttaatgggggtccatgggatctgacaacagggaatcacacagtacaggttctgaacagtatccctattcaaagggaatacgtagtattccttttcaattatctttccatttcagtgtacaatgtaatgggctgttcagtttccattgtattttacctgaacttttccttcctctcatggccagcaatgctagttttccattgaagacagcaatgcgccgggcacggtggctcacacctgtaatcccagcactttgggaggcagaggcgggcagatcacctgaagtcagaagttcgagaccagcctgaccaacatgcagaaaccccgtctctactaaaatacaaaaaaaattagccgggcgtggtggcgcatgcctgtaatcccagctactcggaaggttgaggcaggagaatcccttgaacccaggaagcggaggttgcggtgagacgaaattgcaccattgcactccagcctgggcaacaagagcgaaactccgtctcaaagaaaaaaaaaagaagaagacagcaatgcaaatttgccttctcaaattaacttactggggaaaaaaatgcactagtcattatcaagaaaaagaaaaaaactagtacttcaggactcagcaaaattggtcaaatagtaagtgacaggatgtcgatttccccggctccaattctaagtttttcctattgctgtctctgagctttctcccccagcttccctggaattcccagctacaccaatgactctcagaatcattatcattatagtcccaatccacgagctctcactgtgccagcccctctgcttaaaatctttacacacacagatttcatcagaatcctcaagacgaccctatgatattgggactatctgctctcattgtacagatgagaaaaaacggggttcaaggaagcgaagacacaggccccactgccgcacagtggagcgggacttgaaccaaaattcgacggcttccaaacccaacaatttttcatactaagcgctcaaacatcaatactaataataatagtatagtaacgaagtgagcgttatgcggaggcgctgagctaaggcatccaacgtacacgacctgacttctcactcccatttataaagccggtgatacagtcggattctaacccccattccacaggggaggaaactgaggctcaaagaaacaaatcgtaagtccgaagccgtacaacggagcccgaactgagtccagacacccggacgccacccgtccctaccgcaaccggcccagtcccaccacccccggcccgcgcctcacctggcccaccgggcccgcgcccactcgcgccgcccgccctccctcccggcggcgccaactgtcagacactcctcccccggcccgggctgcccgccccggaagcatcctctcaccgccggaagctgaactgactcgtccgcggccgctctaccccaacaggccgccaccagcgagagtgcggccataaccatcacgtgaccgcccaccgacaccagcgagagtgcagtcgtaaccgtcacgtgaccgcccaccgtcggcccggcgctcccctccgcccgaagctagcaagcggcgcggccaatgagaaaggcgcatgcctggcccccgccggcctgcagtctagccgtagtgcgcctgcgcgcggctaggaggggccgtcaggcggggatacagcctggaaggtgcgtgtggggctgggtctcggagtgggagacgtggagtgcaggtactgtgcgatctgggggcgcggcgcctcggctaccctcctcgtgttgtcttccacgctataatgcatggaatataatatatattatatggaatataatatatggaatataatatatataattatagcgttgtcttccacgctataatttatgtcgtcctcggtctctttatgtcaccattcctctccttctgtctcatcccacttaaatcctcacaactccttctgtcgccatcaccctctttaaatcctcacaactcctcttgttgtcatcaacgcccttaactcgctttcgttccctgtaagccctctttgccaccataggtcgtaatcgctccctttaaattcgtcatcgccatatgttacctgcatcctgcttttgttgccatttctcctttataaaatcctcatttctctttaaaccctcatcatacccccaagtcaccttcgcatggctactgtccccatcgctcttcttaaatcgcgctaatgcaactcttacgtcatcattaccccttgtgtctttgtccctcccttggcatcactgttcctctgaccagtcaccatccactcctcatgcttccagttttccccataaggagccacccagccttacagttatttttcttccctccgtgtcttcgtcatttccccgtgtcacatctcacataacatacggggtactgcagcccattacctggggtgtgtcagaatcccagccccaccactacacctctggataccttgactgccttatggcacctttccaatcccagcttcatctgcaaaatgcacacggggacatccacatcagggctgagtgtgacgattctgtgagtttattcttgtggtaggctcagcttgacatggtgtttttggctaatattgttattaaccatgtcaccctcggccgggtgcggtggctcatgcctgtaatcccagcactttaggaggccaaggtgggcggatcacctgatgtcgggagttcgagaccagcctgatcaacatggagaaaccccgtctctactaaaaatacaaaattagccgggcgtggtggtgcatgcctataatcccagctactcgggaggctgaggcaggagaatggcttgaaccggggaggtggaggttgcagtgagccgagatcgcgccattgcactccagcctgggcaacaagagcgagactccgtctcaaaaaaaaataataataataggccaggcgcggtggctcacgcctgtaatcccagcactttgggaggccgaggcgggcggatcacctcaggtcggaagttcgagaccagcctgaccaacatggagaaaccccatctctattaaaaatacaaaattagccaggcatggtggcacatgcctgtaatcccagctactcgggaggctgagacaggagaatcgttcgaatctgagaggcggaggttgcagtgagcctagatcgtgccattgcactgtagcctgggcaacaagagcgagactccgtctcaaaaaaaaaaaaaaaaaaaaaaactgcatgatcttgggcaactaacttaacctcccagcgcctcagttactgcatctgcaatatgggaatgaaaacacaaattaatcattctgcacataattcttaagcatgtactatatatgtgcccaacactgctagacactggggatacctcaatgaacaatacagacaaaaatatctcggcctggcgcaatggctcacacctgtaatccaagcactttgggaggtgaagtgggtggatcacctg

SEQ ID NO: 1560059 - DNA, 4001 bp, Homo sapiens
tccagcctgggcaacagagcgagaccttgtctcaaataaataaataaataaataaataaataaataaataaataaataataaaaataaaaaaacaccatcttaaaaaaaaaaaaagaggacccttttttttttttgagatgaagtcccactctgtcgcccaggctggagtgcagtggcgtgatctcgtctcactgcaacctctgcctcccaggttcaagcaattatcctgcctcagcctcccaagtagctgggattacaggcccccaccaccatgcccggctaattttctgtagttttagtagagacggggtttcaccgtgttagccaggatggtctctatctcctgacctcgtgatccgcccgtctcggcctcccaaagtgctaggattacaggcgtgagccaccacgcccagccaaggacccattcttaaaggtgttacaaggattaaacgagttaataaacagagtccttagaacaaagatgcacggcaggtggttaagtgcgatgttaagtgtgcatcaaataaaacaaatcttcagtaagctagggaaacagtgggacagtcactgacttaatgctagttttatacaaagtgtgagctgggaacaagtataaggacaacttaatgggggtccatgggatctgacaacagggaatcacacagtacaggttctgaacagtatccctattcaaagggaatacgtagtattccttttcaattatctttccatttcagtgtacaatgtaatgggctgttcagtttccattgtattttacctgaacttttccttcctctcatggccagcaatgctagttttccattgaagacagcaatgcgccgggcacggtggctcacacctgtaatcccagcactttgggaggcagaggcgggcagatcacctgaagtcagaagttcgagaccagcctgaccaacatgcagaaaccccgtctctactaaaatacaaaaaaaattagccgggcgtggtggcgcatgcctgtaatcccagctactcggaaggttgaggcaggagaatcccttgaacccaggaagcggaggttgcggtgagacgaaattgcaccattgcactccagcctgggcaacaagagcgaaactccgtctcaaagaaaaaaaaaagaagaagacagcaatgcaaatttgccttctcaaattaacttactggggaaaaaaatgcactagtcattatcaagaaaaagaaaaaaactagtacttcaggactcagcaaaattggtcaaatagtaagtgacaggatgtcgatttccccggctccaattctaagtttttcctattgctgtctctgagctttctcccccagcttccctggaattcccagctacaccaatgactctcagaatcattatcattatagtcccaatccacgagctctcactgtgccagcccctctgcttaaaatctttacacacacagatttcatcagaatcctcaagacgaccctatgatattgggactatctgctctcattgtacagatgagaaaaaacggggttcaaggaagcgaagacacaggccccactgccgcacagtggagcgggacttgaaccaaaattcgacggcttccaaacccaacaatttttcatactaagcgctcaaacatcaatactaataataatagtatagtaacgaagtgagcgttatgcggaggcgctgagctaaggcatccaacgtacacgacctgacttctcactcccatttataaagccggtgatacagtcggattctaacccccattccacaggggaggaaactgaggctcaaagaaacaaatcgtaagtccgaagccgtacaacggagcccgaactgagtccagacacccggacgccacccgtccctaccgcaaccggcccagtcccaccacccccggcccgcgcctcacctggcccaccgggcccgcgcccactcgcgccgcccgccctccctcccggcggcgccaactgtcagacactcctcccccggcccgggctgcccgccccggaagcatcctctcaccgccggaagctgaactgactcgtccgcggccgctctaccccaacaggccgccaccagcgagagtgcggccataaccatcacgtgaccgcccaccgacaccagcgagagtgcagtcgtaaccgtcacgtgaccgcccaccgtcggcccggcgctcccctccgcccgaagctagcaagcggcgcggccaatgagaaaggcgcatgcctggcccccgccggcctgcagtctagccgtagtgcgcctgcgcgcggctaggaggggccgtcaggcggggatacagcctggaaggtgcgtgtggggctgggtctcggagtgggagacgtggagtgcaggtactgtgcgatctgggggcgcggcgcctcggctaccctcctcgtgttgtcttccacgctataatgcatggaatataatatatattatatggaatataatatatggaatataatatatataattatagcgttgtcttccacgctataatttatgtcgtcctcggtctctttatgtcaccattcctctccttctgtctcatcccacttaaatcctcacaactccttctgtcgccatcaccctctttaaatcctcacaactcctcttgttgtcatcaacgcccttaactcgctttcgttccctgtaagccctctttgccaccataggtcgtaatcgctccctttaaattcgtcatcgccatatgttacctgcatcctgcttttgttgccatttctcctttataaaatcctcatttctctttaaaccctcatcatacccccaagtcaccttcgcatggctactgtccccatcgctcttcttaaatcgcgctaatgcaactcttacgtcatcattaccccttgtgtctttgtccctcccttggcatcactgttcctctgaccagtcaccatccactcctcatgcttccagttttccccataaggagccacccagccttacagttatttttcttccctccgtgtcttcgtcatttccccgtgtcacatctcacataacatacggggtactgcagcccattacctggggtgtgtcagaatcccagccccaccactacacctctggataccttgactgccttatggcacctttccaatcccagcttcatctgcaaaatgcacacggggacatccacatcagggctgagtgtgacgattctgtgagtttattcttgtggtaggctcagcttgacatggtgtttttggctaatattgttattaaccatgtcaccctcggccgggtgcggtggctcatgcctgtaatcccagcactttaggaggccaaggtgggcggatcacctgatgtcgggagttcgagaccagcctgatcaacatggagaaaccccgtctctactaaaaatacaaaattagccgggcgtggtggtgcatgcctataatcccagctactcgggaggctgaggcaggagaatggcttgaaccggggaggtggaggttgcagtgagccgagatcgcgccattgcactccagcctgggcaacaagagcgagactccgtctcaaaaaaaaataataataataggccaggcgcggtggctcacgcctgtaatcccagcactttgggaggccgaggcgggcggatcacctcaggtcggaagttcgagaccagcctgaccaacatggagaaaccccatctctattaaaaatacaaaattagccaggcatggtggcacatgcctgtaatcccagctactcgggaggctgagacaggagaatcgttcgaatctgagaggcggaggttgcagtgagcctagatcgtgccattgcactgtagcctgggcaacaagagcgagactccgtctcaaaaaaaaaaaaaaaaaaaaaaactgcatgatcttgggcaactaacttaacctcccagcgcctcagttactgcatctgcaatatgggaatgaaaacacaaattaatcattctgcacataattcttaagcatgtactatatatgtgcccaa

SEQ ID NO: 1560060 - DNA, 4001 bp, Homo sapiens
ccaacctccccagtgtcacaggtcctcgggggactgtcctcatgggatgggtaggaccccaaatgcactacatgaagatgtccccggtgttcatcccccactgtttgcaggtttctttagcactgcctacatctgcacataacccataaacagagaaagctgccaagacacaaatcccctggaagaacttattgagagaaggaagaagaaacaaagccaacttgtaaataataatgaggagagaccctcgactgagtcaggtttgaacatatcagctgtaaaagacatttcgaagatgactgaggaacaacaggcacaaagcagattgttaaattgcagtattaagggtgacaatgctaataacattaagtagaaaaatgttactgtaggtacacaagtacactattttgagtgaaatatgaacctttctttcaagtaagagtctgctctgttgcccaggctggagtgcagtggcgcgatcttggctaaaggcattctcccacttccttcataagtagctgggactacaggcccgcaccaccacgcttggctcactttactatttttttgtagaaatggggttttgccatgttgctcaggctggtcttgaactcctagggtcaagcgacccacccacctcggcctcccaaagtgctgggataacaggcatgagccaccgcgttcggccatgaaacttactttcaaaacacttaagcacaaggtttttgaatatggcaagatggtgcaaatgttaacttttcccatttgttggtagattttaatattgccaaaggacgacgtgccaacgatgaatgcatgaaaaaatactttcacttgtgacatgaacaaactcaacgattttctaggtggttgcctgaaggaggtaagtcaagtagagatccttgctggggtcgtggtgggggagataggaaatgggctagctgcttccaggctgagcctcctcggcaggggcatgggccccgctcaagtcaggaaaccgatgttcaagaccttaaaggacctaagccaaaaactaacgttaacaaaaccctctcacgtggcatgaacggtcagaacgactcccgcaggtaagcaaaggcctcgtttgcttccttctatatccattcctacacgactctcaaacccggcaattcacctagaaacttcactctcacttctttggtaactcgataccctatctgtgcccccatggaaccccccaaaaccctctcccgtcccccagtctttgttctaggttgcacaaaaatgccagccatccagaattttaaaagcaagagagaattcctaaggaagcacctgtaggtagcacgaaaatggaaacactcggaaagaactcaatgtcgcctcccagcccgcccacccctctcccccaaccaaatcgacaagatggcggaggcccgcggcgtgcgggcagcacaaggggcgagctccgccgcggggcagacggaggggggtccgccccagcatccccgctcgcgccagctataggagtcgcaaactcccaggcggcccaaacagccaccaccatccccgcagaaaactcccaggctcgccccggagggcgctctctgggtccttgcaaacgccctgaccctttccacgcgactacatggccgctcccgtcgcagcctcgaacccttcaggacacgtgcgtctttccacacagccggaaaaagtaataaacttaagaacctcaccccagcatttctctctccgaagcgggcgcgggttgcagcacgcgccattttatagtgcgcgccgctcgcaaggccggtcctcggcgccagcccgcgctccgcccgaggcgtccaatacacacgcctgtttgggaaaccccatttcatgcttagggaaaggaatactgcctgcttccgctagaatcttcctgaacaagcgaggagacgctgtctctggggctgacaaaaaggggcaaggatatgatggaaacgattgtcttgtcccctgcgtccggcaattctgaagacagcatcaaagatgggccgtgaagagaaaggaccccgagggcggcccgacacgagagagaatccgctgggactatttgcgcggcaggggcttgagctgagtgaggctgcagaggcggggcccaagccgaagggccggacccaaattaagtcccagccactgggctggaggcggggccagtgtggagattgacagggggccgtcctgggaaagcgcccacgtggcgcagaattagaggcggagcctacacggtgacgcaagggccggaaggagggaccctgtgtctggagaagcgggagatgggggcctggacccctgggtctgagggaggaggggctggggtcgtgattcccgtgtttgggagaaaagggggttgggagctgggactcctggggccgagggaggcctttggggctcccactcagttttgacggtctaaggcctgggggcctggattcttggtagggttggagatctcaggagtgtctttccactgataggattatacattctttccacttatatgattattttgaaaattaaaaaatgaaacttctctactccaaactcactttctaggagtttcactgtcaacaatttggtgtggactttatgttttcttttttcagatggagtcttgctctgtcgcccaggctggagtccagtggtgtgatctcagctcacttcatcctccgcttcccgagttcaagcaattctcgtgcctcagcctcccgagtagctgggattacaggtgcctatcaccacgcccagctaatttttttgcatgtttagtagagacagggtttcaccatattggccaggctggtctcgaactcctgacctcaagtgatctgcctgcctcaaacctcccaaagcactgggattacaggtgtgagccaccacgcctggcctggtatggactttatatatatatacacacacacacacacacacacacacacacatattatggataaagatacttttttccactctaatctgtcccataagttgtttccccacatgagtacgtacagaattatctcattcactgaacaatggcaacgggctcctttgtgtgaattgaacacgctttgtttagcgggtccctggtcatttgggttgttttcttctttctagtgaggagattcctttcatgaaccttgtggtctggagtaaaagaagagacctacattcctctcttaaggcaatgagagacgtttatgtcactggctgctgcctcactttagcataaaagcaaagtcctcgctgtgacccacacagcccttagtgatctggcccctgtcccctctcagcctgcatctctttcctctcctttggcctccctggtgctcctggaacctgccaaggacgtttctacttcagggactttgcatgtactgtcctctctgcctggaactcttttcccccatctacatggctttctgcctcccttggtcctatctctgctcagatgtcatcctggaatggagtctcctgacctccttgcctccactttatatgactgtgaggctctcttgttccgaatcccatctcacctaccctcctatatttttcgtcataacatttacctctaacctattgtctgctttattttattttattttttgagacagcatctcgctctgtcacccaggctggaatgcagtggcatagtcatggctcactgcagccttgacttctcaggctcaatcaatccacctgcctcagccttcatgtagctaagactacaagaggacaccaccacgcccagataatttctgtattttttgtagagacaaggtttcgccttgttacctaggctggtcttgaactcctgggctcaagccatctacccacctcagcctcacaaagtgctgggattacaggtgtgagccaccatgcccggctctaactacttgtttatggacatattttgctgccttgctgaatgtcaattccataaagataaggattcgtgtctagtttgatcagtg

SEQ ID NO: 1560061 - DNA, 4001 bp, Homo sapiens
gggcagatcacgaagtcaggagttcgagaccagcctggccaatatggtgaaaccctgtctctattgaaaatacaaaattagccaggcgtggtggagaatgcctgtaatctcagctactcgggaggctgaggcaggagaattgcttgaacccaggaggcggaggttgcagtgagccaagtcgtgccactgcactccaacctgggcgacagagcaagacttgtctcaaaaagagtaggaaatgcaaaactcatccagaaggtaggaatgaccagttttgctcatggagacaccaagatgccccaacctccccagtgtcacaggtcctcgggggactgtcctcatgggatgggtaggaccccaaatgcactacatgaagatgtccccggtgttcatcccccactgtttgcaggtttctttagcactgcctacatctgcacataacccataaacagagaaagctgccaagacacaaatcccctggaagaacttattgagagaaggaagaagaaacaaagccaacttgtaaataataatgaggagagaccctcgactgagtcaggtttgaacatatcagctgtaaaagacatttcgaagatgactgaggaacaacaggcacaaagcagattgttaaattgcagtattaagggtgacaatgctaataacattaagtagaaaaatgttactgtaggtacacaagtacactattttgagtgaaatatgaacctttctttcaagtaagagtctgctctgttgcccaggctggagtgcagtggcgcgatcttggctaaaggcattctcccacttccttcataagtagctgggactacaggcccgcaccaccacgcttggctcactttactatttttttgtagaaatggggttttgccatgttgctcaggctggtcttgaactcctagggtcaagcgacccacccacctcggcctcccaaagtgctgggataacaggcatgagccaccgcgttcggccatgaaacttactttcaaaacacttaagcacaaggtttttgaatatggcaagatggtgcaaatgttaacttttcccatttgttggtagattttaatattgccaaaggacgacgtgccaacgatgaatgcatgaaaaaatactttcacttgtgacatgaacaaactcaacgattttctaggtggttgcctgaaggaggtaagtcaagtagagatccttgctggggtcgtggtgggggagataggaaatgggctagctgcttccaggctgagcctcctcggcaggggcatgggccccgctcaagtcaggaaaccgatgttcaagaccttaaaggacctaagccaaaaactaacgttaacaaaaccctctcacgtggcatgaacggtcagaacgactcccgcaggtaagcaaaggcctcgtttgcttccttctatatccattcctacacgactctcaaacccggcaattcacctagaaacttcactctcacttctttggtaactcgataccctatctgtgcccccatggaaccccccaaaaccctctcccgtcccccagtctttgttctaggttgcacaaaaatgccagccatccagaattttaaaagcaagagagaattcctaaggaagcacctgtaggtagcacgaaaatggaaacactcggaaagaactcaatgtcgcctcccagcccgcccacccctctcccccaaccaaatcgacaagatggcggaggcccgcggcgtgcgggcagcacaaggggcgagctccgccgcggggcagacggaggggggtccgccccagcatccccgctcgcgccagctataggagtcgcaaactcccaggcggcccaaacagccaccaccatccccgcagaaaactcccaggctcgccccggagggcgctctctgggtccttgcaaacgccctgaccctttccacgcgactacatggccgctcccgtcgcagcctcgaacccttcaggacacgtgcgtctttccacacagccggaaaaagtaataaacttaagaacctcaccccagcatttctctctccgaagcgggcgcgggttgcagcacgcgccattttatagtgcgcgccgctcgcaaggccggtcctcggcgccagcccgcgctccgcccgaggcgtccaatacacacgcctgtttgggaaaccccatttcatgcttagggaaaggaatactgcctgcttccgctagaatcttcctgaacaagcgaggagacgctgtctctggggctgacaaaaaggggcaaggatatgatggaaacgattgtcttgtcccctgcgtccggcaattctgaagacagcatcaaagatgggccgtgaagagaaaggaccccgagggcggcccgacacgagagagaatccgctgggactatttgcgcggcaggggcttgagctgagtgaggctgcagaggcggggcccaagccgaagggccggacccaaattaagtcccagccactgggctggaggcggggccagtgtggagattgacagggggccgtcctgggaaagcgcccacgtggcgcagaattagaggcggagcctacacggtgacgcaagggccggaaggagggaccctgtgtctggagaagcgggagatgggggcctggacccctgggtctgagggaggaggggctggggtcgtgattcccgtgtttgggagaaaagggggttgggagctgggactcctggggccgagggaggcctttggggctcccactcagttttgacggtctaaggcctgggggcctggattcttggtagggttggagatctcaggagtgtctttccactgataggattatacattctttccacttatatgattattttgaaaattaaaaaatgaaacttctctactccaaactcactttctaggagtttcactgtcaacaatttggtgtggactttatgttttcttttttcagatggagtcttgctctgtcgcccaggctggagtccagtggtgtgatctcagctcacttcatcctccgcttcccgagttcaagcaattctcgtgcctcagcctcccgagtagctgggattacaggtgcctatcaccacgcccagctaatttttttgcatgtttagtagagacagggtttcaccatattggccaggctggtctcgaactcctgacctcaagtgatctgcctgcctcaaacctcccaaagcactgggattacaggtgtgagccaccacgcctggcctggtatggactttatatatatatacacacacacacacacacacacacacacacatattatggataaagatacttttttccactctaatctgtcccataagttgtttccccacatgagtacgtacagaattatctcattcactgaacaatggcaacgggctcctttgtgtgaattgaacacgctttgtttagcgggtccctggtcatttgggttgttttcttctttctagtgaggagattcctttcatgaaccttgtggtctggagtaaaagaagagacctacattcctctcttaaggcaatgagagacgtttatgtcactggctgctgcctcactttagcataaaagcaaagtcctcgctgtgacccacacagcccttagtgatctggcccctgtcccctctcagcctgcatctctttcctctcctttggcctccctggtgctcctggaacctgccaaggacgtttctacttcagggactttgcatgtactgtcctctctgcctggaactcttttcccccatctacatggctttctgcctcccttggtcctatctctgctcagatgtcatcctggaatggagtctcctgacctccttgcctccactttatatgactgtgaggctctcttgttccgaatcccatctcacctaccctcctatatttttcgtcataacatttacctctaacctattgtctgctttattttattttattttttgagacagcatctcgctctgtcacccaggctggaatgcagtggcatagtcatggctcactgcagccttg

SEQ ID NO: 1560062 - DNA, 4001 bp, Homo sapiens
ttgaactcctaagctcaaatgatttgcctgctttacccttccaaatattttagtttttgagaaagctctcactattttacctaaactggtcttgaactcctgatctcaagcaatcctcctacctcagccttccaaagagctgggaatggcaaaaatgttacttatcaaaatgaaaggccaggtgtggtggttcactcctataatcccagcactttggaaatgcgaggcaggtggatcacctgaggtcaggagttcaagaccagcctggccaatatggtgaaaccccatctctattaaaaatacaacaatttgccaggcatgttggcacaggcctgtaatcccagctactgaggaggctgaggcaggagaatcacttgaacctgggaggcagaggttgcagtgagccgagattgcaccactgcactccagcaggcaaaacagagcaagaccctgtctcaaaaaaaaaaaaaaaaaaaacgagagagaataggtcatagaataaaaacatttcagctcaaattttatttagttaattactattattattcttttttgtagcatcggagtcttgctatgtcactctagctggcctcaaactcctggcctcaagcgattctcttgcctcagtttgcaaactgctgggattacagacatcaccatgccaggccacaacccaaacttgaaaaagaaaatctaagtggccttagaagagtttgcaagtcagctgaccaatgtggtacctccttaaggagggcctctgaggcccgatgaaaaaggcttatataaaaggctcatgaccagctctgccagtgatgaacatgtgtcaagtcgttctgctgtccccaactcccggacccaggtggctctgaattagcttcagctaataaagaacaaagacggggggcagaaaggctccccaaacttgtgcaaatccagtgagaaaacactttgcacatcatctgtctcagctgttctgcaggtgaggcacactcagaactgcaccaccccaggcaagcagtttgccaggactcgggggcctcagggtttcatctcggggcctccgcctgcaccagcgagtgggcctggctcagggcgagcctgtccttcttctccttctgcaagacctgctcctcccacagcgcctggtccacctgatcgtcggtgagcacgacaggcttgtacttctcatcgaagagccgctcgttggtctcggaatgcagctgctggggcccgaccacccgcaaatgcgccggcaggtgcaggaattcgtcgtcgttgatgtcgcagtcgcgcatccaggcccccagcacccaccagcgacccacgaagcccacgtccaggacccggccggggaagtcggtccagcggggctgcaggtagcggcaacgcgcctggtagaggctggcctgggcgtcgaagggcgcctcgtacaccagcgagcagagccccaggttgacgtagcgcaggcggccacggccccgcagccagagcagcctctgcacgaaggcttcggactcgcggttgcgggtggccggcgccagcagcaggagggtccccgacgcctccagcagcgcctcctcgaaggcaccctcgctgggcgccagcgtgaagcaggccgccgcgccgcccagcagacccacatacacagcggcgcgccccggccgggccctagcctccgccgaagcgtccctgcaggcctcggcgtagtcccggagcagcgcgcgggcccaggaccctgaggggagaggagcgcggtaagagtgatccggccgcggcggccacccaccctgtcgcggcggccacccaccctgccgccttccgccgctactcacccagccgcgcccacactcccggcttcgccactaccgcgtcgcccgcctctgcgcggcgccgggaccaaaatctcctcagagccgccgcggccatcctcttccgtcttgggggtccttgctccgggaagaaactcctgatacccgacgttaagagcccgggagtctcttctgcgcaagcgccaactttaccggaagtggcttcccaacgggagaggatagaaagaggacaggcgccggatgttgctgtcaggtctgagtcggttggagtctgacgggtaggcgagacgcgcaggcgcagagagccccagccacgccggcccaggtggcctcaggtgagggggggcggagcgcacctgtggggacgggacgacgagttcaagcctccgtgggtgcagttggtcgccaggtagggctgggggccgagggaccggctcgggggcgggggggaagtgtgcctgaccggtctctgtcctcagcgagggatgcggagacgcccctgaacgaccatggcatcggccgacgagctgaccttccatggtgagtgcggccccgacgtggccggatctcccactcccgccccgggccagaacctccccccgatacggcttccaatttctctaccccgaagcctaggcggctgtgaaccctgacccaggagtgagacccatctctgactcgaaccccgcccccgccctgaactcagacctcaaacccgagcctctcgtccccagaccctgaccccatcccagcgtcaaccctaagttgcagttccactttaggaggaagggaacagatgtcctccggatgcctccaaactgaggaagttgggccccaccttgggggagatcaatggctcagcagagcctccgcccccagatgagcatcggtttagcttgggcccagtcgagttctttccacccctcaaacgtgcgtgtgtcccatatacctcctccacagaattcgaggaggccactaatcttctggctgacaccccagatgcagccaccaccagcagaagcgatcagctgaccccacaagggcacgtggctgtggccgtgggctcaggtggcagctatggagccgaggatgaggtggaggaggagagtgacaaggccgcggtgagtccctgtgtcctgcctccttgcagcccccagctgacccaggctctccgggcaggcactgaatgcccgcaatgtgcagctcctgcaggagcagcagcagcagcagcagccgggattctggaccttcagctactatcagagcttctttgacgtggacacctcacaggtcaggctggggaggcaggtgggatggggctcagagttatgctcagggttcagccactcttcccctgggcagggtgctggtgatggtgggtgctggtgaacgaactgtggtgctctcaaagggttatggtgggactggttatggatcgggactatgggaacacaggggacacacacaatctggtgggttagagaaaggcctcctgggggaggtgaggaattggctgagacctaaaggagacagaaggcttccctggggaatagggtagggaagcaggagtatatgttccaggcacagggaacagcatatgcagaagaccaaagatggactgggcgcagtggctcctgcctgtaatcccagcacttaagggggccgaggtgggcagataacctgaggagttcaagaccagcctggctaacatggggaaaccccgtctctaccaaaaatacaaaaactgccgggtgcggggtggctcatgcctgtaatcccagcactttgagaggcctgggtgggtggatcacctgaggtcaggagtttgagaccagcctggccaaacatggtgaaaccccgtctctactaaaaatacaacaaaattagccgggctttgtggtgggcgcctgtaatcccagctactctggaggctgaggcaggagaatcgcttgaatccgccaggcggaggttgcagtgagccaagatcgtgccagtgcactccagcctgggcaaaaagaatgagactctgtctcaaaaataaaataagataaataaaataaaattaaataaaaaataaaataaaatagaaaaattagccaagtgcagtggtcggcgcctgtaatcctagcactttgggatgccgaggcggtggatcacttgaggtcaggagtt

SEQ ID NO: 1560063 - DNA, 4001 bp, Homo sapiens
gctcatgggcaccctctggcttctgtgagaggaccaggtgggatccaggagacaagggagaaggtggctgcactggtcccggtgggaaatgatgtgggtgggaccaggtaggggccaagaagatgggaggcgggtggattctggattgattctaagggcaaaataggggcgagcacagtggctcatgcctgtaatcccagcactttgggaggccgaggcgggtagatcatgaggtcaggagttcgagaccagcctggccaacatagtgaaaccccatctctactaaaattacaaaaaaaaaaaaaaaaaaaaaaaaaaattagcccggtgtggtggtgcaggcctgtaatcccagttactcgggaggctgagggaggaaaatcgcttgaacccaggaggcagaggttgcacctaagccaagatcactcaactgcactccagcctgggcgacagagcgagactccatctcaaaaaaacaaaacaaaacaaatgggatgagaccgggatgtgagagaaaggagggattcaaggatgacctatggcatctggaaggaagtgatcacagggggaggagggcagaatgggaagggaggatcaggaatttggttttggacatgctgagtgcaaggtgaccatgagattccccactccacggaggtaagcgggccagtgggtacccagttctgagaaaaccgacactctggggtgacgaaacaatttgctcaagatcacagggctgtttactgtggagtacaattcaaacccaggtttgactcccaccaaaaccagttttaaatctccttccaacttctttacaagctcaaccttacccatctacatataaatgttgcacttaaaaacaaccatagggtggctcacgcctgtaatcccagcattttgggaggcagaggcgggaggatgccttgaggccaggagttcaagaccagcccgagcagcatagtgaaacctgtctctaccaaaaatacaaaaaaaataaaattagccgcgtattggcgagcacctgcaattctacctactcgagaggctgagacggaaagattgcctaagtccaggaggctgaggctgcagtgagctataatggggccactgcactccagcctgggcaacagtgagaccctgactcaaaaaaaaatgacgataaccaacgcaccctcacacttctttgagccctctgctgttctaggtttacaaagctgggctttcaattcccttcccatgtcacctcgctgtcttcctgagttcaattaaagaaaacagtaacagcaagaggctgacgttattggaaccctttttgggccgcaggtcttgcttctacgaggcccttttgaagtggtaagtggtgttcctgcaccccttgcacaaggaagaaaagggaggcccacagagctgggagtcctccaggcctcatcccttgccctttgccgatccctgtgctccttccctcgccggcctccagatttcatctctcgtccctagcacgtcccccagcccctatccctcgccagcttccacctcttacccctctctgcgccccgggctccatccttcgctcctaacgcggcccctggctctatcccctcgctcctagctcgtccccaggatccaccctctcccctcactgatccccgggctccacccatcccccctcgccgtcctccgggttccacccctcgctactcgccgccctccgggctccatctctcgcccccgcacaccttcttgagcttttgctgctgcacgacgcgcgccttcttgggagcgataacacgacctggggaaagatgtgctcacgtgaggccgggaagccgggggtccacctcgcccccaagtccccgggccgctccttaccgccttttcttgggccccgattcttttcagaggctgccgctgccgtcttactctttgcgggtttgtgcgcctgaaacttgcgctgcccctgcgccatggtccggcacgcagcggaagaggcgggactgtgagcagtcgtagccggaaggcacagggaaccatgggatacagcggggcggaaaaacgcaagaactcacgggatacaacgtggcacagagttaaagagacagcatcccacaagggtagtgtagtggatcacagttggagttttcaaacattacgaacaaaacggtgacaatgataagctaacgtttattgagagcttatgtgttttagaaaacttacaacgttttatgatctttacacataaaaactcagactaggttagggtgtggcactcacctctggtacagaatttaagaaggttcaaaaactttggtaatagtaaacaatattttcaagacttaaaaaatattttaatatccaaaataatcaaattgttaaactacatcctgcagaccggcagcataattttgtaaataaagttttagtggaaccagggtgttgaggtcagtaagctcaaggcacaagtgcggggttctagcctcttcaaaattttatttaggccgggcacggtggctcacgcttgtaatcccagcactttcggaggccgcggggcgcggatcacccgaggtcaggagttggagaccagccacgactaacatggtgtctccaataaaaatacaaaaattagccaggcatagtgccaggctcctgtaatcccagctactcgggaggctgaggcaggagagtcgcttgaacccagaaggcggaggttgcagtgagctgagatggcaccactgtactccagcctgggcgacagagcgagaccccgtctcaaacaaatacttgttttgttcatcatggatttttttttttttttaaagagatggggtctcactctgttgcttagggtgaagtgcagtagtgcaatcaaagcacactgcatccttgaactcctgggctcaagccatcctcccacttcagcctgagtagctggggctagaggtgtgagttccatgcccagctcattgtttttaaatttttgtttgtagagacaagctcttcctatgttacccaaactggtctcaaacacctgggctcaagggatcctcccaaagtgctggaattacaggcatgagccaccaagcctggcctcatcatggatttttgcattaattttgatttttaaaaaatactgctgtaaggtcaggcacagtggctcatgcctgtagtcccagcactttgggaggctgaggcagggggatcatttgagtcaggagttcgagaccagcctggccaacatggtgaaatcatgtctctactaaaaatagaaaaattagctgggcatggtggcgcatgcctgtaatcccagctactcaggaggctgtggcaggagaatcgcttgaaccggggaggcacaggtttcagtgagctgagatctcgcctctacattccagcctgggtaacgagtgatacttgatctcaaaaaaaaaaaacccaaaacaaaatattgctttaaaatattttttatcttggttgctgagcttttttggtgtcctcttaaaattctgccctggagatgtcaccctagctccagccctgaccttaagagggaggtactagtattatccacatttattttttatttttttaattaaataattaattaattatatttatttttgagacggagtctcgctctgttgcccaggctggagtgcagtggcgctatctcggctcactgcaagctctgcctcccagtttcacgccattctcctgcctcagcctcccaagtagctgggactgcaggtgcccaccaccacacccggctaattttttgtatttttagtagagatggggtttcaccatgttagccaggatggtctcaatctcctgatcttgtgatccacctgcctcggcctcccaaagtgctgggattacaggtgtgagccactgcgcccggcctgttatccacattttataaatgaggaaaccaaggcacagagaggtgaagtgacttgcccaagatcatacagtgggaaaagtggcggagtcaggatttgaatctg

SEQ ID NO: 1560064 - DNA, 4001 bp, Homo sapiens
cttcctctttctgcactatagctaaggggcattatagctaaggggcttcacttctatgagcctcagttttctcaccaggaaaatgagacaataaaagtttctacctcatggggttgttgagaggattcagtaaattaatatttaaacacaacagcgcctgacatagggtaaggcattcagtaaaaggtggctgtaatttgcattaaatttgcctcatctcagtgggggcatttagggaaggttataaatgtgtccggaggccaggcccagtggctcacgcctgtaatcccaccactttgggaggctgaggcaggtggatcacctgaggttgggagttcgagaccagcctggccaacatgacaaaccctgtctctactaaaattacaaaaattagctgggcgtggtggtgggcgccagttcactccagcctggatgaaagagggaaactccattaaaaaaaaaaagtgtctggaaagcttggagtttcaatgtgagtcctggcaagtcgcttctccctcttttcttcagccaggcaatcactaaacctcagcctcagggccccagcctaggtctggcactctcctttcccctcccacctgggtccctggatgtcccagtttcctcaaggctcctaagtaccacttccacaggcagcctccttttctgcacagagcctctccagggctcccccgtgccctcaggaaagtctcagtccctttgcacgacccgctctgtcctgcgtgggctggctctgccgctttcacagccccatgtttgccacttcccccggcaagttaaggacatatttgcagttccttgaatagaacatgtcctcatttcactccaggcccctgcgcaagctgtatactctcatcacacagcatttgcacgacttgctcaacagcactcagggttccccttctccaagaagctccccctgactccccagcctgggtcagacacccctctgggctttgtcatgacagccctgaccactctgggttgtcactgtctggaaaggtggagggatctgtctctctcactagactgggcatttgctcttttttttttttttttttttttttgagacagagtcttgctctgtcttccaggctggagtgcagtggcgcaattttggctcactgcaacctctgcctccagggttcaagcgattctcccgcctcagcctcccgagtagctgggactacagttgcatgccaccacacctggctaatttttgtatttttaatagagatgcggtttcaccatattggtcaggcaggtctccaactcctgacctcaggtgatccacccgcctcggcctcccaaagtgctgggattacatgcatgagccaaagcacccggactggactgggcacttgtgaggacagctttcttcattgctggaggcacaccaccatggaagagatctaggtgggggacctaagtagtcagcctgtttgatcttgaggacacgggaaccccccccccaccccaagagatctgtgaagtgtctagggcagagcctgggtggtgggtggggcatggagaccctaccggtccttgtgtagtttcagaagcctcttcacatcttctctgcccttggggaccgggccggccttatcaaaggcctccttcaggagctggctcttctccaggccgaagacatgacggggagcaggccctgtggcagcgggtggaggaggcagtgggagcggtgggggaacaggggtctgctgactccagggaggggatggtaaagctgaaaagtccaggggacttgggggtagaggaggagatggaatgctgctggcttggggtacaggggtttttggaggagaaattggtggttttaggggaggagagcatggagaagtcattttggggtctacaggaggtgttgagaggttcagaaagcggggagggaaggatcctccaacggagaacggtctcagggatggagattttaaaggtttaagagctgagttccagaatctggggactgagcagtgggtgtgaaaggaccagggctaatatttgaaaccacgggagcaggaattgcgaggctgactcaagtcataaggcacctgacggttaacagggtggggtccttaaatccggaaccggatctgtggtaccggttgggttacctcgggagtcttaggtggagagttagtaggagttaactcattctttggggctggatgtggaaactcatgagtgagtttgggatatgaaggctcagatctagagtgaggtgccttaaggatgcgacttagggacccagggctaaagattcggagaacttaggttcagtaccccctcacatcccaggcccgagttcggaacctttgagctgacctttgagtcagaggtcaagaggtcaaaaaggacacctggcagggaaaatggcctagttgtggagaaggtcctggaaccagagcaacaaaaaacgtctgtgggttggagaagactcagagatcagaggccggtgggcgccgcgataaccactggaaaaaggaaaggagtcaggaagtaaagtgcacctcccactcccggaaaatggcggcccccgcacactgcctttcccatatcacgtggtattacacgcaacagttcccgcccattttgcgatcacgtgacagaaaacgcagctctggcgggggtaagaggcgggactccaaaaaggattgcctccggaagacaccgcagcgcgagacgcgtacagactcgtgaccttcactgattggtccgtagacccgggcgccacggaaggaggtgggctttcagggagtggggcggggtttttctacctaggcgggaacccaaatatcgttttgattggcaacagctgagcccagaaacgagacttgctctgattggtcaagctactgcgtttccgcgcggcgattggctggcagaaaggcagaggcggggccaggagagaaagctttgtggtttggtctcagggaagtagcaggcgccggttgagagaactacggccctgtcggaaggtaacctccggtgcaaacgaccatcggcggcaggcgagcggtacgcttggcgtccgggccttcctgggcccgtctgaggaaacttgctgctcgaggccaggctgcctaggacctgtcccttttttctatactggctcccacatccgggttttttctccgggacggcccttcggatgcttgggccaatgggaatcgccatttagggtgctccgcccaccgggtcgcgtagagcatcctggaagtcgtagtaaatctctcgagagttctctccgcacgcgggctggagaagcgggtcctacgcacgctttgttgtcgcgctttgcctccgtccttgcccctactcccgccttacctgacttccttttcggaggaagatccttgagcagccgacgttgggacaaaggatttggagaaacccagggctaaagtcacgtttttcctcctttaagacttacctcaacacttcactccatggcagttcccgagacccgccctaaccacactatttatatcaacaacctcaatgagaagatcaagaaggatggtgagttctcgggatagtccggagtccagactgtcccgcacgggctggcccctcttccgtcccctgcacccgcctctctttctaagtgtttgtccagccaaacttcgagttaactccttggcctttacacaaactacttcctgtcttcaacactccattagttcatcttacactctgccctttaacgtggtcactgctgctcatcttacaaggtttgaggtcacaggacccttcctccaggaagccttgccttgtcccttcacgtggctgccgctgacttgccgtacgctgagaccatctcccatcaagccctgattcctctgagctgtcgtggggctctctctcctcccagtggcctttgaactccgtgagggcaaggactggggctttcttggtcaccggctttttcagtgatcagcccacaatgaacatgtaccataatg

SEQ ID NO: 1560065 - DNA, 4001 bp, Homo sapiens
atttttctttctttctttttttttttgagacagggcctcaatctatcagtcaggatggagtgcagtggtacgatctggattcactgcaacctccacctcccagttcaagcaatcttcctgcctcaacctcctgagtagctgggactacaggtgcctgccaccacgcccagctaatttccttactttacattgtagagacaggatctcgctatgttgcccaggctggtcttgaactcctggactcaagcgatccgcccacctcggcctcccaaagtgctaggattacaggcgtgagccaccacaccggccttctatttttcttaccagcatgaattaaatcctttttgtctttttcttttttttgagacagagtcttgctctgttgcccaggctagagtgcagtggcaccatcttggctcactgcaacatcggactcccaggttcaaacgattctcctgcctcagtctcccgagtaggtgggactacaggcatgtgccacaacacctggctaatttttgtatttttagtagagacggggtttcaccatgttggtcaggctggtcttgaactcctgaccttgtgatctgcccgcctcggcctcccaaagtgctgagattacaggtgtgagccaccgcacccggccaatccttgcttccttttaaggaggttaaggcagtcgtgttagccagatctgcaataaacaagcccacattcttcccacaagcagaagcagaaatcaacaagtgtccatttgaatgaacgtacctgaggtccgcagcttcttcctcttagtcattttatcttccccttgagaaatctgaaaacaagcaaaatctctcatcattataagcagtctctgtctctgtttatatccagtggctttggctgagagcagaggttacccctacctccacctcagcccatttggctgccccaggggtcagatggctcccactgggacacaggatgggacacagagtcacagccactttgggccatggccaggtaggaattcaaacctcctccaaactgaagatcttatgcccaggacctgaaagacaaatgggccctggggggtccttatagatagccccggggacccagactctggtccctaggatgaaacagcctgtgtgaagcccctccctccagactggggtatctgggggcccttccaaggacacttgaggactctccaggggcctctggagaccagcctggccaatatggtgaaaccccctctctattaaaaacacaaaaattagcctgggcatcgtgacgcacacctgtaatcccagctacttgggaggctgagacagtagaattccttgaacccatgaggcagaggttgcagtgagccgagatcgctctactgcactccagcctgggcgacagagcgagactccgtctcaaaaaaaaaaaaaaaaattagtcaggtgcggtggcacacacccgtaatcccagctactcaggaggctgtggtacaaggccaggaggcagaggttgcaatgagccaagatcgtgccactttaaaggggacagctgggtccttggaggggaaagagctgccataggccggtttctcccagccttgggggcgaggcaaaccagaacggacctgggccacagaagtcgttgaggaccctctgtccttatcagaaacgagctctgcctggatcagttgggaataagtcgcttgaattatccgcgttactctttttggaaaaaataaatggccaaattggccctcacagaacgctggaggcctcgagtccggaggtgaaagatggaaaggcctgagggtgggcgctgtagaccccgctcccggtgacaagccccacactgacactacgccgaccaccgagaagtgaggactccacaggccgagagcccacgtgaagccggagcccgtcggtgactgacagacgctctgaaccccacagatgtcgccgcccctcacacctgcgcgcgctctgcctctttcccgcgccccgcgaggtcccgccccgcgcatgagcgacgcaaacaccgccctcgcagcccgcgacagtcagcaccgccccagccaggcgcctgcgcgcccacgcactacctgccgggagttgtagtttcggctcggcagacccggcgagcccagtggccgcgctccggtgcggcggcgcccgaggcccgaggcggaagtgggacggccaagcagggaagcgagggctcgggatcgacggccgcggggcgccgacgaggagtgcaggactcaggaagggcgagtgcgcggcgacagagcccggggaaggaggcagggcaaggccgggcttgggggcaggtggtccgggcatccagccttgaagatgcacaagaggaaaggacccccgggacccccgggcagaggcgccgcggccgcccgccaggtgagtttgcgccccacggcccgacctggggatccctccccacccccgtcactcgctcagggaagggccccaccccccagggaagcccgatctccgccccacaggtaagccccggtccccgcctccccccaggtgaggctccaacaccacccaagtgtggcctactggccttggctccccagctcctggggccctgccccgggttcggggccacctgttgccacagctgctccagtcgaggaggggcagtcctcggacttgacacatcaaacccttgcatcagtcgggccatgtcagactctttttattccattgtacagatgaggactttgagactcagagacgtgaagacatctgcccaaggtcatagggattaacagcttggccagggctaagcacaaatccagggctgcagccataagcttatggcactgtggctggaccccttctcactctcccgacttctttgccccaggcaccagatagtttgatttttctcagttttgatggaaggagcccaggacatagcttggtgttcagatattagagtctggctgacctgaagttccctcctggcctctgtacatcggacacttgactttacagctctgagcctcagctttctcatctgtaaaatggagatctctataatcccagcacttcaggagatggaggcggaggcagaggtgggagagtcatttgaggccagagtttgagaccagcctgggcaaaagcaagacccccgtctcgacaaaaaaagactaactgggcatggtggcatgtgcctgtagtactactacttgggaggctaagaagggaggattgcttgagcccaggagttcaagaccgcagtgagctatgattgcgctacttctgctccagcctgggtgacagaacaagactctttctctaaaataaagataaaaaattaaaaatggaagtccggggtggtgtctcacacctgtaatcccagcactttgggaggccatggcgaaaccccatctctactaaaaatacaaaaattagctgggcatggtggcgggcacctgtaatcccagctactcgggaggctgaggtgggagaatcgcttgaaccgagaggcggaggttgcagtgagctgagatcgcgccactgcattccagactgggtgacagagcaaggctccttctcaaaataaataaataaattccttctgaaaataaataaataaataaaaaattaaaaatggagacctccaagagaccctacattacaggacagttgtagagagtcattgagatagtttatggaaagtgctagaacatagcactcaataaatgttactattatcattattactagttggtggaaccatacataattgccaatatttggccattttttacctacaggaaaggcaatttcatatggttaaacacgatgttatcacatcatgattggtcattagccaagataggaagacgggtctgcatggcaaacctgcattgtggttaggggttctttttttgtttgtttgtttttgagacagagtcttgctctctcgccccaggctggagtgcagtggcgcaatctcggcccactgcaacctccgcttcc

SEQ ID NO: 1560066 - DNA, 4001 bp, Homo sapiens
ctctcagaaaggagacagcaggcaggccagaggcagtgctgagcgcgatgtgggcgtggcctgggaacaacagtgacgtcttagccaggcattggccgtaggggtgggttaggttgcgcctcatggtcccagggacggggacccaggataaaagtaggccaaaaagcctggacgcggtggctcacgcctgaaatcccagcacttcgggaagcagaagagggcggatcgcttgagaccaggagttcgagaccagccttgcccatatggcacaaccccgtctctactaaaaaaaatacaaaatacaaaaattatgcctgtaatcccagctactcaggaggctgaggcaggagaatcgcttgaatctgggaggcggaggttgccgttagccgagatcgcgccattgcactctagcctgggtgagagagcaagagagcaagagcctgtcttaaaaaaaaaaaaaaaaaaaaaaaacaccagaaagaaaaaggccaaagagacgctgagacgggtcgctcatggggggcgtggcctaggaattccagtcacacacggttgcagggccgagcaggcggatcgcaagagagaaataggcaaagaactaaagctgtgatggaggaataatacggaggaggcgtggcctgggacccccctcgcctgtatctacgggaggttgagggtgggaccctagacgcggaacaaccagagtgggtggagcattgttggggcgggatctgggcatcttggaatagcatttaggcggagctgggagaaagcgggagtgctctgggaataaggacaaaacttgggaaaaaaattggggatgaacagcagagggcaaggtccgagaatccccaagtgaagccttaatagaggattggggtgggacaggaaggggtgaggtctgtgtatgggatactgggaccaccccccaaccaggggtgcgtcatgagaggagccggccagggtcctagagacacggcggggaaggggtggtggcctcaccgtgcccagccgcgtctgctccagctcctgcaggctgcgcacgtggccggcgagcagcggctgcctgcgaggcccgcccagctctgcttccaccgccagcacctcccgcgaggcggcggcgaaggcctgggtcaccccgtgcactgtgctccggtagcgcgcgaagtcgtagtcagggccgctgcgcaggtactggcggtggcctctgcggcatgtggggaccctgaggccgcgcccccaggctctcaggccctgcaccggcgccaaccacctgaaaggcccccaggaagtgtccccagacaccagaggggaggactggtaggtaggaaggacgcttcctgactcccgcaggggaacgcgagacaggcccacccctgctcttggggaggagagagaagccacgaagagtgagtcgtcgggtagtggggacgtgctgtggggcctttttcgtgaaggtgaggacccggtgccccgaaatccccgccccatctgactctgcagccacacaaggacccagctcctcctccaggcacgcccgccgagaacacgcccacgcccggagcgggcgggggaccgaaccctgagcccctccgcgcccccactcactcctccagtcggcggaagccctgcgcgcgctcagcctgcagctggtggatgcgctgcaccagcgtccggatcggggcgtctttctgcgggacagggggcacggctggggcatgaagcccgcgcccctgggtctgcgccgcccgccccgcgcccgttcccgcttgggcctgggctcacccagggccacgccggctcctcgcgtccccgagcttcggtggcctcctcagcagcaggcactgcagggaccgtaggctccgccgcggtctcggtgatcatgactgcgcagccctggccaggctccggagcaggcccttccgctgcgcccgacgccccctacaggccgggaggtccacggaccccctaccctgcggccggccagccagaaggaagaaaggggaaccaagaccgcgggccgcccagtcaagcccacccttcttgttcccgtccagggcccgcctccgatcgtgtttttccttgattgtgcggctctgaatacagaacagctgttagccttgagttcgttcctatgcttgtatctcaacaccgacttccacttgaagcgggtactgagcgtgggttttgacgttcaagagtgttaagtaagcctgggcaacctagggaggcccgatctctacagaaaaaccaattagcccgacatggtggctcccgcctccagtcccagctactcgggaggctgaggtgggaggattacatgagcccgggagttgggggctgccatgagctatgaccatgccactgcactccagccggagccacagtgagtctgcctcaaaaaaagtgcagtggctggaactccaccaacattaacagagattcactggctcttcagagaatcacaggggtgaagacaagattcagtgacagggacggtgtcaacagcccaccgagttgaattgggtgtcttgtgtaatagccctgagcctggagcatagcaggggccagaacgacctcaaagtacagaggaggccttggagcttcctgctggagggatacatgggctagacagagctttggaaagcttcctcctccaggggcccagccggaggagcaggaagatgctggtagcctgacttagtgaagagggaccagctcaggtatggggtgacagacaccagcctttaagggggaagggactaggctgttagtgagttgggagtttttcttgccgatgggttcgtggtctcgctaactttgaagaatgaagctgtggaccttcgcggtgtgtgttacagatcaaaaagagtccacggaccaggagagtgagcagcagggcagtttattgaacaaagcgaaaggaaagcttccacatgctggaaggggacccggaagggttgccgttgctggctccggtggctagggctcatatccctatgttacccctcccctttctttttgtccattgagagtggttcttttttcaatcctcctctggagtgttttttttttttgtttttttttttttttttttttagtgagacagagtctcgctctgtcgcccaggctgcagtgcaatggcacgatctcggctcacttcaagctctgcctcccgggttcacgccattctcctgcctcagcctccccagtagctgggaccacaggcgcccgccaccacacccggccaattttttgtatttttagtagaggcagggtttcaccgggttagccaggatggtctcaatctcctgacctcgtgatccgcccgcctcggcctcccaaagtgctgggattacaggcgtgagccaccgcgcccggcctggagtggttaattctgaatccttcactcgattggttaagaactcaaaacactgagtcacaggggtcttctgtgaaagtccccaaacctgcccagtaaatcctgccaactccacccctcagtcccctctctcaacaggagagcccaactgctgttggggtgtgggaggatgaccactctaattgcttcctgctgaataggggcatagaaggggttctgtagctgaggtttcctcgtgagaggtggtttgggtgtcaacgtccgggtatgggccggcaggctggtttaggggtccttgataataggtgctggttgaagtcatctgaggttccatctgcagtaacatttctagtttcattgattctattcaggaagaaacgaaaggatgaaggaactgaaaagacatgggccaaaggttactcctagaataatcataaggaagggacctaaaaatggaagaagccagtggagaacaggctgtgagaaccctgaggtagtttcggttgtcccaccatgtagtctgctagctctatcctgaagtcatttaattccatctctcactatgcctgatttattgacataaaaacaacattccttgttcagaaaaaggcatgttcct

SEQ ID NO: 1560067 - DNA, 4001 bp, Homo sapiens
gcgccaccatgcccagctaattttgtattttttagtagagacgggtttctccatgttggtcaggctggtctcaaactcccgacctcaggtgatccgcccgcctcggcctcccaaaatgttgggattgcaggcgtgagccaccgcgcctggcctattatactctttaacagccctacactaagcctttcaggcaggctaaatccacagcgttcccatcaccaaagctgtcaaagaagcaaagtagccatgatgcacctgtgcttcaaagccattcattcattcattcattcattcattcattcattcattcaacacaagggttccattcccctgcctctctctcctccccaatcctctgctcatcctagcctttctagagactgccactaacaacccttccccacctcccagcctttgcttatgccattccctcccccaccccaagacccctgcctttctttccctttcccctcccagggctcactcctccccatcctttaagacttggtacctcctcctccagtaagccttctctgacctctgcgcccccgctatgatggcaataatcctggctcctttcattgcttagtttcatggctctctcccccattgaatacaatcagcacataatgagcgcctactgtttgcaggctccctggccggacaaatgatggagaggtgaaaaagtgagattgggtgatgagttatggaccgacaatgcctggtccctcctgtttcagaggggggtcagtcaccatgaacgggtcgggtcccccctcttgctctccctcccgtgacccggtcctttgcgaggggaggggataggttacctgggcatccagatcgttacttagttcttggccatctttttgctttacccctgcgggggagagtgcatataagggaagggcccttgaagggtctgtgggagttccaggccacccagagccgcgacgcagagcctccccaaggctgggacctccgggggaggtgatctcaacgcctctccctagaccacgccccctcggcgctcccacgcgcggtccccgcaccaggcccgggacccctgcagcctcaccgtacacgatggagcgccccactcccgtgtggtcgctgccgaatttcctcatcagagcccccgccttcttggaggataccttcccatgaaacttctcccggaggcgccggacgctcttctccagctgggatggagacaggggggttccggtgggggaaggggaaacgggatcatccctcccccatctctaggcaccgttctcccggcccgaacttgacccttggttttggcctccgccgccccccccccgcctttcatccctttacggcatttcctggaaaaagccaaagtccccacagggcgttgggggaaggcgcggactggggcgagcgtcccagcctaaggtgtgggggggcggccaggttatctctggcctctgacctttgaccctgcagcccccgcttttcctcggggaggcctcatttcgctctggggaaacgtgggagtcactttccttttcaaggggggcgagcgccaggcaggggtaaggatctggggttctaggatgggggtccccaggaactgcgaagccccctccgcgcctcccggccgctcctcggggtctgtcgcggctgaccccggcccagccgtagccatcgcttacctccacaccttcctgagacatggtggcggcggcgcagttccccgcgagggtccgcactgcgcggctcagccgcccccctacctgggtgcgcccgtcggtccagcagccgcgcagggcagggggcggtgcctcggggccggctccgcccttcctccccggcccctgtttcgctttcgattcaggggggacccggcgcgctggctccgccctggctccgcctctgctcttgcgccccaaacccaggcgggcgccccgggtctgcaccctgcggcggagcgcgcagacctcggacgggggaggcggcgcggcctctgcagtcggtcacatgtccccacgctgcgcggggtccgcgtcttcacgtccctcgtgggggcggggccgcatcagaaggccgcggcgaggccccgcgcccccccacccagcgcgcgctcccccagttcatcaccctcctctctgttctccctccttccccgggaatctggcgctcatgaggacctgggcccttttcctgccctgagtctctgtcctagctacggtcacctctctcaacctcagtttacccctctgtgaaatggggagaatcctggtgtctacaccatggagtggagtatgtgccaagattcccgagtggatcgcgtaatagcgcctggcttgcagtaggcgttcaactagtcactgggccacctgctgtgtgcccttgataggggcaggcagtgtgtgtgtggttggggggagcggtgcttgagaaaaatacagattcttggtctctagtagcccggtagaatccggctgtctcagggatccagggaatctgcaatggttaagaaccccgtgggacggacaattctaacccagtacagggcacatcagggagcccttaggtggtggggctctggcccagcctggggacacagagatggcaacttcattggaggaggggatgctttgtagagtcactgaaattggaggtcttagctaggggaggaatagagtggggagatgaggcagccgtgcagagcccccaaagcaagactaagtctggggtttttgggcaatggcttctcaagcccagcactcttgacactttgggcggcctagttctttgtgtgggggactgtcctgtgtattgggggacatttaacaccatccctggcctccacccactagatgccagtggttccctactctccctgttgtgactaccaaaaacgtctccagagactgccggatactctctgaggagcaaaatagcattgtgttcaacgactccaaatttttttctccattgcacacccctataggtaaaagtgttaaagttacacccccagatggatatttattcatttatttattttttgagacaagatcttgctctgttgcccaggctggagtgcagtggtttgatggtggctcactgcagcctctaactcctgggctcaaacgatcctcctgcctcagcctgctaagtagctgggactactggcatatgccactatgcctggttaattttctattttttttgtagagacggggtctcactatgttgcccaggctggtctcaaactcctggcctcaaagatggatattatttataaattatatacaaatacaattatatcaatatattctgttaactgttatataaaatattgatagataaatggagctgggcatgatggttcacacctgtaatgctagcactttgggaggtcaaggtgggagaatcactggaggtcaggagttcaaaaccagcctgggcaacatagcaagaccttgtctttaaaaaaagaaaaaagaaaaggaaaaagttatttttaaaagactaaaaaacaaacaataaaaccccccaaatctagatattctaaagtttttccagttgaaccccaaagctttgtttatagggtgtatgtactccactctggagactactgtatttgcaaactacaagcagttcatgattccttgtggctgaatggtggaatcctaggcaggatgggggctggaaactgcacagaagacctgggattttatcctgagggaagtggcgaggtttggagtggatcgcctgtcatagttgccagttactaatctatttgcccagtgcagagggaggtcatagctatgtcccattcactggccgagatgggcactgagtgggcaggaaacaggtaagagtctgagctagccctgacataaatcagatctggtaggttttttgttttttgatttttttttttagcgcagaatatgcagaccaaaggtctgttaggttataatcaccgtggcaaccacatagagcgtgtactctgttcccaatgc

SEQ ID NO: 1560068 - DNA, 4001 bp, Homo sapiens
caggtacaggaagtagggctcacacatctgtaagaaggtgggcatggccttggccagctgctccttctgtacttggtctctgctgaaggaagaagggggcctttgcctggaatccctcacaacccctccccaccccgcagttttccccattctactcaatcccaacctgtatccctggctttgacccattagaaaagcccccagtttcaggtcttttctgaacatctttctggtttacctgcatcaaacccatttggaacacttgttaaagtgctgacacctgagtctcacaacacttaggacccagagcttcctgcagggtctgggcgcagtggctcacgcctgcaatcctagagttttgggaggctgaggctggaggattgcttgaggccaggagttccagacaagcctaggcaacatagcaagaacccatctctacacaaaaataattagctgggcatggtggcacctgtagtcccagttacccaggaggtggaggtgggaagattgcttgagaccaggagttcgagggtgcagtgagctatgactgccccactgcactccagcttgggtgacagagcgagaccctgtctcattaaaaaaaaaaaaacagcctcatgagaatccctcgaacctgggaggcggaggttgcagtgagctgagttcgccccactgcactccagcctaggtgacagagcaagactccatttcaaaaaaacacataacaacaaaacaaaacaaaaaaacccagcctcgggtaggcgcggtggctcacgtctgtaattccagcactttgggaggccaaggcgggtggatcatgaggtcaggagctcaagaccagtctggccaagatggtgaaactctgtctctactaagaaaagaaaaaaattagccgggcaacacatgttggtgggcgcctgtaatcccagctactcgggaggctgaggcagagaattgcttcaatccgggaggcggaggttgcagtgagctgagattgcaccactgcactccagcctgggcgacagagtgagactccatctcaaaaacaaacacgcaaacaaaacccaacccagcctcctaggaaattccaatggacactgaaattgagagtcacagggaaacctggtctgggaatcacattatcctttggagtctcaaactgatgtcctgcaggccaagtttggctcaggtgggtcttgtttagccagcacagggctcaaaatgtaagacagcacttaaaaactgggagaaaaagtcctagagacttgacaaccccaggcccacactgccacgacagtaatagcagccatcccctacccgcaattctacagtcttcctcattctcttaaactggattctaatatgctagcttcttccactgtctccctctggctcctagcgcttgtaattttgcgaccctggtgtgtgtcacccatcctgtcgcctcccctccaagtctccttacccatggggacctgggaccctgtccagcatcacctgtagagcaagtagctctggaaatcatctgccttcttcagtaggtagcgcagctgttgggtgatggggctgaacaaagtgtccagggataggcggggaggtgctggcccaggccgggggaccagaggtttgggggaagacgtggaggcccgggcctcagccagccgcccctcggcatcttcaggatccggctcagatgggttcccaggcctgccagggggcgtcgacctggaggggtctccgcagggcggcgtcccaggttccaaggcgtctggaggcggtgtttctccagggtccagggggagcgacccctcgaaccactgctctgtagccatggtagggccggggggcgggaacctgagctctttaagcttccgctgctgctcaggttggccgcgggttcgaccccgccccgggagcctccgactggcccctgccttgacctctccaccggagccgcgccgccgcgccgggggccgttcgcctcttttgaatttcaacacgcgggaggggcgcgcctctccagtccgcgcgcctgcggccccctacccctgcacacgcgccgcacgcgctccaggaacctggcggtggggagggacccgcctagggaggtggcctctggccgtgtcctgggggtgtggctagggccgggacctttatctctcgaggtggattcctagagtggaggggtctctaaacgtgtctccaacccctcaacccggcacaggtatatggaatgaggccgcccaggccccagcccctcactcccagaacgctttttgttgttaaaacatttttttaatttaaaatttttagagatgggggcccatgttgcccaggttggtctcaaactcctggactcaagcgatcctcccgtgtcggtctcctaaagtgcccagcctctttttttctttaaaaacaaaaaacaactctaatgagttgagaaactgccttagaacttagtagggactacttagaacttagtagggactttggatgtagtaactctggcgactactactaacaataatttttaaaaatcttcaggctggacttggtggctcatgtctgtaatcctgacactttaggaggctgaagcgggaggactgcttgaggccaggagttcaagaccagcctaagccacatagcaagaccctgtctatacaaaaaccaaaatattagttgggtgttgtctgaggcatgagaatcacttgtacccaaaagttcgaggctgtcaccacagttatgattgcaccagtacactctagcctgagtgacagagcaagactctgtcttgaaacaaaatcttcacttggaaatcttctatctcatggtctcatctgatggcccagaaggaattttctgttgttttaatgaagaggaccatgaggtctggagacactactatggtccaagaacagatccctgccccaatatttgtagtggattctttgcagtagacaaaggctgacaggtttatagtttttaatgtacattatgtcaaatacgctaattatatttaaagactctgagtgaagaactcagacaggtgtcagatgccaccctgtgtgacccggggcagacagcatctctgtgccgggccagctgcctcttctgtaaggtgggattttatgagttttttgtcttatggggacttgggaggacagttgaggaaatgcttataaacccaaggacttaactgctagccattcaacaatatttgaggccaggcatggtggctcacgcttgtaatcccaggcagaattgcttggctgggagttcgaggccaacctggccaacaaagtgcataccctcatctccacacacacacaaagatttttttttgagacagagtctcactttgtcacccaggctggagtgcagtggcacgatcttggctcactgcaccctccgcctcccaggtgtaagcaatcctctgcctcagcctcctgaatagctaggattacaggcacccaccaccacgcccagctaatttttttttatatttttagtagagacagggtttcatcatcttggccaggctgatcttgaactcctgacctcatgatccacccacctcggcctcccaaagtgctgggattacaggcatgagccactgtgcccggacaaaaatttttaaaagttagcccggcatggcagagtgcacctgtagtcccagctactcaggaggctgaggtgggaggatcacttcagcccaggagtttgaggctacaatgagctatgatagcaccactgcactccagcctgggtgaaagaatgaaacctgtctaaacgaaaaacaaaaattgagcacctgctgtgtgcctagctctgttctggacacggacacggtgagattacagaagaaaaaaaagcaaatattcccaccttcctggagcaattattgttatacatggctgtgaggcagctataattcattgtttctgtttttctccctccccaaacaattctgtcctaacctgaggctctcttaggaggctctt

SEQ ID NO: 1560069 - DNA, 4001 bp, Homo sapiens
atccaaaaattggccaggcgtggtggcgcgtgcctgtaatcccagctactcaggaggttgaggcaggagaaacaacgcttgaactcgggaggtggaggttgcagtgagccgagattgtgccattgcactccagcctgagtgacagagcaagactctgtctcaaaaaaacaacacaaagcaaaacaaaacaaaaacaaaaacaaaaaaccacacaaaaattagccgggcatgatggcaggtgcctgtagtcctagctactcgggaggctgaggcgggagaatcacttgaacctaggaggtggaggctgcagatggcaccactgcactcaagcctgggcgacagagcgagactccatctcgaaaaaaaaaaaaaagtctgtaagtcgggcccacaccatctcttgctccgtgagtatctttgtctctctagctcctcttcttctctcagtacatgtccctccttgactcccgcctctctgcaaggtgtatttggctgcctcagttggcctctccccctctgcatctctgggtggggtgttctctgcccgtctcccacccacacccacccccggtgctccccttccccccagcaggacagcggctcaggttcacgcaccccacggcgggccggctgggcgcacgcacgtccttgcacacaagccgcacgtagctgtacttgagcacgtcgatgagcgtgtagagcgggggcgcactggcccagcggcagcgcgccaggtgcatggagctcttgacgaagaagagcgccagccgctgctggcaccacgcgtcgaagaagcggctgaactcggcccacgagaagaaggcccgctcccgcagctcctgctcctcctgccccgcagccgtgccgggtgggggctccggccgctccatcctgggggcctgcgtggaggaggggagaacaggtggatatcagacccattcccacccggggtatctcatctactccattcttggcctgccccgtcggttgctggtgcctctatcgaggtgggtagcccggggtcggacgtgcctgtttttctccaaatatataaatatcaacctccatcctatctttggcctcctcccaccgccttatccctggttcacttggagcctgtcatcttgattcctaattccaactcgtctcctcctccgcagatgtgacccttaggtacagttggaatctctcctcccaaaatacgacccttaagctcagatgtcccttaaggacatctcctcaaatgtgttctcaaattccagctaaaacctcctccccttccagctgtgtctctcacccaagagtaacttctaactctcgtattcatctggaactcctccttccatgtgccaacagttggctgtaacccctccaaagacgctccatctccagatgtgctcccacatccaggccacggacccctcacccggtcacatgcttcatgcacctgtggctccgcactccccagatgtgcctctggcgtgcagctgttgccccttcccccgattatgaccctatggctcgccacatgcagctgtagctggggcttccctgagacactctcatctccagatgtactccccacatgcagttatccacgcttcgcctacaggtgtgtgccccacttgtggctagttctcctcggaagtgtcaccagtattcacctgtggtcccctcctcctcagatgcggcccccagtccagctgtgggcccctcctcccagttacatccaccatcccccgcaatatgcatcttcgttctagacatggcccctcgtcctcggatgggctccttcaccccagatgctccccccacgtccagctgcgcgtctcccctcgagcagccccatccagcccgctcccgaccctcctactccccccctccccgcccgctgcggcaccttccagccccgccgtcccacctagctgtgcctctcccctccccaagatgtgcacccttcccgcccctccccactcacctacccgccccggagcggcgtccacctcccacaatgccccgcgcccaggcctggcccggcccttgctcccgggatgccccgcgcggtctcccgcctctcttcccgccgtgcctcgcgggggcgcttccaccgattcctcctctttccctgccagtcactcctcagaccctcagccacacccgctcatccagggcgagggaaagcgcgggcattttcccagtgtgctctgcgggagggctcgccccacttcaccccttttcccgccctcctcccattcgggagactacgactcccagtgtcctccgcgcgacggcggcggtgcggacggtgcccaggtcccgcccctaggctctgccccgcccccgcccgcagacgtctgcgcgcgaatgccgtggcgcgaacttgggactgcagaggcgcgcctggcggatctgagtgtgttgcccgggcagcggcgcgcgggaccaacgcaaggcaagtggggccgtccgcaagcagatgggaggcggagggcggcgggtgcgccgaatgcttggggcctatgcttcgccatgtcggggtgtctgcagaggagtgggcgtggggacgctgaggctgccgagagcgcggtggagacggaagagcgcgggctgcgggccgccggagagtgcagagaggtgtctcccagagggaggggggccaggtagagggtagacgagagacagagacagttggacaggtcctctgagaagaggccttgaggtgcgagttcacctggaaaggggagaggccaaatggaactgaggggcggggccgggggggggaaaactgtgtgggcggggccagctggaaatcggaaggccccccgagggggcggggctatctgggagggggaggggctgaagggagctaaggggcggggccggggaaaagattgcgtgtgggcggggccacctggaagggggaggtgccaagggtggggctggctgggaaccggaagtgctgagggggcgggggccacctggaagtgctgagggggcggggctagaagaaggtaaatcgcgggcagcagcatcacctggaaggagtgggccctactggagggagatgggtggtgtcagggagaggtcagtggtaaggtccaggtctaggtaaagggctcgtaaaagatggagaatcatctgaatggggagacgtctggcctaatgtatgcttgataaagggatggagcttacctcttgtttttactttttattttgaaataattatagattcaaggaagttgtgaaaagagtatatccatcttcccctaatggtgacatcttatgtagtcccaatatcgaaaccaggaaattgacatcaatacagttctgttaactagattacagaccttgttcagttttcaccagtttgtgtggtgtgagtgtgattgtgcatctgtgtgcccgtgcagcttgattccttgtatagatttgtgtaacccccatcgtaattgtgatatagaacagttccctctccacataagaactcctccccaggcccctggcaaccgctaatgtgttcaccatctctagttttgtcattcggagattgttatgtaaatggaatcatatattattaggatgttaccttttttctactctgcacaatgccctggaggtccacccaagttgttgcttgtatcagtgcttcgtttctttttattactgagtactgtttcatccttacttgatatttttcctgtcattatctcttcattttggtaaccgctttattgagatataattcacaattatacagtttgcccatttaaagtgtacaattttgcccatttaaaatgtacaagtcagcggttttcagtgtatttaaagtgtatttcagtgtatttaaagtgcccatttaaagtgtacaagtcagtggttttcagtgtatgcgctgagttgtgcagttattaccataatcgattttaggatatttttatcatccccccaaaaaactcctataccttttatccatcattcatttaattttaaccctgaacaat

SEQ ID NO: 1560070 - DNA, 4001 bp, Homo sapiens
ggctaatttttgtattttatttttttgagatggagtctcgccctgtcgcccaggctggagtgcagtggtgcaacctcggctcactgcaacctctgcctcctgggttcaagcaattctcctgcttcagcctctcaagcagcagctgggattacaggtgtgcaccaccacgcacggttaatttttgtatttttagtagagatggggtttcaccatgttgcccaggctggtctcgaactcctgacttcagatgatccgcccacctcagcctcccaaagtgctgggattacaggcgtgagccactgtgctcggcctcctttcccttttagatccctaagagacacgtgtcgggcaggaaggaggatggacagaaaggaatggccaggaagtggggagaggggctagactggggtgtctccctccaagcaaagaaactgggtgccttacctgcattccaggagtcacggatgggaaagtaaatctttggaggggctgggagctgggaaaaagagatgggcagaaagaactggtgaaaaggctcagcagcccatccccagaggcggagggaggaggacaggccggagaatcaggtcagcatcaatatggaggacaacatcgtgcagggctggagggacctcccagagctgaccacccgccaaaccctggcctcgttcccggcccgtagtacctggggtatctgcaggcctgtctgctgacacacgtactggctgaactggtacatggcgggggggaccacctccccagccttctgtagggctgcctggctcttgtcgctgggccccagcagctcctggtcgtacaccaggtagacggcgcccccagccacacttcccttgatgaggaacctgcgggcagggacgggaggagcagaagctcagcggacactgacagccaccctcaggggccaaggcccacggggagagtgagaccctcctgagggctcaccgtccacagggtgacactctgtagtgcagcaccgtcgacccagacccctattatatacagcactcgttttacaacgtgcaaggcagggcggctggacgccacttgaactgatgaactgaaacccagagggggagagtgggtcactcaaagtcccacagtgagcaggggcagtgaagacgtaagatcttgaccttctagaagccttccagccctggagaaaccaagtgtccctgggcgcctcctgcccgctgtcactcgcagctccgagcacgcattcacttctcatccacgccagcggcaggattcaccggcattcccacctcacagagaagacaactgaggctcggaggcggaggctgacaccgcgaactgaacgccaagggctcgctgggaagcaggagggaggggattggcgacctcgggaagccccgcccctctgaagcctcagtttccctatctggcccataggcggggaacgaaggggaagtgactctaagggaagcgaagagcagatcgggaccagactggagacagggatgcccacaaaaatggactttttcggggactcgggtcccctccggcgcccccacgcacctcatcagcgaccacacccgggccaccatggtcgctcggatccacgcgcaaggacactcggctcgcccgccgcttcctgtcgcggcgccgcagaggcctctggaaggtgtagtctttcttgcccgacgcaaggtcctctgggagtcgtggtgtcttgcggctctgagactccagagaagggctgcggtctcgcagcggagggccgctgggaaatggacgctttaaggcccgggccgccgcaaggctgtctgggaaatgtagtcagcacggcgctgtttgcacctggccgcggagcctcctgggaaatgtagttcggcccggccctggcaccgtgaggggaaagaggcgtcaggtgcctggctgaagcctgaaggtgacccgaaaacaagtcagagcccgagagatccacccgcgcccgcgcgggggaccaagggcccggatttaagaagagtgtgcctacaaggcggttgtcacggcaacgagagggcgggattgttcgagcgctgcggccccctcacgtgatcgattcggaggcggggcgtccgcccagtgggcggggccgggcccctgctgggaggcgaagaccaggcgggcactgttgcccggcgacgctccggcgctgggtccccgaggcccggcccctccccgggaggaggtgggcttcgagtcacgtgacccgtgccctacgggagggggtgcggtcggggacccggcaggaggcggccgagaagagaggaccgtgggggcgttcgcgtggctcccagcccgggaccccacccccgctggacagtgggggaaactgaggcctgagcgggtgagtgcacggtttaggggtgcgcagagggtcacacgcccgctttgttcagaggggaagctaaggcccgccgaggtcaagaaggggccgatgcgttctgcagggcttccccccatttctcccgcatttcggccgggctgcttcaaccgttcatctgcccatccatccatctgtcccccacccgtctatccatctggccatccacccatctatccttccatctatccatccacacttccgttcatccatctgtccgcccatccattcatccatctgctccccccatccttccactcatccatctgtccacccatccatctatttatctggccacccactcatctatccgtccatccatccatccatccatccatccatccatgcatccgtccgtccatccatccatccatccatccatccatttatgtgttcccatttatccattcatacatccatccactcatccatctatccacccatacatctctccgtccatcatccatccatccacccatccatctattcatctggccatccacccatccatccttctatctatgcatccatacatgcatctgtccatctatccattcatccatccacccatccgtccacccgtcagtccatctggtcccacttccccctgccgggctgctgcagtcagtgtagagctgggggtggaaagagggatgagcagaggagcttcatgggctgtccctggaaggggaaaaggtggaagctcgtttcttgctgtgggcatgcctggtgtgtctgggaaaggtgaggagttcattattttgagaactgaacgattcatagatggggccgtgggagagaaggatagacaggtagtcaggggctatacctgcagggcctcatggggtgcagtgaggagcctggtttccatcagttgcagtggggacccctgagagggtttggagcaggaagggccatggccatgttgcttttgacacagacgcctttggctgcattgacagaagaggcagggagagaatgagtatggacatggggaagccagtgtggaggtgggggagaccaaatcggagatggaagggaggccaaaggaaagatgggggtggtcaggcccggggtagggtctaggagggaggtgacaatctgggagtcctggagagagagaggaagggacagctggggagagactggagagggagaactgataagatctgaaaaccatgagctcgtgggggtgaaaggatagaaggaggtgaggacaatacctgggtctcccatttagggacaggggatagtggggctatttctgtgatggtgagctgggaagagaagcaggtatggggtgacatgctgagcctggattgggtcctgctggttctaaggggcctggaggttgtcaggaggagacacccagaagacagcagaggcaaagaacctagggctggacctacagatgggagatttagggactcctcaatgatccgctccatctggtctgtctcagcttcctggttctggaagtccccttccccttgtcccattgacttttttttttttttttttttttttttagacagagtctcactctgttgcccaggctggaatgcagtggggcgatctcagctcactgcaatct

SEQ ID NO: 1560071 - DNA, 4001 bp, Homo sapiens
ttgctctgtcacccaggctggagtgcagtggcctgatctcggctcactgcaacctctgcctcccaggttcaagcgattctcctgcctcagcctcccgagtagctgggattgcaggcgcccgccaccacaaccagctaatttttgtacttttagtacagatggggtttcactaccttggccaggttggtcttgatctcctgacctcgtgatccacccgcctcggcctcccaaaatgtggggattacaggcgtgagccactgcgcctggattttttttttttttttttgagatggagtttcgctctgggctgaagtccagtggcacgatctcggctcactgcaacctctgcctccgaggttcaagtgattctcctgcctcagcctcccaagtagctgggattacaggcatgagccaccattcccggctaattttgtatttttagtagagacggggtttcaccatgttggtcaggctggtctcgaactcctgacttcaggtgatccgcctgcctcggcctccgaaagtgctggaattacaggcgtgagccactgcgcctggctgcctggctgatttttaaattttttatagagatggggtctcacagctaggcgcggtgcctcacgcctgtaatcccagcactttgggaggccaaggagggcagatcatgaggtcaggagatcgagaccatcctggccaacatggtgaaaccccgtctctactaaaaatacaaaaattagctgggcatggtagcgcatgcctgtaatcccagctacttgggaggctgaggcaggagaatcgctcgaaccagggagttggaggttgcagtgagccaagattgcaccattgcgttccagtcttgcgacaagagtgagactccgtccaaaaaaaaaaacaaaaattagctgggcatgtggcacaaacctgtagtcctagctactcagaaggcttgagatggaagaatcctagaacctgggaggcagaagttgcagtgagccaagattgcgccactgcaccctagcctgggcaacagtatgagactgtctcaaaaaaaaaaaaaaaaaaaaaaaagaaaagagatgggtctcactatgttgctcaggctggtcttgaactcctgggctcaagtgatcctcctgtcttagccttccaaagtgctgggattacaggtgtgggccaccatgcccagccaccatcttggtttaatttctttccttggaaatggagcaaagggctttcactcttctttttcatggctgcatagtattccataattgtttaaacaattgataatagacactgtatcggggtgactggtatacccccaaaatcacatctgcccagagcctcaggacatggccttgtttggaaatggttttagcagatgcagctaagatgaggtcaccccgtgttaggatggccccgaatccagtgcctggcacccttataaggagagggaaacttggacgcagacaggaaggccgggtgaagacagaagcagagaccgggggccaaggagtgcctggggttgcccagagccaccacgggctgcaagaggtgtgggacagactctctcagccacagaagggcccagccccgcacaggcctggatttcagagggcgaacatttctgtggccgaagctcccagtgcgtttgcagtccttggagacggccgcagacacatttgttcttggcctgtctccaggtctgtagcccccacagtgagcggccactggccggaggggaacaggaagagctggaggggacgtcacacacatgagccttttaggaataacgagtgacacgtgcaagaccccaaaccaaacaccatgtaacctgacacccagggagggagggagggaggggctgggaggggctcacctgtagggaggggctcacctgtacagcggtgctgggaagctggcctcgagggtccccgaggggatacagggccgtgcagcctcttgcctgagggtttgcatgtctgcctggatcccccgggctcctgccagaaggcctctgaggccaccgttgacagcataaaggccacccagtgtctcggcaaccacgctgaccactccctcctcccagctgcggggtgaggtggcctcgagggaagggctggagagtcgttctgagtatttaacaactgggggtgacacagtgtgggtgggcaaggccagggccactgccaggtggggtccgtggccctgagcccccagctctatgcaccccccacctggggtctggcttctccatctccacacccccttgaggggcttctgtctccccctgccccttcgatcgcaggaggcagtgcctggccggggtcgcaggcacctgtcaccccagctcctcactcctcacccactcacatccagtccgtttgtaaaatacacccaggatgagacctgcacgcagtggctcacagcagcacgatttgtgacagcccgaggcggagaacaccgaacacccagtgaaggtgaggggatcagcacggcgccgccaccgtgctggaacgagactcagccacaaggaggtgcgaagctctgacccaggccacagtgcggatgcaccttgaggatgtcacgctcagtgagagacaccagacacagaagggtacgctgtgatcccacttctatgaaatgtccaggacagaccaatccacagaatcagggagaggattcgtgggtgccgggactggggagggggacctgggggtgactaggtgacataatggggacagggctgccttctgggtgatgagaatgttctggaatcagatgggatggctgcacggcgtggtgaaggtactgaacgccacctcactgtaagacggtagattttgtattttaccacaataaacaaaacaaaacaaaaccaaaccaaacccaacaaacatccagaaacctcctgccctgccctgcccctcctctggctgggcccggccttgggtgggggcggagcctgcaccctggtctccgcttcccctgcccttgtcaggtccccacagatacgaccctgcctttcccatctggacacgcacccaggagctccactccctcggcgtaggtgcccaagtcctccctgaggcccacaaggccctgcacgccctgccctcctctcctcactctgttcctcccgcataccaggtgccgtcctgccccagggcctttgcatggctgtgccctttgcctctcacccaggcgtccctgccttctccagccctggctgaaatgccaggcttgtggtgagcctctgatccaaggccgcccttccccaaggccccctccccacccttgtgacgccacctcctcacttcctcataagcttctctgtctctgggctgtgtcccccatgccagctccacatgggccaggtctgctcggtttcatcatctccaatgcccaggatggggcctgccccagctccttcaccctcttctcaggcaccgcgcaagagcgagcctcaaaaccacctggggcctcctggctgccaggacccccacagcctcccctgcagcccccggccccccggcctcctggctccctcagccacttcccagccattcctcctgttctctccgcccagaccccggggaggcaccagcaccccctgggccaggctcctgcctcctgcacctctcatcgcagaacctatggcagcctgagtttttcaattctctttccctctcactgcaccagctacattccaggatcaacagaaaagttgcagcccgccctgcggggcccttggtcagcctccccctccatctgggcgtctcccaaccactgccagggtcgccccaggaagcgatggccccactggccttcgtctgcctgtcgggtggagctgacagcagaggcacctgccccagcgctgctgagtggcccccgtgccccgcaaagcctgacgtacactcccctggggcccctccacctcctctcagctgtcctgggccatggggaaccaattcccccatttctacacgagccctggccca

SEQ ID NO: 1560072 - DNA, 4001 bp, Homo sapiens
gagggtgaggcaggagaatcgcttgaacctgggaggcagaggttgcagtgagctgagatagcaccactgcactccagcgtgggtgacagagtgagactccctctcaaaaaaaaaaaaaaaaaacaaaactcactgtggttagagttgagggaagcataactggagagatggctggggtcagccatacaggacctgagtgccagcctgagaagctgggactttgtcccatgggtgctggggagctatgggaggggtgagccagggataaactcagcttgcaggtgcagaaggaccactctgggactctatgggagatgaactgaggggagagattagaagccaggccagggaggaggctggggtaagagtccagagaaaagaggacaaggcctgagctggcccagggctgtggggacaaaaaagagggagtcaaggcgggcggacattagtgggctgtgggcagggaggccacaaagatgggtctggacgtttggccagggactgagggaacacggggctgtccctgacatgggaatcctgggaggttttggaggaggacactgaaccaggagttaatgactcccacgaggaggacatgaggcattgacatctcagggctggcaccaggctcactagcagtgggtcccatctcccagtgggggctggacgagggcagcgggccccaggctcagctgtctgtgttgggccctgcagagcgttgagggtgagcagcatgagaaggcggtggagctgctgaaggcggcccagggctcggtgaagctggttgtccgttacacaccgcgagtgctggaggagatggaggcccggttcgagaagatgcgctctgcccgccggcgccaacagcatcagagctactcgtgagcccctgggtcaccacacccctggggcctccacgggctccctttaaccccaggctcccaaaccaggccagtgcttcctggatcttccagccctggcccctcctctgggatcctgacccttgacccttggcccaggctctcaccccaggctagtttggccaaatcccctggggagcccttagcttccttccatcccaagatacggaacctactgtggctgggatccctcagcccacttacctgggcccttgcctctgcaaccccagtcctgcccctcttgtctacccggagcctccctgatcccgggtcccttgtccaccccccttgcaggtccttggagtctcgaggttgaaaccacagatctggacgttcacgtgcactctcttcctgtacagtatttattgttcctggcactttatttaaagatatttgaccctcactgagtgtctgtgtgtctgtcctgcatccctgggttggtgtcttgagatgtggagggaatgcgaggagctgaggtcaggccaagccgttgagaagccttttccagagtctgagaacagaggttaagacctctccctaggtctgaaggcggagacaggccggcttccaagagactagtccgagggcggagggcggaggcagggacccagtctgggtctgagtgctggggcagaactgaggacaacgctgcctacccttaagagcgtctgagggcgaaggccaagtcccttcctccagagtcctgaaacgcagccggagccagtgggcggcctctgtgtgggcggggcggagcgaaccattagcctcgtccgccgggggaaccctgcaggccgcactactgtctgcgtgggagtcgcgggtgggggtgccgcgtgcagttcccgaggcgggcgcaggggtgcagaatgaggtgccctcgcccaccgggcgctcactccaccttccaaacacagcgcgtctttccggaagcagcccccgccttgaaatccaacctttagcctcatcccgctgcccgcccagccctcgtgtcccgtgcggcgcgagggctagtgcgcgccactgccgggagccggggtcgcgactcgcgttccacgccgcgcgctactcgctccaggtgacatcatccccctgccgggctccgcctcccgccccagccgcctcacgccgcgtgcctattggtcgacgcgccttatgccccgcctctcgctctccgcccgcgcgacccctcccggccggtgtggaggcggggtctagtcgccggccggcgccgacgctctctcccattggccgctcttcgccgtctgtcagtctcctgttaaaggggccacgaccgcccgggagccgtggggggggagggggagggaggaggaatttttttggggggaaggtgggatttggggggcgctggtgggcacccctggatctggcggctgcggcctcgcggggggaggctgatcggtgacaggggcagggggctattttgggggtagaaggcagtgagagcgtgagggggaggggggtccccagcgcccaagccggagccagagacgcggagcccgcgcgagcgtcggagacagggctccagggctccgaagcgacagagccgggccccggccgctgccaggggccccgcccggcccccccactccaccccacgtccctcctgcagcccagctccgcccgcagccgccgcggaccaggcaggtaagagcccggcccggccctcctggcagcgcccaccctggggaccccttggcgagcctcccccgcctccccgagatcccggattcccttcctcatcccaggggacccccgagcccagatttcacaccccaaccccggggactcaggcgtgcccctcccggcgcccagagtccccgaccgaaccctagaatcccgggcgcaccgccgcctcgcgcctcctccagggcccaggagcttggatttcccggtccggccccgggacccctcctagagcctagatcccccttcctgaccctgtcctgggagctccagacacccgccgcggcggtgccagactccccagacgcgtccgcatcgtccccgcttcgcgcactccgtctcccgtcgccagcctcgggcttgcacagccggctgcgtcccacggtccaggcaggctcggcggccgccctggacacaggcccgctctggagctgtccatggtcagcgcgctcggcagcctcgcctccccccacctcctgccgccgccaccagggagggggcgcaggcggcgcggggatccccccgccgcgcctttgacccgggaatacccgggccctccccgaccagggcgccccagcctctgggttctgccggccaggctcgtggccccgtcctcggcaccccaggttcctgggactccagctgctccctgaggatccagggcttctgaattttcctattctggtcgccgtggggaccatggcacccggggatgcagctcccaccccgttcgggaagcctgtccgtgtctacacctctgctggccccaggtggtagccctcaccccgtcagcacctaggaatcctgttccccagcgtttgctctgcttagaaccccgctgtgccctgcagacacacagacttagcctcctggcacccagcatctgctccccgagggactcaggcgccatgactcctttcctttgggggacccggaatgtgattctcaatgcagttctctgacttctgttcacactcccacttggggacctaaatgtcttggtcccagtctcctatcccctcagggacccaggagttcagaccccagcttccgtactgcccaccagcttttactgaggctgtctgcctcaaccctctctccaaacaagacctcaggctctcaccttccaatcccccatcatttacctccacaaggattcaggagtccaggctcccagctctgtccactgccctccccagcaggtatctagtttctcaggtctcacttttaggaaccaggtcttcacagcctcatcactctgccccatcaacttcacatctcctgtggccctaccaaacccctgtctcatcctcatgtcaccccaggtggcgggcttcaggactctctactctttcccctaagatgcagcttgttgagatg

SEQ ID NO: 1560073 - DNA, 4001 bp, Homo sapiens
ctttccagctgccctgtgcgccccccatccaactgccctgcctgccaaacccctgccaggctcacctctcctggatctgtcgcagccgatgctgctgtgccaccatctcccgcctctgccgctgcacgtggcctgtgagggcccataggatgtggctctgcttgtcagcgtgagcctgtgggggtcagaatggaaacctcagccgacagccacctcacctcccatcccctgaccctctgccccagcccctcattgtatctgtgtgacccagcaagtcaacaatgctctttggcctcagtttccccatctgtaaaatggggataaaataggactcacttcatggggaggtgatgaacatcctatggatttttttttttttttgagtctctctctgtcacccaggctgagtgcaatgacacgatctcagctcactgcaacctccacctcccaggttcaagcgattctcctacctaagcctcctgagtagctgggactacaggcatgtgccaccacgcccagctaattttttgtatttttagtagagacggggtttcaccatgttggccagggtggtctcgaactcctgaccttaagtgttccacccaccttagctacccaaagtgctgggattacaggcatgagccaccatgcccggccatcatatggattattaaagggcatagaacagtgctgggtacttactgggtgctcacaaaatgttaccagtttctctagtagtaagaatttattggccaggtgtagtggctcacacctgtaatcccagcactttgggaaaccgaggcaggcagatcccttgaggtcaggagttcgagaccagcctggccaacatggtgaaatcccatctctactaaaaaatacaaaaattagctggtgcacctgtaattccagctactcaggaggctgaggcaggagaatcacttgaacctaggaggtggaggttgcagtgagccaagatcacaccactgcactccagcctgggcaacagtgagactctgtctcaaaaaaaaaaaaaaaaagaatttattgagcaccaactgtgtgcccgccccatgctgaatattttacctgcattgagtacctggccctactgtgagatatcaggtgttgcccttatttgcaactgaggcacacaaaagggaaactgaggcacacaaaaggacttgagttttgtctggggacatgcagggtagaggccacagagctgggaggctgatctgggaggtctttgggactcaaggtgcagaagcgagttctggccggaaatcagggtctcagcccactagggttgggggagctccttacctttaagacctcaaattctcggtaggcagggcccagccaggcgctcctcagctggacttctagccgctgcacgctgtcccgtagcaccttctgtgcctgggccacctcccccagcacctcagctgtggcctctgcctgcagctgcagaatatcctcctccatctgcttaataaacagtgggtcactagtaggatgtccaactcatctttgtgtacctaaggacttgcctgagtttatcgctgaaaatcttgtatcccaggaatcccttcagtcctgggcaaaccaggatggttggttaccctagacacgaactcctctttggactcctggccaccccacagtgtcgcagctacggtgcccacctgagtctccaacaggcttgcccgaagttcctgggctgcatcccggccccggctgacctcctgccccaggagttctattgtgcggccatagagacccaggctgttcctggcctttgtcagccgtccctccgtggtcctgtacacaccgttgagggcctggcccagctgcagggtcccatggaagagcagggtcagctcctcatgctgtgccagttctgggccgcccatgggggccgctgaggcaggccgggtcaccattgccagggcccagagcaggcacagagcaggcactggcatgactgagggtctaaggtatagccacagcactgtcactgaagccttttatgcctcatacccccactgatccccagtcaatcgttaactggccgacctggtgccccgcattgcacaagggcctggcagtggtgcgatagttgcatcaggcgaatgtccggctaggccacgccgggatcacgcttcctggggctcagggccaggtgtgggtggggggcattgggagaggacgggccccagaccctgctgggagttcctgagactcaccatgctgagcctgtttctccatctatgaataggcatcgcaatgatgatggtaataacagtaaagattttataagcattgatggtttgccctgagctgtttgacctgccattacaatatctgctcttgttcccctcccacatacttgccacgtgggggcttttattggcctggttagtatccaagggggcaggtgcaggtggcagagactctcccaaggtcacacagcctgatctccaagacctgcatatgcccagatcaccactgactgccattttactccgtgggtgattgtgcaagtacctcagtttccctgcttgtaaaatggcggtgatgttagtcctgcctcatgagctacttgtgagaagtaaatgagttatttcatgttgagtgcttagaacagagcctggcacacagtaggcgcgattatttcattgttgtagtaatagtgtttggtgcaattattgtcattgttgttatttatcatcatcagtatcattacaaaggctcagctggaaggcctgaagtgcccattatacacatagggaaactgaggcccagagaggggtcaaggcttgcacagagttgcccctgggggaaggaggcaggactcggactctggcctcagtttccccacctgagaaacaggccacataactctagtgacctcctgggggaagggcagtcaggcccttgggtggggcttaggcttgaccactggccacctgaggtaccttggaactctggccctgagtgcctcgctattctctgccttctgtgtgtcactgtgccccatgagtgcctccaatgtccttctgtattcccaccctctaccacactgttcccaatctgtgtttttagggtgctcgcttgtcccccaccctctgccctctgtcctatctcctgactgatacctgtattacctctcaccgggccctcaatgccccagcctcatgacctactcttcctggactgtctgtgctcccagccagccttgtcccatcaccccagccttgtatgtgcaccttcagggcccctgtccctctgacacccccatcctgccccccacaggaacctgctgtacgtgtacccgcacagcctcaacttcagcagccgccagggctccgtgcgcaaccttgctgtgcgagtgcagtacatgacaggcgaggaccccagccaggctctgccggtcagtggctgtgccccagggaaggggggtagggcatcccccatgggtccctcatgaatccactctcccaggtcatctttggcaagtccagctgcagtgaatttacccgcgaggccttcacaccggtggtctaccataacaagtatgtagggggacacgtgaggaacttgggggcactcatgggggtaggaggatgtcccttatatatacacataaggcagcatcgatgggaagatgggggacaggaagaagagaggtagaggctcccagagtgctaatgagggaagctgaggcagacagcagagacagtggggcctagcagcaataagggcgtggcatggcagaggtgatggggcagacagtggggaccccagcccccagcagatcccccagcccgattctgccaggtcccccgagttctacgaggagttcaagctgcatcttccagcctgcgtgacagagaaccatcacctgctgttcaccttctaccatgtcagctgccagccccggccgggcactgccctggagacacccgtgggctttactgtgagccgtcccctccctccct

SEQ ID NO: 1560074 - DNA, 4001 bp, Homo sapiens
aggtggagggaaagcccagtctcccggtctaggggcaatcagggaaggctctctagaggaggtgtccacagtgagacctaaagaataagaaggtatttaccaaataaagaggtgacagagagaaggatgtttcccatgaagggcctagcatgggccaaggtttttgagcaaaagagaagagagtcacctgcaagaacttcccagaattcccttgagccccaagactaaagagcgcttattgccattggaggctatgaatgatctgtgagatggcgtgtttcacgtctcctctcccagcatgagaacaagccaggccgtttcatccattaggcactacaggcaaaatgcttgggacccaggggctttctaatggcctatgctgaagtttgcaacctgatcaactaaaaaatgtgattggttccacaacgctgcaaagaaaacagcaaaatcgaaatgaacaaacgtcgatcaacaaaactagccaactggtcgactcaactccacttgacttttctggagctacatataaattacatgtcacgtgggtgcctcagtctaggctagagatggtgcattgtggggtctccaaaagaaagatgccttcaaaagcactaaaagagacctaaaggcagagaaacaacgcctgttttgccatcagggcatttgttcggcctcgaaggctgaggtgggaggatcacttgagccaggagctcaaggctgcagtgagttttggttttgggtgtttttgtttgtttgtttgtttgttttgttttttgagacagagtctccctccatcacccaggctggagtgcagtggcacaatcttggctcgctgcagcctctgcctcctgggttcaagcgattctcctgcctcagcctccctagtaactgggattacaggcacccggcaccacacctggctaatttttgtatttttagagatggggtttcaccatgttggccaggctggctggccttgaactcctgacctcaggtgatccactcacctcggcctccaaagtgctgggattataggcgtgagccaccacacccagtcctgagtttggttttctattacctgcagttacatgcatcctcactgagatactactccataaatgttgaatgagtgtaactgcatgagctgtgctacagcacagagtgctagcaggaagtgctgggctaggagcctgaagttgtcagcaggggtcagaccacacagggcctcaaaagccaggctggagctttgggtctctgtcctagaggtgacaggaagctaggaagtgttatgagcaagggacagccaggatcactgcaggaagtcagagagacctctctggagccatggagggataggtaggaggagagaaactggggaccagggaggaggtgaggagagggtccacatggaagaggatgagacctgggacagggctgcggggacagagaggaaggaatggggaagggagagtcagagggcaggaagatagggcctgatgggctgtgggagggaattgtgggaggtggaaggatggcaccagtgactgggttggcggtggggccatttgaaaatggaaaccaggaaggaggagagcagctttgggggaagatgctgagctcagggtgggagacaagacagtgaggttacctaggagaagaatggcctcagaggtgttgcttaggccccagaggctcatgggaaatgtagttctgagtccagggcattggccaaggaactgcagaggctcatgggaaatgtagtttgaggtccaagggggccgctctccaggaatctggtgaatccaggaatgctagggatggctttcactttggagtgccagtgactcgcttaaggccacactgtgagcccgggctactacgcactgcctggatggaggaagtccaccccttcccccaaagacacagctcagtacctgccttcctgtgcatggtggggctgcccatggcagggaagcacacgggctccacctctggctgcatcctgggaaggtgggtgagggatgtctcaggaaggtggcaagagaggctctgcctgggccacccaccccagctccttctccccaccgctgcctcctctacctcctctttgaagccccggggtagaattacagaggaactggaaggctgagaccatgtggagatctgggttcccctgacctcagggactccctgtgtgccccaatcccttctttcccatttccctgtttttcctcctatctctctctgtctcctagagtccctttccccacccctctctctccacctcccttcctcattctctccccatctctctgcccccctgcctcctcccctctgtccccacgtctccaccactcttttgcttgatttctctgccctcctcctccctccttctctcctgggctccatctcttcagtctccatcagtttccccagcatctccccaggcccccgtccctccttgtcttcatcgttttctgcctctccctaaccccgtcaccctctctctgtcttcccacctctcaccagtctccttgccccatctctatcctctcctagctgcctccactgcccccttgaggccccctcccctctgtcatcccctttctgttcccacttgccctctgctcatccctgccccagccaggaactggttagaaacaggcgagattccaacgaaagtgggttctctagtggggaggggatggtgggcagggggcctggttgccatggtgcctccagagggagggggaggggtgggggcctggattcctgggtctgagggaggagggcctggggtctggactcctgggtctgagggaggagaggatgggggcctggacttctgggtctggggtctcacggggcctctcgtgctagagagaaggggtctagccgtgtaggtgcctgttcagcatccctttctctgggtctgcagagctctctgcaggaattgtgggagaggaagctggaccttcgcttatttgttttgtctgtccttgcagtctttgtctctgttacttgtatctctttctcttcctctttctccacatccagatggtctctggactgtctgttgttcctgcttactaagtattcgttctaggtggtggcaccttgatttcctcagtgatttgttcagtggcgagcttaagaatcaatctaggctacaaagtcaacctttggacttttgctggacctgttagaaaacagggtttttcccctgtggttttggggctggtcagagccagggttggagctctcggtgctaccacatcaccatgcagggagataacttgcctgagagcaaagacaacacgagggaagcatagcccaaagatacagacagttggattcctggagatgattggaacacctggatccagcaatgcctgaagccctcatccaatcaataaacttccttttatgcttaggtcaatttgatttgcgtttccgttattagcaattaaaacagtccagattgaaatagtcttactcagttctgggggccctgaccccctcctggcatcttcacatctgcttctctcccatcaagctgtcttccatttccagctggcaattttatctcagcgggatggaggacatgattgccttgaccacaggcacacctgaccctcacagcctatctgtctccaagttctattccttctgcctctccttcctctcctctctactcccatagctctagcagccactcagacctcgtcctctcctgctgggacccttgccccagcctccttttttgtttgtttgtttttgagacagggtctcactgtgtcccccaggctggagtgcagcggtataacagccttgacctcccaggctcaagcaatcctcccacctcagtctcccgagtaatggggaccacaggcccacaccactacgcccagctatttattttttttaagatggagtctcaccgtgttgcccaagctggtctcaaactctggggctcaagcaatcctcccacctcagcctcc

SEQ ID NO: 1560075 - DNA, 4001 bp, Homo sapiens
agctaccacctttacttccaccaggctgggaaccagggcttccttggttgtggtcagcaatgagtctgggtatgagtattctgcgggaaaagggggagaggggccacttcggtctccgcccctcccactttgggaaaatgagcggggttgggggggcgactcggggagtcattttggctgcacccataggctggagagccaaatctggggcgcggggtacagaggcgaaataaagaaggggaacagaaaagaggaatgcctgctggggaagagtttggttgtcaatccggtctgcatctcccttgggtcttctgggtctgccatgcgctgcctgcaacccccaagtccgccgccaggggccgccgaagctctgtccttgcagctggctctagggtcgaaccccagggtgaggagaggaggggaaacggggaggctaggcatgaccttttggcttggaaagtcttagaaacagtgaagagacgttggtattcataacagaatcttcgtcggaggatgttggggatcaattctagaactttagtgtcattaggagtaggttggtgtcattttgcaaatgctcttatcactcatagatacttaacgtcttagtcataaaatcaaagaatcttttttttctttttcttttttcttttttttttttttgagacggagtctcgctttgtggccaggctggagtgcagtggcgcgatcttggctcacggcaacctccgaccccccgggttcaagcgattcccgtctcagcctccggagtagctgggactacaggcacgcgccaccacgcccggcttttttttaaattttattttatttttaatttaattttattttagtagagacggggtttcaccatgttggccaggatggtctcgatctcctgacctcgtgatacgcccgcctcggcctcccaaagtgctggggttacaggcgtgagccactgcgcctggtcacgtcttagtcatagcatcttaaagccagagcgagaggctcctgggttcacagactcttagaaaataagagggaagggacttccccaaggtcacacggccagcgcgctgtggcagagaggagtgtgcggatgggttggagagctgtggggatttccttcccccttcagagtcctcttccttggctcatgtccaagtgtcccagccccaggtagcgggacaggaaaggggcgtggctggccccccgcttagacccaggaaggcgggagggaccccttgggcactggagctcctgggtggccctgcagccggcactcccccgtcttccagatgacaatttgtcgggcacgagcggtatggaagtggacgaccgcgtgtcggcgctggagcagcggctgcagttacaggaagacgagctggcggtcctaaaggcggcgctggcggatgctctgcgtcgcctgcgggcatgcgaagaacagggagcggcgctacgcgcgcggggcacccccaagggccgggcgcctccgcgcttaggcaccactgcctcgggtatccccgttagactggaggggtgggatggggaggaccggggcctggtccttatactcaccctcttctgtcccctaaccccatccctccagtgtgtcagctcttgaaaggccttcccaccaggacgccccttaatggctcgggacccccgcggcgcgtgggtggctatgccacgtccccatcctctcccaagaaggaggcgacctccgggcgcaggtaaggcacaaggccgggacccccagcctcttccaagacctcgtgggagacagaggtggtttgtttgcctgagctccagcagcagagggtgcagggagaatctcgcttgctcacggcactcgcctgctggcctagaaggctctgcccccacctgtgtgctctcttttagcagtgtccgccgctacttgtcaccagagcgcctcgcctcggtgcgccgtgaggacccccgcagccggaccacatcctccagcagcaactgtagcgccaaaaaggaagggtaaggactggggcggcgtcaagccgcagaaagagatagggaggaaatggtcgagaaatgtagtcatgccccaggccacgaggtcgtaacctagagtggggccagctagttcaaaagcggggacggtgccagagccttggagggaccaatcttgaggtggcacggtaacagtggaaggtctgggagggcggagtcaatattgaggggcgtggccagagtttttagaagctggacggtcaggtctactgggtgaggaagtcagggaggagcttggcttatgggcgtggttattaaggtacaggagaggccccgttgagtttcagggatgaagtcaaggcagcagccacagagtttctacaaggaaagagggagtctgaggaatttaagggtgcagccacagtgttcgcctgggcgaaattaaaatctggggtacggagtaacagaggctgagaccaggtggaggcattccagattccagaagctttgacatcaaaatcggggggcactgccaggttgaaaagggcgtggcttaaaggttgggcggggccgtaggggcgtggtcaaatgccaagaggtgcagccaacttggaggcctcgaaggtattcacataaggaatacgtgaaaatggacgtaatcagaatgcctggcgggccggagaaggagcgttggcgggaggtagcagtcaattctcaagcaactgagtcaactcagggacagggttagaagggaggctcagaatgacaggcgtggtcaactccagaggcggggccatactgaagatctggacagagtcaaaaactaaggctatataattctagcagtttgggaggcggaggcgggaatcatcgcttgagctcaggagttcgagaccaggctgggcaaaatagcgagccctcgtctttactaaaaatgaaaataaattaggcctggcgcggtggctcacgcctgtaatcccagcacttcgggaggcctaggcgggtggatcacaaggtcaagagatcgagaccatcctggccaacatggtgaaaccccctgtctattaataatacaaaaatgggcgtggtggcgcgtgcctgtagtcccagctactcgggaggctgaggcaggagaatcacttcaacccgggaggcggaggttgcagtgagctgagatcgcgccactgcactccagcctgctgacagagcaagactccgttaaacaaacaaacaaaaaacaaaaaacaaaaaacaaaaaaaaaaagagagagaaagaaaatagccgggcgtgctggccttcgcttgtagacccagctacttgggaggctgcggcaggaggctcacttaagcctaggaaattcgaggtttcagtgagccatgatcacgccattgcactccagtttggtcgacagagccacaccctgtatcaaaaacaaaacaaaacaaaaatcaccctaaggctggagttatggtgcagtgggcgtggtcagcgctaggaggccacgcaagggcaagaccaaggtcaaaagctgcacatttcaactctgctcaaacatagcaaacacaaatacagcgttgtgtatactccaggcacttcccaataattaaccaatttcaccctcgcaactacccccgggaggtgtgagtactcttatttatttatttattttgagacggagtcttgttctcgttgcccaggctggagtgcaatgacacaatctcagctcactgtaacctctgcctcccgagttcgaatgattttcctgcctcagcctcccaagtagctgggattacaggcgccagccaccacgccaggctaagttttgtatttttagtagagacggggtttcaccacgttggccaggctggtcttgaactcctgacctcaggtgatctgcccgcctcggcctcccaaagtgctgggattacaggcatgagccaccgcgcccggccgggtactcttattatccccattttttaaatgaggaaaccgaggcagaggttggacgacctgtgta

SEQ ID NO: 1560076 - DNA, 4001 bp, Homo sapiens
gaatgaatgggtttgggaacagggtattgagagtggggaagagagaggcaggtaggagtggctttgggattagggagaggatagggaatggggttggaggagccctgggggttgagaatgaggtaaggattgtggttgtggttggggatggcattgggaatggggttgaggccatcaaggagacaggtttgggtacgaggtttaggattttcttctcacttgggattcaggtgacttaggtcaggttcaccaagtgcctcacaggagctactcctgggattgtggttttggggagaggggaggatggaagatgtttcttggggttcttctgacagggctgagatcactctgggccccaggaaaaccctcctgggtgactgcaatctcaggtgcctgaccctccaaggtcctagtactctgtctcccagtcctcagcagccagtggtgtttccaggggtggctctggacctcgagcttctttcttcccatcctgggcaggcagtgttggtggtgatggcagtgtcattggtggggtcctggggccagccccagggccccccgcccggcccctctctggctgctcagctctcccaaggccccgtcgatgcaggcctcggccccagcctggcctgtgcctgacttcccagcctccgcgtcccctgggaggcctcctaactgcccccggctgggagtggcctgcctgggagcagcaggggcaagagggcaaggcctgttggaaggtgtaggcccccagcagggcgctgtgcaggaggcaggagagggtgtccaggcgtatgggcacggtgacagaggccacgctctccgggagccccaggtgggtggggtctgtggagttcaggagcaagggtggaggggctgggagaggcgcagggggccatggctcggtcccagatgacggcagggacaggttgttcctagaacaacaaaaagacaggtcagtggggctcagcgtctccgtactttcttgtttctcgctgccaggctgtctctgcacctctgcagaaggcagccatctctccatcctcagtgcccacctgtgacttcctcccccgcttctctctttttgtttctaacccgggtctctctaaagaaacagacagctctgccatgaacttcggcaccagacagaactcagttccaattcctggtggcctcgcttttggtggtgtatctttggacaaatcattttcctattccgaaccttaatttgtttatagtcacagatggctttggatggtatcaaaggtgcgtatgacagcgctgggtctggtaagtgctaaaacagtggacagctacgatttctccagccttctggggatccctggagtcttcacatttcttggtttattcttggaaatttctgttcgatgagtatctgtttctagctcttttttttttttgagatggggtttcactcttgttgcccagactggagtgcaatggcgctaacttggctcaacgcaacctctgcctctcgggttcaagcgattctcctgcctcagcctgtcgagtacctgggattacaggcacgcaccaccacgcccgtctaattttgtatttttaggagagacagatttctccatgttggtcaggctggtctcgaactcccgacctcatgtgatccacccgcctcggcctcccaaagtgctgggattacaggcataagccactgcacccggcctccgcctgtttctaagtatctcgctcaactctcaccaagatcttctaagattctgtacctatgtgatgatacctgagccttttttgtttttcctgattctctatgcaggtctgttcagcgcgccctttctctctcgttttctctgtcccctcctctctctgggtctctgtccccctctcaggaggtctttgtttgtctcacccttcaggcccagccccgtcctttggttgttccatctccactggggccctcttacgtatcttctagcaacttcgcctccgagatccttcgggggcccgggaaggttggggaggggccgaggccgagagaggcggggcttggccgggtcagaaatggggcgtggctcgcggagttatccgggatcccaaaagaaagagctcaggcggggacctggatctagttccccaagatcacttacttaaggcctccagcaccctgtagcccctcctccctcagacccaggagtccagatccccagctcctcctcgctcagacccaggagtccagatccccagctcttcctccctcagacccaggagtccagatccccagctcctccctaagacccaagagtctagatccccagccccctcctccctcagacccggaagtctagggccccagcccctcctccctcagacccgggagtccagatccccagctcttcctccctcagacccgggagttcagatccccagttcctcctccctaagacctaggagtccagatccccagccccctcctccctcagacccggaagtctagggtcctagccactcctccttcagacccgggagtccaggctccagcccctccttcttcagaccccgtactctggttccccagcccccttcctctctcagattcagtagtcccgggacccctgcccccttctctctctctctctgtctttctctctctttattcctgccatatcctcaagacagattctttaggactcaagggacgttttaggtagggaaatgtggacactccctagggcagagggcgtggtagatggtctggaggtcttagccattctaggcgctgggttctactaggtgccgtgtctctaacttgctttgttactttaggtgcttctactctctatgccctagtttctccatctgagaaatggggctaatattactgtccaggttcttgtgatattacttgtgtattagtagacacagaatctggaccacaattaggctgaacacatgagatttacttattgttattgctggtggttgtgacagtgttttgctgagaagcaatcgtcattattacatgcattcatttaagaaatattcaatgcctgctatgatttgggctccaggctgcacacgggacagaatagacatggcccctactctcaggaaacttgcatgcttgtaagggagacagacgagacatacatagcatatattctgtaagaatatgtacctgaagatgtcaaatcagggcaagaggatatagagtcaccgaggtagggagatagagcagataacgtggttaggggcctggcccggtggctcacgcctgtaatcccagcattttgggaggccgaggtggacggatcacttgaggtcaagagtttgagaccagcctggccaagatggtgaaaccccatctgtactaaaaatacaaaaattagctgggcgtggtggcaggcacctgtaatcccagctattcgagaggctgaggcaggagaatcgcttgaacctgggaggcagaggttgcagtgagctgagatcgtgccgctgcactccagcctgggcaacagagtgagaccctgtctcaaaaataaataaaataaataaataaataaataaaaatacaaaaattagccaggcatggtggggcatgcctgtagtcccagctacttgggaggctgaggcaggagaatcacttgagcccaggaggcggaggctgcagtgagctgagatggcaccattgcactctagtctgggctacagagtgaaacttcatctcaaaaaaaaaaaaaaaaaaaaagaataaaaaattaagtagataagatggttagaaaaggctgttatgggaaggtactggaagactggaagttgaatattcctggggagggaacagcttctgaaagtaaaacaaatgtagtgattcagggactggaaaataatcagctaagaggagtggcataggtatttatatttttaaataaatgctttatgttgcaatactttttgcgtgtgttttttttgagacagggtccccctctgtcacccaggctggagtgcagtgg

SEQ ID NO: 1560077 - DNA, 4001 bp, Homo sapiens
cttgttcaccaccttgatcctgagggccagtttccggacgctggcgggccccaggccgtcgaagaagaaatcctcgttgaagacggggcggcggctgttcttcacgatggtgctgcgctgcttctgcagcttgcccggcaccaggcacaggcccacgcagcagttgatgctgcgggcgtcgcacaggcggtcgtagaggccctcggcggccagcaggtgcacccgcaggcgggcctggccggcctcgtactcggccagcagccgcacgctgccccgagggcccacgtggaccgtgtgctccccacgcgcctggcccgactcggggccaggttccgggggtgcccggcgggtcaggcggcgccggctcccggggctggcgtccggggtgctgtcgtccgcagacagggagccgtggcggcccacggagtgccggagctggctcaccttggcctggctgtcctgggcgaaacctttgagcagagacacggagcgggacagcagaggggacccgaagggggaggactcggccgaggaccctgtgtcgctctccccgccactgaagtagcggccggggctcatgagggccccgccagcctccctggggcccccatcacccccgttggccttggcagctgcccggcggcgcccggcccctggggagcccacctgggccagagccccgtgctcactgtggaacagagactccttgcgcctcgtgtgggggctctcagccagcatggcgaagccgtaggacgtctgggccttgggcaccgagggcagggacatggcaccctgggcctgggggtcggcgtcagtggcctcctcggacagccagtcctcggcactctcgatctggatcacgtgccgggtggctgccttcagcaggctcttgctctcggctgccagcttggcaggcagccgggggctccgtggggtctggcggggggccgcagaggccaggttctgttccgacgtggaggggcccagcgcggcctgtccctcgccctccgcggggcccgagggcagcttgggggggatgaaaaagtcggggatcttgtcgggcgtcaacacattgctgtacaggggccccttggaggccttgtcccccgcctcactccccacgccccgggcagcaccgttttccccagacccccgaagccgctccaagaaccacatgttggtttttctcatgggggcggcaggcaagaggcccggacaggggctgcagcgtctgggaagagaagcaggggtcaggagcagtggggggcggctggcagagggccctgggcacctgctccctgtggggcctcccggcagggccctgccggcggggtgggggtggaggggtcccctgggggcgtcccgcccaggcgcggcggcccaggacaggagtgaggcgggttccccccacctttttccggagagatcccgcttaacttcccagcaccaagcccaggggcgtgggggccgcgctctgactctccggggagctcccagaggagactggcccctcgcccgcccccactctggttttgagcatctcagcgctcattccaaagggttccgcgctcagtcccaggggaagacacggatgtgggtggacccccggggtgtcccagctccgcccccccggctcccacccacctgtggctcctccctggaccggagggccaggcgttcggggtgggggaagggaggggcggtaggtctggggccgagagagcagcgagtcgactccccggtgtccccccgcccccagccctccccgactccgcttggggtggggggtggggtcccggcggtccccgcagaccgggcggggtccccggacttacctgcccggggtgatggcccgaggccggaggtctgttcgcagacacgcaggggtctcggcgcgcaggctcccggggctggcgcgggggacgcggccggagcttcgatgcgggcggcggcggcggcggcagcgcagtcggactcattcacccgcggcgggaaaccgcccagccccgccgccgccgccgccgtattcctccgagtacggccgcccgcgcccgcgcccgcgcccccgcccccgcgggaagggggtggggccgtctccccgcagcccccggaggctggtggcagggaggagcctcgccagggcccgggggctgactgggggccggtgggagacaagcaggtggtcacggttggctgacggccacccccggcgctcacgcccgcagattccgggaagtcggactcccaagcccctgcctccgtataccggaagagggtcccagaccccctactcgctgccggcgaggagctttcccgactaacgacgacgaattaaatgacggcaacagtaataaatgcagctgggtttatgatggagcgtttcctccctgccagcctcccagcgtcctggcgggtctctgactctcacacaacccagtacgcaggtcctactgcaattctcaatctgtagatgaggaaggtggggggtttccttccagaaacaaggaccgaacagctaggacagcaggtcttactaaatgggcaacctctcagcagccctacaagaagcctggaaggggggggctccttcatttcatggacaaacgtttcctgagcacccgcttgatgctggacagtgacctggccaccggggacacagctgggacggagggaggtggccccagccctggtgatgcaggggcaggatgcccacagagcgtacaggtgcagcttagaactgcaggggtggtgacgcccggaacaggaatacagcaggaaagcgtgagggtcggggcgaagagagaaggcacatgcgtgtgattcacggatggagaaacccatagggggcaagaccaggtccaaacccaggcttcctggcagttcctgagaccacagggtccccccctcctgaggccccgacccccctcctgccagctgcttcgtgatctgccagccccggccttcactgcttccttctctccctccctccctgccctccccgcctcagtttcctcttctggaaccgagctgagcagttcccagcctcctcgtgcttggagccagcaagataacatatccccaggaccaacccggagccggcggacgcctggcgctttattgaattattgattgtccaggagcctcctgcattctgggaatgtccccaagtctggatgtggcccaagctgggaggagcggctgctgccacagtggtagaagaggggtccaggagggcgagagagctgggctgaggcctccccactctccacgtacccttgcaataaggggttagagtcctgccgtccagaggggaaagtgaaacccggaggagctgtgaccccatctaagctttgctcacccagcaaacgttgatgagccctcatttttgtgctggggcaaccgcgacgcagccccgaagtctgacaaggaggcagacaccgaggaattctccccttcaccgccgccgcctccaggaagcctgggcaggccccaccacagactagcagggcccccgaaccccagctccagctgccatgcagaatacccttgggctgctgtccaccacccctgctgggcctgaggcgggaggagggtcctgggggtctgtccactgcccctgctgggcccggatcctggggatctgtccaccgcccctgctgggcacggatcctgggggtctgtccaccgtcactgctgggcccggatcctgggggtctgtccaccgcccctgctgggcccggatcctgggggtctgtccaccgcccctgctgggcccggatcctgggggtctgtccaccgcccctgctgggcccggatcctgggggtctgtccaccgcccctgctgggcccggatcctgggggtctgtccaccgcccctgctgggcccggatcctgggggtctgtccaccgcccctgctgggcacggatcctgggggtctgtccaccgcccctgctgggcccggatcctgggggtctgtccaccgcccctgctgggcccggat

SEQ ID NO: 1560078 - DNA, 4001 bp, Homo sapiens
catgggaggggctcagaaagggggagggactcaggtgagggaacttagaaagtgatggagactaagaggggaggagttcagaagaggagacttcgagggggaggggcttggaaaaggaattcagtgggagggacttagagggggaggagactcagaaggggtggagtctcagagaaggggaggaacctcagaaggggtggggtctcagggaagggagggactcagaaggggaggagtctcagaaggggtggggtctcagggaaggtcagggcttagaaggggaggagattcagaaggggtgggggggggtctcagaaaagggaggggcttataaggggaggagactcagaaggggtggagtctcagagaagggaggggcttagaaggagaggcgactccgaaggggtggagtctcagggaagggcagggcttagaaagggagaagacagaaggggaggggctcaggaggagggggggagtgggcgtggctgtgggtgtcagccgggtcctgcgccagtctgcactcaccgtgaaggtgacgttgcccatgtggttggtggcaggggtcagcacagtcttctcactggacagcactagttttttgcctgggaagtcgtggacagtaacagtgactggaacatccccttgcgcgtcgtgggcctccagcaccatggtctcctcgctctccagccgcaagatgttgggggtgatgatagagtacctgtcggagtggggcacgggagtgggcttgtcattccacggatgtgagacgccagtcctcactggagtcagcgcctggcaggctgtgtgccccagcctctggtcctggagaggatccagtgactgccggcgcacttgccaatgccattatcttctctgggcactgccaccgtctcaaccacatgggcaggacagcagccaccatgactcccactctcagccagctgggcctggcctttgaaagcctgggcaacgagggggccacacatcccaccaaaccctgaaccttccaaccagcgtcagcaactcctccaagtctctggacttccagacccacaatcgcctaaacccacacatgccccaaaccctaaacctctacctctctaaacactccaaatatgtaaacactcaaactcccggacaccctcaactctacctacccaaacccacatacgccaaaacctctaaacctcaaatcttagagcaccccaaacccagcctaaacctccaacaccccagtcctaataaatacaatcaattccaaatgccccaactatacatgaacccgaagtagccaatctttaaacccacactgaaaattgcaagtccccaagctgcaaactcccaaatcttgtaaagtccaaacctccgagtctccaaacacccccaaccgcaccatcaatgaacaccacatacaccctaaaccaacagatgacctcaattctagaaacatcccaaactccaattccaccatacctggattccacaaacacccaacccataaacacccaaactctcaggcagcccaaatgtatataaactccaattccacgatacctggattccacaaacacccaaccacaaacacccaaactcacaggcagcccaaatgtatataaactccaattccatgatacctggattccacaaacacccaaccacaaacacccaaactcacaggcagcccaaatatatataatcattcccaacctgctaacccctgaatccacaaacacccaaatgcaccctgaattctacagggacctggacccccaaatgtctgcttccaccccagaaccagccctgtttgtgggtagagtcataaccactcacatgggactccccagagccagggggaggtgggttagtagcaggagcagcaggctgggacctgaggtgggtcccatggtgctgggacagtgcagggtcagagggacagagggacagagggagaggatggggaggagtgagcagcgcctgctggagctggctttttatctggctcctgcctttcccccactcagcccccccttctccccatggcctctccccttttggggctgccccagatttctcaataccatttcctaagcttttcagtccctggggccaacatgtccatggggtgagtaacctgagggcatgttccccagcagcatgaatgcagctgcaccctgccctggactctcccagggtcagggccacctggtgaacacagacctttctctgttggacccactttgtagtggaagaacactaaggtctggagaaccccccaccgcagatgtcttggacctcatccccagttcacttttggccatgcgtttatcagtcgaacacttcctaggaatctctctgtaggctgggagtcagagccccacttccagaggcttccatgctgagggaggggaagtagaatgggggagggacagagcccagcacagaaactcccagtttcatgaaatgttttctagctcatgtgcagggcagggaaaaaaaagaagaagaagaaatgttttccccagtgaaatagaactctgcttcttggagggtcagggaaaacttcctgtaggaggggacatttcagatgggctttgaggtatgtgcaggagttcactatccaagtgagtttattttccaaggaggctcccctcacttacccttgtcaggatgcctgagtgactttggtggtgaaaaaagtcatcactgaggaaagtcctcatttctagagcttttgtacctgtctaatgtcaatatcctcttaggatattaaattgtattgtttgtgtgtgtgtgtgtgtctgtgtgtgtgtctgtgtgtataatatattcatattgatcaacatctaaaaggtacaaatgtgtatagcagtaaaggtggtcttcctcccatccctgttgacagcatattctttttgtgttttcctttaaaaaaatttttttttcattctgtcactcaggctaaattgcagtggtgcaatcacagctcactgcagcctcaacctcctggggtcaagtgatcatcctggctcaaccacccaagtagccgggactacgggtggccgccaccatgcccggataatttttttatttttgtggagatgggggtcccacgatgttgcccagtccagtcttgaactcctgggctcaagtgatcctcccgcagcagcctcacaaagtgctggtgtgaactactgtgccctgtggacagcacatagcacatactattcttcctggtctcttcagttaaatcttgggtttcgttttgtttcgttttttcatgaacaatatacctcagaggctatttcacctcagtgagcaaagaactgcctcattcttacaggttacaggcctcttgttatattgtgagaaagtaaccagcctcctactttttgggggatattttgtttgtttgagtgttttttttttagagtcttgccctgtcacccaggctggagggcagtggcgctatctcagctcactgcaccctccacctcctgggttcaaacaattctcctgcctcagcctccggaatggctgaaattataggtgagcaccaccacgtctggcaatttttgtatttttagtggacaaggggtttcaccatgttggccaggctggtcttgaactcctgacttcaagtgacccacctaccttggcctcccaaagtgttggaattacaggcgtgagccgctgtgtccagccaccagcctcttcttgatggagagactgacatctgtggcttcacaccaggctctctgcagtgaataagcttgaacctgcgttattttctagctctgaaactagctgtgatctttgggtaagctactgattaccgccctgagcctcagtttgttcatggaaaaggaaacccttaccacctgcttcatagagttgtcgttgcaatgaaaggaaatatgttgggtcaatctctgaatgcactggtaatcttgctagatattgccaaattcccctgcacagaagttgtattgatttacaca

SEQ ID NO: 1560079 - DNA, 4001 bp, Homo sapiens
atacctgtaatcccagcactttgggagaccaatgtgggtggatcacgtgaggtcaggagttcaagaccagcctggccaacatggtgaaactccgtctctactaaaaagacaaaaaattagccaggcgtggtggcgcatgcctgtaatcccacctagtcgggaggctgaggcaggagaattgcttgaagccgcgaggcagaggttgtggtgagccaagatcgtgccattgcactccagcctgggcgacaagagtgaaactctgtctcaaaataaaaggaaagaaaaggagtcagaggctctggggtaggcagggagaatgagtttttttttttctatgtttgttttttgagatggccctgttgccaggctggagtgcagtagagcaatctcggctcactgcaacctctgcctcatgggttcaagcgattgtcgtgcctcagcctctcaagtgctgggactacaggcgcccgcttatatgcccagctaatttttgtagttttggtagagacggagtttcaccatgttggccaggatggtctcaatctcctgaccttgtgatccgcccgcctcagtctcccaaagtgctgggattacacgcatgagccaccgcgcctggccgagaatgagtttttaccaagtatcatttggtactttggaaaatgttttggaaagaaaaaaaaaaagaagaagaagaatcagagagtcccgtttgcccaagtcggatctcaagggtggaatgcaggaatgaagcaacatcagacccctccctggtccatccaaaccatcttccgtttcctctttgacacagatgaagcaaggcaatgcctgtgttacagcaggtgctgaatcgcagctctgctggctcagtgcccaggcctccagacgcagggatgacagggaccctcatttagcctggggtgcattccttctgacactcacagaatccatggcataacctgcttctgccaccaaccatggagggtccccatccatctctgctcctgcctgggcctcagtttccccatctctgtcatgcagaacatctcaaacgaccaggcataatggcctcatgccagtaatcccagagctttgggagaccaaggtgggaggatggcttgaggccaggaatttgagaccagccctgacaacatagcaagaacccatctctacaagaataaaaattttaaaaattagccggacatagtggtgcatgcctgtggtcccagatactcaggaggctaaagagggaggatcacttgagcccaagagttcaagactgcagtgagctatgatggtgccactgcactccagcctgggcaacagtgcaagaccccaagtcgaaaaagaaaagaacatctatctgcaagagcatctgagtaacttgaccattcctccaaactggttctttccagcctcccaacattttctctgccattcccactgcctggaaggcctgttctagatttcttcacttgtggaattctttaaataaaaaaaaaaatacagacagggtctcactatgttggccaggctggtcttgaactcctggcctcaagcaatcctcccgccttggcacaatccccaatgtgctgggatcacaggtgtgacccactgcgctcggctgcttgtggaattcttagtcaccttactagacccaactcaagggtcccctcccctggggaatcttctcgggccccagccccacgaggttgctgttgctcccacaatcttgacaatcttattcccatggccacatcccagccctggagtgtgagagcctgggatgcaggagagagggaaggtgggaggtggaagacagggagagagaaggaaagggagagacagacagagttgacggcgagagttggggagagagaaggacccactggagcaaagatgggagggacccaggacaaagtttcctgctcccattccccttcgagactcaccatgttctggtctcctgggctccccgaggatcgaaggtccctcctgcccaagggctgtggtttttaaagccccaagggaagatgcagggaggaaatgaccgtctttctctctggggctctcattggtctgcacactgggcactgaggccagagctccctctgcggggcacacacccaggggactctaaccacctcctcccaggcagagaaggggggccggcgctcggaaaaccgaggaagctcctgtgcaggctcggcccctctcctggccttggtttccctatttggggccatctcttctctctcatttttttttttttttttttgatagagtcttgctgtgtcgcccaggctgcagtggagtggtgcaatctcggctctctgtaacctctgcctcctgggttcaagcacttctcctgcctcagcctcccgagtagctgggattacacgtgtgtgtcaccacccccggctaattttttgtatttttagtaaagacggggtttcgccatgttggccaggctggactcaaactcctgagctcaggcaatcacccacctcaacctcccaaagtgctagaattacaagtgtgagccactgcgcccggcctggagccatctatctctttcctcctaagacgccagccttctgggcaaaagctcaggaatgcagttggcttaaacccctcccttgggattcaagaaagcagagactgtaacctccactcagcctcccggccaggctgatttgagacccaaagaggctgagctagtctgcggaggtagcccagcatttaagtatattttactgttaaatcttccttctagggccaggtgcaatggctcacacctataatcccagcactttgggaggctgaggcaaatgaatcacttgaggtcaggagttcaagacgagtctggccaacatggtgaaaccctgtctctactaaaaatacaaaaattacccaggtgtggtggcaggtgcctgtaatcccagctacttgggaagctgaggcaggagaattgcttaaacctgggaggcagaggttgcagtgagccaagattgcgccactgcactccagcctgggcaacaaagcaagactctgtctcaaaaaaaaaaaaccatcgtcaccagcctggccaatatggtgaaaccccatctctactaaaaatacaaaaattagccaggcgtggtggtgggtgcctgtaatctcagctactcagaaggctgaggcaggagaattgctggaacccaggaggcggaggttgcagtgagcagagattgcaccattgcactccagcccaggctgacaacaccaagactcaatctcaaaaaaaaaaaaaagaaaagaaaaagaaaagaaaagaaaaaaatcatccttctagggttataaagttggcaatagaaaatggagctaccctgtcccccaactacacaagccacaaccatctccatctattattgttacattgtaatatataatgaaataattatacaattcaacataatgtagaatcagtggaatccctgagcttgttttcctgtaacgagatggtcctatctgggggtgatgggatacagtgacagatcatcaggcattagattctcataaggagcttgcaacccagatccctcacatgcgctgttcacaacagggttcatgctctttttttttttttttttttttttgagatggagtctcactctctcacccaggctagagtgcagtggcacgatctcggcacactgcaacctccgcctcccaggttcaagcgattctcctgcctcagcctcccgagtagctgggactacaggtgcctaccactgcacccggctaatttttgtatttttagtagagacgtggtttcaccatcttggccaggctgatctcgaactcctgacctcgtgatccacccgcctcagcctcccaaaatgctgggattacaggcttgagccactgcgcccggcctgggttcacgctcttatgagaatgtaattccgcccctgatctgacagatcaggcggtaatatgagcgaaggggcgtggctataaat

SEQ ID NO: 1560080 - DNA, 4001 bp, Homo sapiens
acaacatcagctccttccagcctcgggtgccgctgtgtccctggcatctgggacagaacctggcacacagcacaggcatggtcgatatttggtaagtgaaaggataaaagagtaaactgaggcacagagagactaagtggtcacttaggtttcttttgttgtgattgcaagcaccctcacatgtgcctcttggtgcacgcctgtctgtgcatccagtcttgctgggttctctgctctggaaaaccctggagcagaatcaaagaaggctggccgggcgcagtggctcacacctgtaatccccggcactttgggaggcccaggcaggtggatcacgaggtcaggagatcgagaccatcctggctaacatggtgaaaccccatctctactaaaaaatacaaaaaattagctgggcgcggtggcgggcgcctgtagtcccagctactcaggaggctgaggcaggagaatggcgtgaacccaggaggcggaggttgcagtgagccgagatcgcaccactgcactccagcctgagcaagactccatctcaaaaaaaaaaaaaaaaaaaaggagtctgaacattctttattcctgaacatccatcttctaggattcctccctcacgacccagcaatcagcctcctttccgcaaaagaacacatatgctcaccagaatacatgtgccagaatgttcacagcagcccaagatgagaaaccgtccaaatagccacccacagcagaatggataaacacatcatggggtgttcaccctgtggaatattctacacgatgagaatgaacaaacaccacacaagaatgtggacagattttgtgatagaacattgagggggccaggcacggtgattcacgcctgtaatcccagcactttgggaggccaaggtaggtggatcacctgaggtcaaaagttggagaccagcctggccaacatggtgaaaccccatctctactaaaaatacaaaaattagctaggtgtggtggcgtgcacctgtaatcccagctactcagcaggctggggcaggagaatcacttgaacctgggaggcggaggttgcagtgagccaagatcgcaccactgcactccagcctgggagacagagtgagaccctgtcaaaagaaagaaagagagaaaaggaaagaaagagaaaagaattggaatcgctgagttaaagggcttgcttgctacacatgctacagtttggtggatctgccgaaagctgcaggaattcctgcaggtttgagagaggctgtttcccatacatctgtgtgtgaaaaaccatttgggcagggcacagtggctcacgcctgtaatcccagcactttgggaggccaaggcggacagatcacctgaggtcgggagttcgagaccagcctgaccaacatggagaaaccccatctctactaaaaatacaaaattagccaggcatggtggcatgcgcttgtaatcccagctgagacaagagaatcccttgaacctgggaggtggaggttgcggtgagccaagatggcaccattgcactccagcctgggcaacaagaatgaaaacctgtctccaaaaagagaaagaaaaaaaatgcttagatcctttgacaagagctttgctgctgggctgcccaagttaattcaagagcccaggactgtgacgtgcgttccagtgtggctgtaataagactgcacttctcaaactctagttctgcttcccagattctgaaagtaatgattccgagaagccaagatcatgcaatctctctctccctccttcccgcccttgtagcctccatccttaccgtctcttccaagagtgtccccacgtgagtcaaacgccacttgggagcccaatccgggcccacagccaggacccaggaggtctggggtctctccctgccgtgtctggcagctggtagagtcctggaaatccgtcctgtttgccagggctcctgtcggatgctgctgagcactgccacctcaccagtcccagtgaatctttataagcagtacaaaataggagtggccttgtctcgctctcagggtgtgtttgtcctgtcttcttcccgtgactcacagaacccaaaattacggggtggctggcagggcaggagagggctcggttgggtggagggctgatcccaagtccccaaccctagtctcgaagtcccaccttcctggaagccagacctgcatgcggtttgctctttaacgccttagaggtcttggcctggattctgtttgcccacaacatgccagctgcccccagccacctccaggcctctaactgtgttcaacccctcccttctgcagcctcaggacagacaaacatccctccctcctcctcggctctgaggaagacagcctggggtcacattctccacaaaaagaccacagcagctgagcgcagggcccaacgcctcagtggtagaaaaagcacaaacaactcctttcttgggcctcaattttccatctgtagaatgggaagatgttgttggccatagcgatgctttactttttttagagatggagtcttgctctgtcgctcagactggcgtgcagtgaaaacattatgcctcactgcagcctcaaactcctaggctcaagtgatcctcccacctcagcctcctgagtagctaggactacaggcatgcaccaacatacctggctaattttttaaaattttctgtagaggtgcggccttgctgtgttgcccagcctcaagccatcctcacacctcgacctcccaaagggctgggattacagaagtgagccacagccgtgatagcaattcttaacctcttccagcatatcacagtggctgagaacaagaactcaagggccagaatgatgagattcatattccaggtcgacacaccctcatcaaagttcagggcctcagcccctctgaacctcaacttcctcatctgtgcagtggatgtttgctatgagcgttggatacatttaaaacgcacagaactggctgggcgcggtagctcacatctgtaatcccagcactttgggaggccgaggcaggtggatcacttgaagtcaagtgttcaagaccagcctggccaacatggcagaacaccatctctactaaaaatacaaaaattagctgggcgtggtggtgcgtgcctgtaatcccagctactcgggaggccgaggcaggagaatcatttgaaccgaggaggcggaggttccagtgagccgagatctcaccattgcactccagcctgggcgacagagtgagactctgtctcaaaaaaacaaaaacaaaaaaaccggagcagtgcctggcacatagtatacgctaggctcacgcaacagcaacaagactgtaacgtgaattcttaaagtacacataccacgcaggcttagcaagaggaagtggctccaaccccaactttggaacctctttattcagcagttctttctgtttgtgctttttttgtgcgtgctttagggattcaagggatatatttacacacttcttttgttattgttttagagaatgaaatcactttgctagaggaagttgttcgtgagacaaggagctgggactcactgtttgacccagggcttcctccactctgtttccctgactaggtgaccctgcgttggctgaccctcaccccggaccctcagagaggaaaacatcccccaagtcccctcccctcctcttctgtcccgggaagccccctccttgggagaggagggacatcctgccagccccaatctcctgtgggaatctgccctggcctgaagaagagattaagaggaaagaaaccgaggtggaaccttccctttatcagctcaaactttctttttttctttctttttttttttttttttgagacggagtctgtctctgttgcccaggctggagtgcagtggcgcgatctcggctcactgcaagctccacctcccgggttcacaccattctcctgcctcagcccccccgagtagctgggactacaggcacccgccaccacgcccggctaa

SEQ ID NO: 1560081 - DNA, 4001 bp, Homo sapiens
tggcgtgaactcaggaggcggagcttgcagtgagccgagattgtgccactgcactccagcctgggcgacagagcgagactccatctcaaaaaaataaataaataaatagaatcttttatttatttattttttgagacggagtctcgctctgtcgcccaggctggagtgcaggggctcaatcttggctcactgtcacctctgcctcccgggttcaaaacgattcttctgcctcagcctcccaagtagctgggactacaggcatgcgccaccatgcccggctaatttttgtatttttagtagagacagggtttcaccatattggctaggctggtcttgaagtcctgacctcaagtgatctacctgcctcagcctcccaaagccctggaattacaggcgtgagccaccgcaaatggccctatatatctttgtttatagtctgtcttcctccactagaagaatatcagctccctgagggcaggatttgtgtctgttttggtcactgctatatctctagtgcctaaaaaggccttgcacatagcaagtgcatgatggatatctgttgaatgaaggaaggaataaaatgaagacatcattgagctcctggatccagctatgcctgaagccagtcttgtgaaatgagataagaagatacacacccacaatgtctctccagcctacacctccatctccgagaccaggtcatggctggtggatttcttgctgtccacactttcgtcctggccctgggactccctcagggcccagtgacaggcagctggcagtgaccggcggagttgagccctcccaaaatacaggaagagcatgggattgaggcagctgtgagcgagggcaaggcccacgatgaggggttcagcccgcagggccctggccaggagtgcggagttcggggccgccacagtgagcaccagccccagcaggtggtagggtgcccagcagacaaaaaaccccaccacaatggctgtgcccagcggccggcagcgtcgggctgcccagcacaggagggcactgtggcagctggccacggccaccaggggccccaggaagccaaaaagaaaccggatggcagtcaccgcattctcggtgctggaggagccgccgtagtccaccacacactgcagccgggctgggaagtgctcctggtgcagccggcggtagatggcggagggcacggtgagcagcaaggccagtgtccaggctgccccacaggccacctgcaccccgcacgcccgctgaaccgtagaccaccaggcaggcccgagagccaggaagcagaggtcggcactgagagctgccaggagcaggacgctggcatacatggtcagcaggatgatggagggcagcgcccgacagcccactgcaccatacggccagtggcctccacgggcaatgggcactgccaggatgggcagagacaaacagcacagcaaatccgccacggccaggtggagcaaccaggtggcacccaccctccggcgggccaccttcccagccacccaggccaccatggcattgcccggcacccccaccaggaagatggcggcatacagtgggagcggggccacgcgcagcgggtcgatggccaggcaggcgccatccaggcagtccacagggcggtccgagaggtcgctgtaatccccatactcgtagctgacagaatcgttccccattcaggctcctggtgtctgggcaggagagaaagacgatgaaaactcagaggaggaaactccatggccctggagatctagggtgtccatcagcccggcccaccagcaccttgcaaactggaatattgcgtcataaggactccagtgctttagaatattggaattctaggccgggtgtggtggctcacacctgtaatcttaacactttgggaggccaagacaggtggatcacttgaggtcaggaattcaagacaggccaacatggtgaaacaccgtctctactaaaaatacaaaaattagctgggtgtggtggcgggcacctgtaatcccagctacttgggaggctgagaatttcttgaacccagaaggtggaggtggcagtgagctgagctcacaccactgcactccagcctgggagacagagtgagactccatctcaaaaaaaaaaaaaaaaaattggaattctagaacttagtgttgttagaagtggcatcttggaattctagaatattacaatgccagaaccctagtacattggaatattggggctgggcacggtggttcaggcctgtaatcccaacgatttgagaggccaaggtgggaagatcacttgaggtcaggagttctagaccagcctgggcaacatagggagaccccatctctacgaaaattttttaaaacatagccaggcatggtcatgcgtgcctgtgatcctagctgccgaaaaggctgaagtgggagaatcatttgagcccaggagattgagtgagcttgatcatacccctgcactccagccaggatgacagagagagactctgtctcaaaaaataaaaaaaaataggaaaagaaagaaagaaatgagcaaaatccaaaatccacagtattttagaagataataaatactatgggaaaaatatcacacagggaagctggctatgttggagttgtacaggcatggtcagggaaggcttcttgagaaggtgacatttgcataaaaatctgaaggaacagtgggagagatgcatcgagatctgggggaagagtgtttcaggcatcgagaacagccagtgcaaaggccctgaggtgggaacatgacggtcatgtccaagaacagcaaggagcccagtgtggctggagtggaatctgccagagggagagggtgagaggcaatagcagagtcatcaggggccgggcacagtggctcatgccagtaatcacgggaatttgggaggccaaggtgggtggatcacctgaggtcaggagtttgagaccagcctggccaacatggtgaaaccccatctctcctaaaaacacaaaaataacctggagtgatggtggacgcctgtaatcccagctactcaggaggctgaggcaggagggatcacttgaaccagggaggcggaggttgctgtgagctgagatcatgccagtgcactccagcctgggcaacagagcaagactccatctcaaaaaaagaaaaaaacaaaacaaaacaaaacaaatgaaaaacagttatcaggggccacggcatgtagggccacgtgggcaacgcaaggacatcatcatttattccaaatgagacaggtgctataggagggtgctgagcaaggaagcgacataatctatcatagcaataatttattttttttgagacagagttttgctctgttgcccaggctggagtgtggtggcatgatctcggctcactgcaacctccgcctcctgggttcaagcaattctcctgcctcagcctcccaagtagctgagattacaggtacatgccaccacacctggctaatttttgtatttttagtagagatggggtttcaccatgttagccaggctggtgtcgaactcctgacctcaggtgatccacctgcctcagcctcccaaagtgctgggattacaggcgtgagccaccatgtcgggccacaataatattattactatattattactattttttgagacagggtctggctctgtagcccagactggactgcagcggcactttcccagctcactgcagcctccatctcctgggctcaagcaaccctccacctcaccctcccaagtagctaggactacaggtgcacaccatcatgcctgattaattattattattattattattattattattattttggaggtcatctggtttcaccatgttgcccatgctggtcttgaattctggggcttaagcaacctgccttgtctcagcctctcaaactgctgggattacaggcatgattgccactgtgcctgacaataataataataataaaattattattattggaagccactgtttct

SEQ ID NO: 1560082 - DNA, 4001 bp, Homo sapiens
atttttgtatttttagtagagatggggtttcaccatgttagccaggctggtgtcgaactcctgacctcaggtgatccacctgcctcagcctcccaaagtgctgggattacaggcgtgagccaccatgtcgggccacaataatattattactatattattactattttttgagacagggtctggctctgtagcccagactggactgcagcggcactttcccagctcactgcagcctccatctcctgggctcaagcaaccctccacctcaccctcccaagtagctaggactacaggtgcacaccatcatgcctgattaattattattattattattattattattattattttggaggtcatctggtttcaccatgttgcccatgctggtcttgaattctggggcttaagcaacctgccttgtctcagcctctcaaactgctgggattacaggcatgattgccactgtgcctgacaataataataataataaaattattattattggaagccactgtttcttgaacattttgtgttttgtgtcaactttttttttttttttagggacagatattgctctgtcactcaggctggaatgcaatggcactatcttggctcactgcagcctcgaactcctgggctcaagtggtcctcccacctcagcctcctgagtacgtgggactacaggtgtgcaccaccacacctggcaaatttatatatatatattttttttagagacagggtctcgccatcttgccaacgctggagtgcagtggtgcaatcacggctcactgcagcctcaaactctgtgctcaagtgatcctcccacctctgccccctgagtagctgggactacaggcagtggccaccacgcagctttaaacactgtatcactgaaaccttgttttattttattttatttatttttttttttgagacggagtctcactctgctacccaggctggagtgcagtggcgctattttggctcactgcaacctctgcttcctgggttcaagcattactcctgccacaagcctcccgagtagctgggattacaggcgtgcaccaccatgcccggggctaattttttgtatttttagtagagacggggtttcaccatgttggtcaggctggtttggaattcctgacctcaagtggtctgcctgccacggcctcccaaagtgctaggattacaggcatgagccaccgtgcctgacctcactgaaaccttataataactgtctgaatttgacactattgttatatttattctacagataaggcacagagaagttaagtaatttacctaagatcactcagctaagtaggtaaaatttttttttttgagacagagtctcgctctgtcatccaggctggagtgcagtgacgcaatctcggctcactgcaacctccgcctccagggttcaagcaattctcccgcctcagcctcctgagtagctgggactacaggcacccgccaccatgcccaactaatttgtgtatttttagtagatacggggtttcatcatattggccaggctggtctcgaactcctgaccttgtgatccgcccacctcagcctcccaaagtgctgggattgcaggcatgagccaccgcgcccagccctaagtaggtaaatttcaaagtgtgttagtccccgctgcagaaccccatgccctagaatattaccatctccaaatcttgggctctggagagctggcaggcagcacagcaagtggtcctgagcagccccggcctccatgactgtgggtgtcagttgcagctggctgtgcctatttcctcatcggggaaacaagagtcattgaggtgaacctacctctggttttgggagtccttgaggagttaagatttgtccagcacgtggcacacaggctccggtagacaaagctgtgggtagcacaggacccaggcaggagtccccacccccccacccccacaatgtcagagtgacctggccctgaggctctctgctgactattatgggttggctggcactgctcagcactccagctggtgttgaggcaacaggaaggacagagaggaagttggggcactcccctcccccatgccaggtagcagtgaagagtccaggccacttggtgtgtgtattcggagtctggcattccactttcgtattatttttatccctagagtaaaaggtgtgcagaatttagccaggtgcagtggctcacacctgtaatcccagtacattgggaggctgagttgaggaggaaggatcgcttgaggccaagagttcaagaccagcctaggcaacacagtgagaccctctgtctctacaaaaaatttaaaaattagccaggcatagtggttcgtgcctgcaatcccaaccttttctaagactggggtggaagatcacatgagcccaggagtttgaggctgcagttagccatgatcgcgccactgcactccagcctgagcaacagagtgagaccctgtcccaagaaagaaagaaaaagaaagaaagaaagaaagaaaggaaggaaggaaggaaggaaggaaggaaggaaggaaggaaggaaggaaggaaggaaagaaagaaagaaagagtacagcatttaaaaactgaaccccccctagccgggcacagtggctcacacctgtaatcccagcactttgggaggccgaggtgggcggatcacttgaggccaggagttcaagaccagcctgagcaacatggtgaaacctggtctctactaaaaatacaaaaatcagccaggcatggttgtgggctcctgtaattccagctactcgggagactgaggcaagagaatcgctggaacccgggaggcagaggttgcagtgagccaagatcatgccactgcactccagcctgggcgacaacagcgagactgcatcataaaaaacaaacaaacaaacaacaacaacaaaaaccctcaaattcctaccagctgtgtggccttgggcaagtcacctaaactatctgtgcctcagtaaaatgggaataataatattcctgccttagggggtgttgtaagaattcaacaagttagaagggtagagctgagtgtatagcgctggttttcagtgggtgtcatacgtaggctagctgctgttatcactgtccacacgcatcctctcaccccgcaaagactccacccttcctggcccttgttgattacaatccagaaaacgaaaactttctttttttttttttttttttttttttttttttgagacggagtatcactctgtcgcccaggctggagtgcagtggtgcgatctcggctcactgcaagctccacctcccgggttcgcatgattctcctgcctcagtctcccgagtagctgggactacaggcgcccgctaccacttccggctaattttttgtatttttagtagagacagggtttcaccgtgttagccaggatggtctcaatctcctgacctcatgatccgcccacctcggcctcccaaagtgctgggattacaggcgtgagtcaacatgcccagcccaatccaggaaactttctgtgcatataatttgcccagctgtaagcccaaagcaatggtatcgtagatggcatttcctttgtaacgtcttaaccagaaatgggagctttcaacatacgttgttccatttcttcatcttttccacttaacgtgcccgatatctgttttcctgtctatctgtacagatatcaaccccattcgtcctcaaagcatcaaaaacagtccactgtctgcccaagtggtgcttattaactaaaggccattcaataacaatggtaaggagaataatgagaaacagggccaggtgcagaagctcacacctgtaatcccaacgctttgggagtcctaggcagacggatcacttgaggtcaggagtttgagaccagcctggccaacatgataaaatctcatctctgctaaagatttaaaaaaaaaaaaaaattagctgggcgtgggggcgagtgcctgtaatctcagctactcagaag

SEQ ID NO: 1560083 - DNA, 4001 bp, Homo sapiens
cacaggaaatgttctgcttttcattgcttctgcagagatggggagactaggggaccatgcttgggatgggaagaatgggtgatccattttacagtgtaagcagcctcctctccacccactgggtgtcccctcctcccccaaggctgctctcctacctcagcaccccattccccagcctctattcatgcccatccccagtgggttcaatagctcctccctccaagccccttaccttctctcctccagtgctgagccttaatgggggcagaaaggggtcataaagaaccctcttcagctccacatccacggggctctgccgcttccccacagcacacagactccacgctgcattcaccaggccccagaaaggaggccctgggggtggggtcggagtaggaggacaaggagtcagaaatagagactggatcccagggctggtatctgctgagtgggctgtggtctggactcccagatcccaggggaggaggggctagggacctagactcctgggtctgagggaggactgggctcagatccagaattctgggtcctagaagaatcttggaatagtttccaagtttagcagagacgggtttcaccaagttggccaggctggtcttgaactcctgaccacaggtaatccacccacctcggcctcctaaagtgctgggatttcaagcgtgagccaccgcgcccagccgatcaaacccatcttaagccactgtagatggaactacaactcccagcaggccccagtgctaccagcctacccctctgctgcctacctgccccagagccccgtgggagttgtagttcttttttttaatcgctcttatcccacagctggattattattaatgtgttggggagaggagctgcaagagaaggctggacaaggtgggggacggggccacccagcctctggttcctagcaggagccaggaccttcctctcccggcaaacacacacataatctccacccccacactttccttccactcactcccactcactacttgaaatgcgcatgtataatgtcccatggtgagcccctggggttcagaagctggcccgactcctgagggacagaggagggggctgggactcctggtcctgggggggaggagggagctgggaacccaggttcctgagtctgaagaaggaggcgccgggagggccggactcctgggtccccgccttggcggcacctggcacgaagtttccctggagattatccttgtagctccaccagtcctcggggtcaggtgctggtccgatgtgagctgggaagagagcagcctgaatccctctccttggcatccccacctccaccctccctcgggggctcctcccgggaaccccaggtcttacctgctgcccccagtgcagcccagagtaccagcgctcgaggggcgctcagacgagctgcagcccccatccccaggaggcctccgagggacccctgcccaacgccctgcccccctctctcagctcctctgtcccctccttctgggaccctgtccctccaggacttccagctttcctctcctccccacagggagtcccagttccccaaatgccaaagcagccagggactgagatccgcccttcaaacccactcttcttctctctcccgtctctctgtgtctttcctctttcctctgctcttttcccggaaccctccagtctccctctagctcctgatcttcctactcctctcagccttctgctgcccccagggctacctcttggttcctaacccacacctcctctccgttctcttttcattaagctctcccaagccacctaactccaggtctccatcccgcatctcctcctcctcctccctctctcctttccagctcctgcctcttctcccctctctccttcttcacctcctcccgccctccctcagtgtcggcctccagcttcgtgctctccccacctcctcctctcctgcctcttctccctgtttcagtctctcttctctcttgtcccttcctccctcctccccctccctctctcctctcccgtggtgttatttaattttgttgttgggctgggggagcaggtgatctcatagcggcaaacactcctcgggttggcttggggtgggatgtgcgaaagggcaggattcggaaggaggtagggggctggtcctcggctcccagccgcgctggggccacgcgggcgggggtggccgggacacctggggccgggagcaggctgtttccatcctccgcagcaaggggaagggggggcgcttaaggtggagctgggagtggcttcggaagtctccatgctgggggccgccggccttggcggatgcagggtccccctgctcgctgggacccaggttggagccgccccagcgcccgcagccccccttccccgccccagggctccactgggtctctgcctggggctgccttaacggggccgggggatcccctaggagcctgaagtgcagtgagggctgctcgcctggagggggaggcagagacctggcgagggagagaggggcggggaggaggagccgggagggcagaggcggagagcgggaggtgaggacccacatctgcgtaggctggggaggggaagggagcctgagatggatacggagaggaagggcggagggacagaaggttagagaggcaagaacaaaccgccaggcaggagtgaggaggagggggaggaggtgaaggaggagggggaggagggagaggagggggagggagaggagggggaggagggagaggaggagggggagggagagaggaaggaatgaatgagagagatacagatagaggcagaaaaggagatacagagacgcagcgagacagacatggagacatagagacacacacttagagatagacagaaactcagagaccaagcagcagatggggtggggagagacaaaaagagagaaagagcgatccaaagacagagagagacaccacatttttgtatttggggagaagagatggggtcatgctatgttgctcaggctagtctcaaactcctgtcctcaagggatcctcccaccttggcctcccaaagcattgagattacaggcatgaacaaccatacccagcctcagagagaccacatattactgttgttgttgttatttattatttttcaccccgtctaatggtagtgaaactgctcattgtcttcttttattttcttttttgagacaagccttgcaatgtcacccaggctggagagcagtggtgcgatcatggcttgatccagcctcgacctcctgggcttaaacactccttccacctcagcctcccaaatagttgggactacaggcacatgccaccatgccaggctaatttttaaaaattattttttgtagagatgtagtcttgctatgatgcccaggctggtccggaacccctgggctcaagggatcctcctgccttggcctcccaaagtgctgggattacaggtgtgagccaccttgtccagcctgacaccaaacattaacgagacagagagacatagaaagagacacacatacatcagtacaggtggagagagacacagagagggagagacatagaaacacacacacagactgagcatggtggctcacacctgtaatcccagaactctgggaggtcaaggtggatggatcacttgaggccaggagactgagaccagcccggccaacatggccaaatgccatctctactaaatacataaaaacttagccaggcatggtggctcacgcctgtaatcccagcacttagggtggtcgaggtgggtggatcacctgaggtcaggagttcaagaccagcctgaccaaaatggtgcaaccccgtttctactaaaaaatacaaaaactagctgagcgtggtggcacacacctataatcccggctactcaggaggctgagacaggagaatcgcttgaaccgggtaggtggaggctacagtgagccgagatcccaacagtgcactccagcctgggcaacagagtgagac

SEQ ID NO: 1560084 - DNA, 4001 bp, Homo sapiens
aaagctgaggaacagagaggttaaggaacctgcacaaggtcacacagctcacaagcagcagatcccctcccaagggaggaaggcattcacctgctccctggaggtcatggggcaagtcagacacagtattgggatttgaattcagggctcctgactcccaagtcagaattcttcacactagcccccattcactcctttctcacctgcctccaatcttcctgccaaaggttagaatctctgtgcatggaaacagcattcaatggctttcaggcaggagggtcagtgccagcatgaccagttcctaaacactctgagaatgtccagttattgctgccccacctactcctgcacatacctgaagggttgggcttacatatacatggcatgttaacaaggaaattctactgacctctggtctctttagccttcccatctccctttatccctggagcctttccctcagcttctctttcatctgatcccctccttgcggtcccttatcaccctttttttcattctctctctcttttttttttttgagacacagtctcgctctgtcacccaagctggagtgcagtggcacgaactcggctcactgcaacctctgcctcccgggttcaagcgattctcctgcctcagcctcccgagtagctgggattacaggcgcctgccactgcacccggctaatttttgtatttctaatagagacagggtttcaccatcttggccaggctggtcttgacctcctgacctcgtgatccacctgctttggcctcccaaagggctgggatcacaggcgtgagccactgcctggccttttttattctctttttttggtgatcttaaagcctaacaatgaaaagtatgcccacatatctggacaagttggtatatatggaaaaataaaaaaattttaaaaagcatgcccacaggaatcaagcaaacccgaccctgccacttacttttttttaacgagacaaagtctcactttgttgcccaggctggagtgcagtggcataatcagggctcactgcagcctccacttcctgggctcaagcgatcctcctgcctcagccacctgagtagctgggactgcagatgcatgccaccatgctgagctatttttttgtatttttagtagagatggggtcttgtgtttcccaggctggtctcaaactcctggacataagtgatcctcccgcctctgcctcccaagatgctgcgattcaggcatgagccactatacttggccgaccctgccacttactaactgtgtaagcttaaggcaaatgacttcatgactcagagcttcactttcctcacctgtaaaatgggaatgaaagtcactgacctcatgagttgttctgaggtgtaaataacatcaggtgtgcaaatccctttgcacagggctgggcacagaacaatgacttaataagtggcagctattgttattaacgtcatcattatcatcaccaccaccaccatcatcaccaccattatcacaatgagcatccatagaaaagaatgatggtaatctcaacaatgacatcatcccactttcccttttcatttttcttccttttctctccttctctttgctcctgacttttgattttacccccacccatttatctcactggcttacatgaccccaccagggtccttggaatttcttataccttctcagctcctgctctatccacctgttcccctggttctgtggcaccatcatgtccccttctttgtcccacacccctgctccctttgccccgcccaccgcccttccccctcactccccacctcacccgctgtttctcagcaatgcctttcctcaagaagatgcaggcggggcccatggggaactgcatggaggggtggggtggagctcgcagggcaccagtctcaagatggcccctcctccctgctccctgtcggagctcagcctccttatcttctccagcactcctttgccacctcttcctgcctctcttggcttctccttcggtcccggtgtcttagagctgtgacagctgggctggaaatctctacccgggttggggagggaccagagctgtccctgcctccccatctggcttgaatgatatgggtggggaaatgcagagtcaggttctgtgacgcctttatccccagagtggaattggaaagtgcattttataaatggggattagaggctggatgtggtgctcatgtctgtagtcccagcgctttgggaggctgaggtgggaggattgcttgagcccaggagtttgagaccagctgagcaacatacggagaggctgtctttacaaaaaataaaaaaattagccgtgcatggtggcacacacctgtagtcccagctgctccaaaggcagagatgggaggattgcttgagcccaggagttcaaggctgcagtgagctatgattgtaccattgcactccaggctgcagtgaactacgattgcaccattgtactccagcctggctgacatagtgagaccctgtctcgaaaaaaagaaaaaaaaagaaaaaaaagaaaagaaaatggaggattagagcagacggcatcatttattcaatgttccaacaagcatgtgaagggtcactccaacactggcctctgggcagtgagatggagagctcagcacccctggcctcagggagttttcctgggtgagtcgggaatgtgtgagagtgagcaggatgcaagcatggacttcaggaagtgggcgtacacggtgactaagagcatggcatttgctcttcctctgttcatctctttccttctgtctttcctgaatgatttagagggaaaaagcaaggtgggggtgtcagggagggtgtgaagttatggtggtgtcaaagcccaaaggggttttgcgactccacactaggtagggttaggggaggagggggctgggggccatctggcgtggagagccagcattccagtggggtagtggggtgaggagaagtccacatagaggggcagcatgacccagggtgttggggctggagatggtggggataaatccacagatgggcagcttggtgtgcagtgttggaacatgagctgagtggggcgggggcatttatatgcaggcattgtctggggtggaggtttgcactgtaaggcaattaggaaggaggccacatagaggggatctggcatgggttgtcataacccaagcagagagagaaatgtccactcatgggaatagcatggtgtatggtgttgaagccagactaggctgggaaagacatccccacaggggtgaaatggcaaaggaaaagggaaattggctacacacagtgagtaaggggaatgggggccaggtctcctactgttggaaaagggagttactaagacagaaaggaggaaagtcgaatgagccctgtggtgttggactataactggaggcgttggtatgtcctcatggatctcaattatacatagagagataaaaataaacacatagtttcagtgtgtataggaacatttgtacacatattctctagctctctccactaagagaacatagaaacaatgatggcccatatgaatgagcaccactagcatccaaatcttgacttctatataccattctccaccaaatggaaccagagtgcctaggaaatttggctgattccatgtctagagcaaaaaaagaacaagatgagcctacaaacgtcctatgcttaaagcaagaaattgctcaaagtgttgtgagaacatgtggaaagaacacaggagtctgcttgaagaagctccattggccatactgggcagtttgagagtcaaaataaataatgatagtaacaaattatacaggaccacagaagaaaccaggagtccatactcagataaataaaaagctaagtgagaagtttgatatttacagagctcaaaatacctccctacaaaataccaatttcaaaggagttacgttatagtggagaaacgtggcaaacaccatcttagtcaatgaaagtggacatcatc

SEQ ID NO: 1560085 - DNA, 4001 bp, Homo sapiens
agcacccaggatccaagcgccaggctcgattttgaacccccctgaagtgagtccctctaccacccgccatgctcctcaaacagcaacccccggagaccacacagggcccagccccgtttagtctataactgcaaaaccacatacaaaagggataggggactcatcgctgagccccagggacccatccagcccgttcatttttacacagagggcagctggttggaactgtgcggagaagcggcacatctgggcatggcacagtggccagccagcctgggcagcagggtgtgtcccccctcctggaatctgggtcatgcttagataactgctagaaagcccgactaattacccacccttgcctgcctacatctcgatagatgttaagccctcctcaaggtttatttcaagcaggcagggatttaaagaaacacagaagatctgcattttgatagcatctccacagaagaaaatgtgggcttcacctttttcctctggatctttgattaaaaaaaaaaaaatttaaaaggcatttacctacctaagatgtccacatgggtgctgattctcctggtgttccctctcggctactcggggtaggaaaagctggacatggtgctctaaaatggacccaccacctcatttgctgttgccctgtctttcttactgaaagtgtccagatcaggtcttcccaggccaggggcccagataaagcaagtgggatctctttctcgacacccccaaagatgatgaggttccccaatcagcggttaaaggcaatgggacctgcacacatgagggaaacataagcgccccccagcccatcactatcctctccagataggaacagcggcccaccctggggtactcacttcggccagtgctggcttctcagtgtgaaggccacatggactccctcttgctcttagccctgggagcccccaagcgccctgccctaaaagtgcggcggccccccaccttggggaaagcagtagtggagaggctgtccagcttcccctgcgtggactccagtgagcgacggccaagaaaacccaaccaaggcccccatagttcccctgccctggccagaagcgcccaggcccgagcccgctccaagctcactccgtagaactccaaaccctccggacttggctcgaaagcccccaccaaggctcctgcacgaccccaggccccagatctcattctagagtcggtccttgggaaggatccactctccgctgcccaccccccagccccccacaaacccattcccaagcctccagggtagctcaacccagctcggggtggagagattctttcacactcctcccggtgccccctctcccagcccctggaagacccccctcctccccacctcccatcaacccccgggtctctctcccagcctggaagaggggaggcggagggaggagggggaggcgcagctgctgctggggttcgggcaaaaggatatggccattcggtgatctttttggcgtattttctcaccacgttgtcttcgctgaagaggaagagagaccggttaaccgtgaggcagttctgtcggacggggatggggttgtagagtgccatggtccgcgctctctgcgccattgactgcttgtacatcctttgcgccccgggctgcccgccctgccggctgcccccggctcctcgcccgcctccgctgcccacgaccaccccggcggctgccccggagcctcctcccccgtagcgggccggcatctcgtctccgaagcgggccattctgcaaagagcaaagggctccgggttacgctgcggcgaacgatgcggaagacgccgccgccgccgccgccgccgctgatgctgaggctgccggggctgggagcgcggcggctggagctacgactgcggagacgctccacggcccagcccatcgggcggcggcggctcggcgcctcgggtcgggggctcagaaggcggctgcccgggccgagccggggatagcagctcgggacatcttcctggctgaccccggagaaggaggggcgggaggagggtgcgggggcggggcgcgggggcccggggaggaggggggaggggagagagaagcgaggcaaaaaataaccgaggaaggaatccaggcaatccccagtccacccactccggaaaaaaaaaaaaagagacagttaaaaaaaaaaaatccacccaacgcacaccccctttaagacgcgaacggtttgcaaaggacgccccccccgggacgcagtggaagcttcaaattcctccgaggtccgggtcaggctggcatcttgcaaaaggagtgcgctcggcccattaaaaaaaaataaaaaataaaaaataaaaaaatatatatatatttaaaaataaagaaagacgaaacccaggtctgggtggggagggcaaaaaaaaaaaaaaaaaaaattaagtgcccttctgttttgctggagttcctagaccttaaaaatgctgaaagatctgtagctccaaaaataaaataaaataaaaacaaagaagatgaaagggaagggaaagaggagggaaggggagtaagacgctccagagggttcctaaggagtcttcacaccgcagggtccaggtttaaaaaaaaaaaaaaaaattttttttcttcctgaatcaccaacggctgcctcttctgctcccggaggaagtgtgagtgtgtatgtgcgcacagcgtttcgctcaatggtgcctcatcttggggttaaattgcagcagtgaaatcctgaaaattcccaacagggggaaaagagagagagagagaggtatgcgccctccgcttagccactcaatagctgcccctggatgcggcaatgcctctccaccctccaaatccctccacctcctccttctctaggttttgctaaaataagactggtgtggagggttgcgggtagaagaaggtaaagaggaaaaaaaaatgggcgcaaaggtctgaaccactggccagcaaacggaaaaggggagcaattgatgagtttaacagtagaaggacccacccagagtgtcgacacatgagggcccgcgaccaatcgtggaggctcgtggaggcgcgggggtaccgggctcagcggagtttgtgggggagagaggggagcgtcgcatggttgggaggcagggaggggggaattggggtgcttcctcctcccctgggaggaaagcctgttttccaccccgttccatttcggttgcagacagccggacgctccccagcatcttgcaaggagaaggcaggatggaggcaggaaaaaaacttaaaagacagaaaagagaaggggatttgtgtctagaggtgcgattcgtcagtctctaaacaaatttgctctgtttagcaaaagaccatttttgaaagtggagagagtggtttggggttacttctgtgaacgtttcaaatcacaaggactcctgcaagttggaattaaaggtttattctaccttggagaccccagaggtgacaagtctgaactcccaggaggaaataattaaccaggtcctagttggctggataggggttctgggtggtatagtttgcttgatactcacgtctctccagaaccactttgattacttcccattctgctttttgtgtggtgaaattcaataagcacaaagaaaaatgcataaaacataaaggtacggagttaagaaattggtctgaaatgaacactcatgaaatcaagtctagggctagaaatggaacatcaccacctctgcagaaccccctttgccaacacgcttacacagccccttattccagcaataatcgctacctgactttatggtattcatatcttgcttttttaaaaaaagtttgactaccttattatgcgttcctaaccaatacaattttactttgcttcttttgggcttttatataaatggaataatcatatagtatatattctacagtttcttgtttcttcggttcaacattatgtctttaagattcatctggcagggcacggtgtctgcgcctgtaa

SEQ ID NO: 1560086 - DNA, 4001 bp, Homo sapiens
gcagggaaggaacaaggtctgccctcgggtgttgggaggcgtctggtgagagcttggtttggtggaagcagtaggtggggaacaggcatagatcctgctttggggtgggcgtctgtctccccagggctcacaggatgggagcgcaagctgtctccaggctgggaagaggaagctgacaccaggaacccaggctgtctctccatgggcacaggctgtctgtgggcacatgcagagtgggcacgggctgtctccagggcacaggcacttccagagggtgcaggctgtctggggtgggcacaggctatctgaggacaccagctgtgtctggaatcacaggctgggtctggggacacaggcaagatttttctagtgacacaggctctctctagagctgtaggctggtctggggggacacagcgatgcctgggaacattggctgtgtgggggcagggactttgggggtcatagaatcatctgggaccatagcctggtgtggaggtgcaggctgatctgagggcacaggctggtgtaaggatgcaggctggtctgggggtatagactggtctaggggtgcatgttagtctgggggtggaaactgtagctggggacacaggctcatctgggggtacaggatagtcggggtacaggatggtcttggggcacaggctgtaggcgggggcacaagctctctttagaggtgcagaataggggtacagactcgtctgagggggtctcaggtcacagcctggtctgggggtacaggatggcctgggggcacagactccctgtaggcacattctggtcttggggtacagtctgtagcaggaaagcaagctctaaggcacaggttctctggcggtaggcccgtgagggacctgggccatatctgggggatccctctatctctcagcagtttctgagagcagaggacgaagtgggcactggcgcttactgcgaggcaagctgtctcctccgggctcaggcttttgtccctggggcgggttttctcctcggacacgggcccctctccctccctgtccgtgggacgcaagccctgcgctcggggcggcggctgctcacctccgggcagctccgcggggccgcaggtgtccctgtccacgggcacgtccgcctgccacagccgcttggtgcacgccttccacagccccaggtgggccgcttcgcacacggcgctgccgttggccttgtaggtgttgagctccacccagaactcggtgcccacggacagcaccgccagcgtggcgcccacggcggccagcagcagcgccagcttcaccttcccctcgcgctcgggcgtcagccccgacctgccctgcccgtgcgcccgccgccggcccgcggccccccgccgccggttctcctcttgcaggaagaagttggaccacatcatcttatggccggtggggtcgggaagggggaggaggcagagccggcgaagggcctcgaggggcgggagcgaggagcggcctggggtcttgaagggggtgagggactcagtttcccctgggtatgaaagagggagagccgagtcctgtctggaatctcaaatgcgaaagtcgagattgcttctggggttcagaagagaaaaatgatccccagggctggggaagcctctggggttcagaggagggtctaggttgccctcaagaacttggcaaagaagacggggcccagaggaaaaacaaggcccccaccctgaggtttagagatagaattcggcttcccaggagggagtccccccaagagctccagaggaatgagaactggtgcccgctgaagctccctgcagctccaaggggctgctttggggtccccgctggggggttaacaaaagggaaactggttttcctgagagatctgagcaccccactagggctaagagtttggggtacccaggaagggacctgaggtcctgtgtgtgtttggaggagatgtggccggggttcccttgggctcagagtttgagaacagaggacttggggaccctctgggattcggaaaaggaagacctggggtcccgggaagctcccaaggggaggtcggaattcaatccgggtctcaagagaggcagtaggaccccggcatccacagaaggagaagaacagagccctggctggggctcagaagaggactgggcctcgctggaattcaggaaaaggggataggggtctcccctgccattcagaaaagatccgaggtctctactgagcctggaaaaggggccggtggccggaagacagagtggagtccagaggcgggaggctacggggcctccccgagggctggggcagatgggaccgggggccctcctggggctcacactatggggctgtggtccgcactgcggctcggaaaaccaggactgagtccccccagggttcaaaggccaaccgcgacccgcaagagacgctgcgccccttcgggatcagtccgtctccctcccccgggctcccagggccttcccggtcgggttcgcgccaggctcagccccaggccagggccccccctcggggctcccacccccgactcccgagcaggggcccctctcgctctcctgcctcggccccgcgccgaccccagctccgcgctgcctccgaagcgtccggctgtgcccgccaccgccaccggcctggcctccgcccgcgcccggcctcgtccccacccgcccaccccccaccctccaccctccaccctcggggctatttcgggcttgacccgtaaataacacccgcacctgtcgcccggcgcctgttgccatagggatcccgggtgttttaaggggacgaggaaggggggagggaggccgcccggggaggaaggggccgagcctgatgggactttcatttcactaaggggcaagagcggcgccgagagtcccagctccgcagtctcccgggcagcaggagacgggcggggcagcaagtctgactggggttaccagggaggaggggcgggaggcagggccccgggtctcagggaggagggcctgaggccaggagtcttgggtccctaagggagaagaagcctcggtaccccacttctgagtggtagaggaagaaggcctgggtacccagaatcttggatctgagaggagaggaacctggtctcctaggtcctgggctcctgagtctgagggaggaggggctgggggcctgaactcctgggtctgagggaggaggggctggggtctggactcctgggtctgagggaggaggggctgggcctgggctcctgagtctgagggaggagggactggggcctggacttctgggtctgagggaggagggactggggcctgaactcctgggtctgaaggaggaggggctgggggcctggactcctgggtctgagggaggaggggctgggggcctggactcctgggtctgagggaggaggggttgggggcctgggctcctgggtctgagggaggaggggctgggggtctggactcctgggtctgagggaggaggggctggggcctggactcctgggtctgagggaggaggggctgggggcctgggctcctgagtctgagggaggaggggctgggggcctggacttctgggtctgagggaggagggactggggcctgaactcctgggtctgaaggaggaggggctgggggcctggactcctgggtctgagggaggaggggctgggggcctgggctcctgggtctgagggaggaggggctgggggcctgggctcctgggtctgagggaggaggggctgggggcctgggctcctgggtctgagggaggaaggcctgggcctggactcctgggtctgagggaggagggggcagggggcctggactcctggatctgagggaggaggggctgggcctggactcctgggtctgagggaggaggagggccggggagcctggactcctggtcaaggcgttggcagacccagagtcctgggcctcagggaggagactggggccagaaccctgggtcttgaaggatggaaggcct

SEQ ID NO: 1560087 - DNA, 4001 bp, Homo sapiens
gagccaccatgcctggcccattctgccttctttcaagcctcccctccttcccttggaccccaccctttccctagtcctgccccctcccaggactccacgactcggctgtgatcttgctgtcttgtgcctaggtgcccccacatcccctcactcagaatattctccgtgttttccgtcaccaaattgatctccggttcaagaaaatattctgaggccacacagcgacctttctcccgacctggggggaagagaaacagacagggctggatgagaggctcctaagctctagagaggctgggggtgggggcaggacagatagaggggagaccccaggatgggggagcaaggcctaacccaagggttacgagctgtactactccaggggtgttgggaaagcgggtgggtggatgtctgtctgggattcctctttcttttctttttctttttttcttttttttttttttgagatggagtctcactctgttgcccaggctggagtgcagtggcacgatctcggctcaccacaacctctacctcccaggttcaagtgattctcctgcctcagcctcctgagtagctgggactacaggcatgcgccactatgcctggctaatttctgtatttttagtagagacggggtttcaccatgttggccagactggtctcaaactcctgaccttgtgatccacctgccttggccccccaaagtgctgggattacaggcataagccattgcacctggcctggaactcctctttctaactgccctagagactcctgcttgaaggaggacaaggctggaactctaggtcttaagcaacaaaggggctgtagatcagaacttgtggtccctaaagaggacgaggtctggggagccaggattcttacaatgaattggtctttgtggtccctgggaggtatagattttctttttttttttttttttttttttaagagactgggttttgctctgtcacccaggttggagtacagcagcaccgtcatagctcactgcagcctcgaactcctggacacaagcaatcttcccacctcagcctcctgaataactggaactacaggtgcatgccagcagtcagagctagggagagtgagatggagtctcactctgtctcctaggctggagcgcagtggcagtggtgtgatttcagctcactgcaacctccacctcccgtgttcaagtgattctcctgcctcagcctcccaagtagctgggattacaggggtgcaccaccacatacagctaatttttgtatttttagtagagacggggtttcaccatgtcggccaggctggtctcaaactcctgagctcaagggatactcctgccttggcctcccaaagtgctgggattacaggcatgagccaccgcgcccgtcccatgcatttttttttttttaatcttgcccattcagcactgaaattgtgcaggggacaagttctaaacctagactacaaactttaaaggaaggctccagaattccttaggggttaggggcctggagcattggggctcctagatccaggaataaagggctagtcactggggctccacgtagaaatttgaacttccaggagagaatcaggatccgtttctggatttctggaactcaagggatgggactatggctaagactctcagaccccaggcaaggcagaaactgttgagtggaagacgggtgagggctgtacctgcaaagaagcagactcgccagaggccggcgtgcagggccatcttgacctcggtggtctggttctgcggtagcactgtgccttcttccatgtacagccagtagtcagtgctgaccgcgatgcctaccaggagcaggccacacgcaccaaacacgctgctcagcagggtcagggcgcggctgctgcagtgactcatcctcagaggcagggggcgccctgcggggcctgtggaagggaagctacagtgcagagctccatgggaccgaccagagtgcttgaccccatgcagcaacccgggatgctgggccctagccagagacactgactcccaaatcgaaatctcagatctgacctccgtggcctgacccatgaccccaaccctagagtctgaccagagacaccaactgttgagcctcagcctcagggctgggctccccaaacctgctgcctgtggtctagctccagatccagatccccaaccccagaattagatttctaatcacaactttcagcccaggcccagagattgaatcttggctccaaccgtgtttggacctgggtcccaaatactgtgactccgagcagaaattctaatttgagcttcttaaccccagaaccaggtccccctgccaaaacctaacctcacctgctgacctgagaccctaatttagaaatcagatgccaccagagtccctaaccttgagtgtggatcagtgactcagaaactattaggcagatcaatgatttcagctctaggacctggcatcctgcagccctgtctctgtgtgacgatcgaagcccccggttgtgaacaccagactccaacaaggatcaataacctcaactctgagccaggacctagatcccagagcacagggcattgggcttgaaccctggatgctctacaacttgagctggccagaaactctaacccaggctacccagtcttaactccatgccctaatctgatgccctgatacattttcttgcaccctgtctctgaactacatccagaaattcccaaagtgggtcactaaccaaggatctctaaccccataccagggcttcacacccttgacctcagccctatctaagactttgagcagaggcccccactgaagtttacactcaagatttgtatcttgagcctaacacccaattctaacaccaagaacttgacccatgaccttctaactctgatcctgtgccttgacctcatttgataccccaatttaagatgacatcacacatgacatcctcccatcctccgcctggcggctcaggggtttgaccgcgagctgcctggtcctctcgcagccctgtgggttcggaaacgggcaccatcaccctggccaccctggctgcctccatcccaggtagccgatctcagcttccccctttcgcccctctgactctcagctgggacctcgtcccttctccacattcttgcaccccgtcttaaaacccaatcttgctccaattcctcctcactccagaacctagctccagaaccctaattccaccctcccagatctaggcaggctcctggacctggaatcctggaacatcttcacagtctgctgagtcccagaacattggaacccagagacatagaaccagaatctcgattacagattccagaacatcaaaatcaggagctgagactgggtgaggtggctcacacctggaatcccagcactttgggaggctgaggtgggtggatcacttgaggtcaggagtttgagaccagcctggccaacatggtgaaaccttgtctctgctaaaaatacaaaaattagccgggcacggtggctcacacctataatcccagatactcaggaggctgaggcaggagaatagcttgaacctgagaggcaaggttgcagtgagccgagatagcaccattgcacttcagcctgggtgacagagtgagactccatctcaaaaaaaaaaatcatgaatgagctggaccccaccaccaccaccaatccagcatcctcatcagagcaccccagtcaaacaacggtctctcatccttccaactaggattcagtgccctgaactctaaaatctcaagcaggagtcccaaaaccccctcccctaacacacgatctgaaacttcctaccagaggttctggaccccggtttcccatgctgggacttccaatcacagatcttcttcaacatccagcatggagtcccgatttcataacattagactccaaacaggagatcccagttcatctctgtggcctccccaattccacttaggaacctagaaattccagcga

SEQ ID NO: 1560088 - DNA, 4001 bp, Homo sapiens
cccacctcataggattaaacgagataacgttcccggcttgtcgtgaacactcagcaaaacagaggaagaaggggcagaggaaatagagggggatgaaaaagagaagcaagagatttcaatcttttggccgaagggggcatcaggatggctggttccactccttcacgttgcagacaagggctgtgaggctggggtgcaggagggaagacagtggtcacacagcagggcagatatgcagcagaactggcacccaagactcctgcttcccagccccgcagctacttgatactcaggaaagaaatactgatgctaagagtgggagagagaaggggttggcacagcagagggcaggagtcttggagaagtggggaagtcgagagccagggagccgagctaggagagaagctgtgagagggagaacaggacagaggaaaagaaccaagtcgaagatccgaggaggtagcaggggcaggagcgagaagccttaacgtgaaggcctgaggcatcgagtcaggaagacgtcgaaggaggcatgagtggaggaagaggaagtggagtccactaaaggaaaaaggaggaaaggaccaggatgggaggttggagggcaccctggtgggagagacatgggtgggggcactgatgggaagagaaagatgaacaggaggagaagcacaaggcagaaaagagagaaagtcatgagtgagggcgagttaaggcacgaagtttcaggggagcagcagccaaagagaaggggaaagagacagaccggaagactgggccgtgaaagggggcgggagaggcaggggacttcagaggactgggggggaaatgtcgggagagagaagatgtcacggggcacgagggagaggaaatgaaggggcaggtggagcggaggagcagggtcaagatgaactgacgggaaagagggagaaagaggctgctgggtgcagtggctcatgcccttcatcccagcactttggaggccaaggcaggaggatctcttgagctcaggagctcgagaccagcctgggcaacaggagacctcatctctacaaataataaaaaaaattagctgggcacagtggctcatgcctgtggtcccagctactcaggaggcagaggtgggaggatggcttgagcctagggattcgaggctgcagtgagctgtgattgtgccaccgtactccagcctgggcgacagagtgagaccttgtcaaaaaaaaaaaaaaaaagagaaaaggcacagggcagagtggaagaaatgaaacaggaggagccccaggtactggagagagggaagatgcaggggtgtgatggggcagcgcaggagacacggactagggaaagataggataagggggttcagcggagaggcagaggggctgcagagggagcatgccgaggaattccgcagggtgccaggacgcagggaggagtgggaaggaggggagaggaggtcaggggcgcgagtgggaaggcgcagaagcccctctggcagaggaggaggggtgcccaagggggccccaggatcagggacaggcagccccgggaggctcagggtctctcggaggggagcggcgggggctgcggggagggccgcccgcaccctaccttccaggcagcagatcctccagaggcccgagtgcgtgaggccgccggggtccttcttctccgaggcgccgccgcccccgcggtggggggtcccgtcgtcgccgccggccgtgaggttggtggtgttgcagatgagggcgcgcgtgtagagccagtagtcagtgctgatggcgatggtcatgaggccgaaggcggcgaaggcgcccaccgtcgtcagcagcacctgcacccccttctcgcaccagaggccccgctcttcgttccagcgcttcagcgactccagtttgaccacgggcagccggggggccgtgggccaccaccggggcagcgggggcggggccgtgccggcggctgggggggggttcacagcgcaggcagaagcggggggcccggggccggcggggctggggaggggggcggcgaggaggaggctgcggccggggagggggtcagagcgcggccatggtcggcggctggtggagggcaaggagcgagatctcgcattagaggagaagaaggcacaggtacctcccccagtccccgcccccccccccccaaaatccctgcctcagctccagaaactccttccactcggggctccactgcttctctttctcaaaaataataataataataataataataataataattaataaataagatgaaatctctctccactcttgtcttctgcccaagaaagtcatcccaccatcccactaaccccactcggaggagtccccaccaccgctaataattaataaataagatgaaatctctctccactcctgtcttctgcccaagaaagtcgtcccaccatcccactaaccccactcggaggagtccccaccaccgctaataattaataaataagatgaaatctctctccactcctgtcttctgcccaagaaagtcgtcccaccatcccactaaccccactcggaggagtccccaccaccgctaataattaataaataagatgaaatctctctccactcctgtcttctgcccaagaaagtcgtcccaccatcccactaaccccactcggaggagtccccaccaccgctcacactcacagccctcgcccctagcccgcgccgcctccgccccagggggctccacgatcctcatcgcatgggaagccaccccccgccatgatgccaagccccacgccgccgcctcctccccaggagcccccgtcgcgttcttccttccttagcgacccccgccccatcaccatgcggcgcccaccagctctccccactcttcccctgcaagccccacctctccacccgctagaacccttccctgtcagcccaacttttccctgagcgtctccacaacttaagaagcccgagtagcaccacttccgtgggagtaacctccgcgagccccctccggtctggcttttgtcattccatcactccaaatggtcccccacagtttcctctccttaggaaaaaataaatctctcaacctctcttcaactaaaaaggaaaaattaaaagaagaagaaaaagaaaaagaaaatcccagctgaccctcacagtttgtgcaactcggaatcaccagccaccctcagtcagcctcctctccctggaagcccccttcctgcctcgggcagcctccaacacacctggaaatcacccgaggaccttaaaaattcggatgtttgagtcccacctgagaaagtccgacatggttggtctgcagtgtggcctgcgcatgtaagtttttaaaagctccctggggaattctaatgcacccaacatcagacccactggtttgcaagctgccccccccccgccatctccagcccattccctgtcacagcccccactgtctccccacaagccactcactccccaccccatactatgcctttactccaggaaaacccccaccctctcttttgctttagaagagttttctgaatcttcccaccccgccacccccccccccacaacttaaacgaactcatatcataaccatcgttttctcctccattaagaaaaatttcctccgtgagttccacggcattttctactcgcaagaatggcttcctccagaccccaaatgtctctccactcaggaccattccaatctctgccctgtactcccatagcagggggcacactgtaccacccacccgcccctctgcactcacagcagctcccactgcctccaaatcccctcctcgtagcccttcatcatcacacgggatcttcagcacactgtttcccccaacttgagatccccctaactcactttgaagcccactctctcttcaatgtaccaggaagcatcctccccaacttctctctcatcatatagaattcccttgactcacttcctcttgctccaccgctatagctcccaggttctcctct

SEQ ID NO: 1560089 - DNA, 4001 bp, Homo sapiens
cctcaggggtggttcaggggcctttaattttatttattagagacaaggtctactagacacagagtctactagagacaaggtctatatttttatttattagagacagagtctccctctgtcacacaggctggagtgcatgatcagagctcactgcagccttgacctcctgggctcaagccatcctctcgcctcagcctcctgagtagcggggactacaggcacacaccaccacgcccaggtaactctttacatttttttgtacagaggggtcttgctatgttgcccaggctggtcttgaactcctgggctcaggcaagcctcctgtctcagcctcccaaagtgttgggattacagatgtgagccactgcgctcagtcacgtttaggggtctttgtacacagagaactgccaaatattttgttaaatgctctacccattaagctcatgtcaaaaaaatctaaactatgttgaaaccaatcattgcagagcccttaaatattggccacaagttcaactgaattttcgtgaacattaattctaattacatatctagagtggcaaattattgtgaataattccaataccagaaaatggtaggcgaaaaaacacaaagatgacattaacaagacttatgggcaggcgcggtggctcacgcctgtaatcccagcactttgggaggccgaggcgggcagatcacttgaggccaggagttcaagacctgcctggccaatatggagaaatcccagctctacgaaaaaattcaaaaattagctgggtgtggcaacaagcacctgtaaccccagctaccggggaggctgaggctgaagaatcgcttgaacccaggaggcagaggtaacagccgagatcgtgccactgcaccccagcctgggcgacagagcaagactccgtctcaaaaacaaacaaacaaaaaaaccaacaaccgatgagtgaacttggcccagagcggggcaagactggcctgagtgtcagccacgaaggggctgagccagcactggggccccggtctgggaatcagtccctgtccccattttggtttctctgtactggagccggctcaaggcaaatccgaccaagtgccccatctccagaagaaaaggaccatggggaagctgagattcaggcactaggaatcagctgtgagtcctgccagctgacaccgagtctttttccctcccacagcccacctccattagcaaatgttgtctcctctacttccagaatccctctgaaatctacgcactttgcccgctgtggttgactacagcctccctcccatcgagactgccatcatctactgtctggacaattgtgccgtcctactctgatgccgctcctgcctaccccgctccatcccttctccacctcaaagccagaaagtatgcagagttaagtcagtccacgtcactcccctacccaaactcctctcaagactctccatttccctccgactaatagccaagatctaatgtgctgagcacacagggctcgatatgatatgatctgatctctcgttacctccccgccgcctcgctcacccggctccgggctgtccctccaaccgcccggtcccctgcctggaacgcctctcgccttccttccgctgccaggttaattccaaccggtggtcaattgtccccttctctaggaagccctccccgagtaagtcgggggtttcccggttccccgggatctccaaccctcggtcgggcgctcctgaggtaggagccggatccccagcgctgctcccgcagcgaccccacctgcgctcccggctccgccgcctccgtctgcgccgtccctcgtcctcccggcgccgtcggtttcgccgcccatggctcctgctccgacttcggctcccgctctgactctgccgccttcggccccggcgacccgcggaccgcgagcgcgagcgtgtgtcccgacccatcggctgggccagtggccgcggcaccaacaccaatagccgaagcctgcgctgggggccttcctcgcccacggcgctctccaggctgccccgtttgcgcctgagccgggaaagagcaacccatcccgtcgccccagcccgcaaggactccgacaccccagactttccactacgtctgcaaatgtggaccgcgtgattgactccagtgggattgttgcctccagggtggcggagtctcctttcaggcagtgctggaggcagccctaggcgggtccccacgcctcagggggcctgagaaactgtgggcggggcaagggcaaactaggaaccttgtgcagggaggggcctgccgaggcgagaccaataagaagcgggtctaggtcggaagtagcgcttcattggcgtggccaggggcgtggccgaggagaggcgtgtccggggagcgaggtccccgaaaggcgaggaaccgggaaggtgttaggtgccaggcagctccagagggcagagggcgggcgcggggacagaaactgaaaagccttcttatgagagtcatcgttatgctccaccacctgccaatgaacacctatgtattttgggagttaagctttaaaaaaaaacaaaaactttgataactccctgtattcccccatcaacccattttagagacggggaaactgaggctcagagagggaaagtcactcttaacacttgccttctcaacccaggctgcccagctttgtggtgtgggtgctggggacccgtgggagggttgtgagcagggtttgggggacttgctgttgaaacaagtttggcgtgggaggacggacttcaggggcaaggctggaggccagagacctagaagacgctgatgtcccatcctgagctcccctagcccatggtggctgctaccaccaccccgtgcagttctaaccactcggggctgggaaggcctgtttatggaggatgatagtaatttaagctaacttttaaaatatttatcttggccgggcacggtggctcacgcctgtaaccccagcactttgagaggccgaggcgggcggatcacctgaggtcgggagttcaagaccagcctggccaatatggtgaaaccctatctctactaaataatacaaaaattagccgggtgtggtggcatgcacctgtgatcccagctacttgggaggttgaggcagggagaattgcttgaacctgggaggcggaggtcgcagtgagccgagatcgtgccactgcgctatggcctcggcgatagagcaagactccgtctcaaaaaaaaaaagaaaattaaaatgtttatcttgagtggggtgcagtggctcatgcctgtaatcccaacactttgggaggccgtggcaggtggatcttgaggtcaggagttcgagaccagcctgtccaacatggcgaaaccccgtctctactaaaaatacaaaaattagctgggcatggtggcatgcttgtaattccagctactcgggaggctgaggcagaagaatcgcttgaacccaggaggcagaggttcctgtgagttgagatcgcatcattgcactccaacctgggcgacagagcaagtccccgtctcaaataaataaataaataaataaataaataaataaaacgtttatcttggaatacaacttcataacatccccgtaaacgctggctttgtatgctttgcttggtgttaaggcaaggatggaaccttacagaggaagaagagaccatctcctgccgctctagatgatgaccttgccggtcctgagatgtgggttgtcatgctgatgggatggcccaaaacaaagcgaaggcctgaccctgtgcttcccaaaattcagatgcatccttgcagcacattaagagatcacttgcatgggccgggcgcggtggctcagtcctgtaatcccagcactttgagaggccaaggtgggtggatcacctgagttcaggagttcgagaccagccttgtcaacatggtgaaaccccacctctactaaaaatacaaaatttagccgggtgtagtgccaggcacctgtagtcccagc

SEQ ID NO: 1560090 - DNA, 4001 bp, Homo sapiens
tagcatgctaacaccatcacggttctagaactttaaaggtgtcaagattctaaagccttctggattctagaatcctgtagatgtcagcattctaaagtaccatcaggttctttatttactggattcattagttccaggattctatgagcctggtgtttagcctaaaaaataaagataaattaaaattgatggaaatgtcactgaggtaccaaagttctcatctgggaaattgtggcatgtctgttgtaaagaaaggaggtaatgatgcaagttctaaagcagtcacagaagactagagaagaaagaaagacagtgagaggacagctttgcccctcatcctggccgaggtgaggatggctctgcctcaaaccctggagtggggaacatgtaaccgcactcaacttgccagaaaccccttcacggtctgagctggcgttccctttcatgtcactgagttcaacatcctcactttacagaaagagaaacagaagcctggagagaggaaggtgtttaccattggctgcgatggcaaatggcaagagccaagatttaagcccaggccgccagccccatgccacctggttataactcctctcaccaatctctgccgaacacccagccctcctgcttctgcctagccaccttccaatcctctgttccttccaaaagtggccttatccaccagggaggggtgacccgtggcaggttcaagacttacacagtgtgagagtgtgtgtgggtgacatttcctgaccttgtccccattctcagggtcacccaacctcgggggtctccagcttctcacagtgtgtgatgagggtatgtggatggctccctggatgtcctggacaggggcttctctgtgagtcaagcctgggtgtgtgaatgggtgagcagggtttggagaggcattcgctgaatccacgtgtgtgcctacacgccaaggtcccccattctcacttccccacacacatgcacacagatgttcccctccagggctctttagaatgccctgcctgactgaattcctcttcaggggcacagagggatagagagagggaggaaggtaggatgggaatgggagatcccgggatggaggctgtaagcgtagagagaggaggcacagcagaaagacagggatggagatagtgggacagagaagggggaaagagacaggtgacagaaagggttagagaaacgagtgacagaaagacaggggacagagacaaggggatggggcagataggggacagagaaaaagggacagaaaaacaagggtgacagcgagacagagacagggaccaagaataggggcagagagggagggcagaaatccgggggaaagagaatagacaggatgatggaggggacagagtgacccaggaaaaggggacagagaccaggggacagaggtaggggacaaagacagaatagatgaggaacaccgaggcaagaagagagggagacagacagaaggagggacaggacttcgagactgagggatagaggacaagggtagggggacgaggagccagacgggggggttcagagacgggcggacagagggacgcagagactggacagaaggacagcgggaccggcctggggagggcggacttgtgtgtgtaggggggtctcgggccctttgtccccgccgggatccagcctgcgcgggtgggggggctgcggcacggcggccgggccccgcgccccctcccccgctcgtcgctcccggctcccggcccgcgctgcgctttgtcccggggagggggcccggcccggccccgcgcgcattgttcggcctctgcggccccgaggctgccgggctgtcaccacagcgcgccccccgccccagcccggccggccgaccccggcccccgaccctacctggccccgccgcggccgcccacagcagcagcagcggccactggaagcgccgggcccggcccatggtgccgccgccgccgccgccgccgctcgctcccggcccggcacctgcaccgcccgcgccgcccgccccgccccccgcgccccgccccctgcccgcccgggggcggggcgccgaggccggggcggggccggggaggggagggggagacggaggagaggcccggagacaatcggggggacggcacggtgggggaacggtgcggggtgcgaaagctggagaggagaggggtgaggagggcgggaaggggtgcgcgggagggcgacagcggcgtgggagcaggtgggggatctcggtgagcgcgggaaatggagggtgttgggtgagggtgctgcgtgcgggcccaggtgctgcgcgcgagggtgcggagttgctggcatgcagggtgcttgcgctgcgcggaggggagggtggcagggtgttgctggaggctgtgcgagggtgggggcgcgggcgtcgtggggtgcggtgtgtgcgaagggagagcgtggccagcgtgacgggggagcgtaagggagggagtgcgacgtgggaaaggtgagtgtgagaggcgtgctgcgggcaggtgggtgtctggagtctagcgagaggctgtgagctgagccaccgggacaggggaggctgcagctggaggtccggagggtccggaggtcgaggcaggtcaaggatctcccagggcagggcgaggctggggctcaggagtggggtggggtcagttccctccctccctctctcctgtcctgacctgaaaaccccgtgtttccgcgtcattctccgggaggggccccctgaaagtgaactaactggaaggaagcctgaatcctgggtcccaggagggagaggctcctgtgaacaccttccaagccctggcgtcccctctcctccctgctgtctccctgccccagcctctctccctctctctgcatgtatttgcctctgcccttcctctctccccatctttgagggtgactcacccctccagacttaggtcccttctccctcctgggagtgggtttccctgagcccacttctgtgacaccctgtagacctgatgcgggatcattacctatgggacccagaaagagtgagaaaccatggaaagaaggcctcgacctctctcatgcccatttgtcaggcaaactgaggtccagaagtgccaattatgaacatctttccttcccccctcccccctccccgcccagacggagtctcgctctgttgcccaggctggagtgcagtggcacgatctcgactcactgcaacctctgcctcccaggttccagtgattctcctgcctcagcctcccgagtagctgagattacaggcgcccgccaccatgcctagctaatttttatatttttagtagagacggagttttgccatgctggccaggctggtcttgaactccttacctcaggtgatccatctgtctggcctcccaaagtgctggattacaggcgtgagccaccatgcctggctgaaaatccttactttttattccgactaaaaaattttacatccagtcccacaagggacttcagcttcacacaccctttctgtcctcagtacccagctcccagtatcctttctgacctcaaaaccatagctaccatcaacccttgtgtcccaggaccatggctcccagtgtcttctctgtcctcagggtccaagctcccatcaactcctgtgtcctcaggaccacggctcccagcatcctctctgtccttcaggtccaagctcccatcaacccctgtgaagcaggaccatggctcccagcatcctctctgtcctcagggtccaagctcctatcaactcctgtgtccccaggacgatggctccagcaatcctctctgtcctgagagcccaagcttctaactgcccctgtgtccccagatccatagccctgagcaacttccttctttttcagtcctcagcttcccagcttctgtagacttgggaagagatagtctctaatcctctttccagggctcacattctgtgacttttgctagatgggagaggaatgtttgatctgcctttggaatactggtcc

SEQ ID NO: 1560091 - DNA, 4001 bp, Homo sapiens
caggttctgctgggggaaaatggggtagcggcaagaggagccatcaggtctgtgtcagcaagtatgagatctgatacacagcagcggctgcctgttctccccagccttgccagggaggatggctgcacacggttcccaggctcagcctggtggggctgtgggtgttgtgggtggcagggagtaggaaagaactagtctgctggttttctctcaaagccctgtgaattaacagacacgctcagcgagggccctgaatggaacaagtggccctcaggccgatcaaggggtctccccagaggcactctctgatcaagctctgcagcccccaccccgagggcacgggaataggcatctgattgtcactgacgccacactgtactgcactgtcatttggcacaagtgacgaggtgcagcatggtgcgtggggctggggatcatgagaaaaccggcgctcctgctgggaaaaggcagtgctcttggcctgaaaagggcagcgacagagtgaggcttctaggcttgaaaaagctggctcattcgaggcaccccaaactttgatctcccatccccatttcatgaggcttcagtgcgcaataggggcccgaacagctccgcccacctgctcccactgccccggtgtcttccacccagccgcgttcttcctgaggaaggaggacggtagaaaagcttcctccgggccctgcagcccactccccatccacactgagccgtctttgtcctggcctgtccctggagactggcagggtgctacccacatccacccccaaacctaggcccccctgactgccattcattttctccttccacctcacctcccaaccacccaagcccaagtcctcccccacccctcaccttggaaatccatcttctcttggacccaaacacaacactcccaccccgttaaaaaaattctgtctttctagagcaacagtcttaacccactagtaacctcggaaccttttctagctacttccaaattaaccccaagggtccctgtcccccgactactggcgagccccactctcaccatcccttttcaccacctccacgaccctgatccttctccgtcccggaagccttcaagagtatcttctaatctccgctgccacccaccccaggctcttcctcccataagcttgcacctcaccctcctcctcctctgcagtgctgggctctggagaccaccctcccccaccctcccccaccctcgggagtctcatctgtagaagtgaccgcccatccttgaccctctcctctgctccacaggagcccaggggtcgcccctccccgcccgggcccagctaccctccaccaccccatccaggagcagcccagcctcccttcgtcccccgttccccgcatcctctcaggaccaaacgccttcatcagggcccgaatagctcccctccccagcccatctttcttatttcgtcccctggggtccaaacacctccatcctgaaacccaacgccccatcctgggtccaaaatccttttgaggggtcccactgagggtcccgatcctccatccggggttcaaatgtcccctttaggggctcagatacccatttgtggacttaaacatcccatttggtgctaaagtcgcttctggaaacctctggtgatccagacgtcccgctctgggttcaacagcccccgacaacgcgggtagaaaagggtcccgaggctctcgccgggcccggacgccccccactctgggctctgtcgccccctcaggggtcctgccccgttaagcccgcctcagagcccgcagcctcggcgaccccccagcctcactcaccatggcgaggcccggggtgtccggagcacggggatcaaggttcctccggcggcggcagcagctgcagcagttccagctccgccgcgcgtccgcgcctccacactcactgcccgcagcgcgcgccgccgccgccgccgcctcccgccccaacggtccctcaacggccgccgcgcgcgccccgcctcgctcggccccgccccacccggcccgcgcgccgccgcactgcggctcccacggatccctccgcgccccgctccacacctacgggcccgcgaatctctcgtccccaccctgcacaggaattgggtttgccgccgggcgcgcgcgcgctcgctcccgtcgccggactactttccctcgccgcgcgccccgcctcccgggcccacttcactttcttcggcggaggggcacagctcggcggtgcgtgacgcgtccctctgtgagccgcgtcactattgggcctggcccatggcggaaatgagagcttggcgcccattggtccgaccttccctgcaatgcgtcaaactggggcgagccactgcaaggtggtggtgggtaagtctgaactctgtggccgcgtggggctttgaggagtaacgaggcgaagggggaaacggcgtcgccgttagagaagcaaatacgtcgtttctgtggccaggaggtggtaaaaaggctggcgacaaatgcagaagggctttctcggctctcccctttaaccgacggacgatggttcaatccaaaatgctagggtttagaagctccgcccctaactgggcctttggaggtggcggggtctccaaggtgccacctaacgctcagaggttccgccctccgtggtcttgtctctgcgtcctaagacgcactcagccggtgggcgggacccctgggcccgcttcattcttgatccgctcagggtctgtgaaattaggaccatcccaggacagcctgtgggaacggggtattcattcagtcattcgtgctataagcatcaattaggcgcctgctgtatgcagggacctgagcttggctgggctggggagaccatactccccaaccagcctctccagacagacgacctctttccttattccagtgttccagccataggaggaaaaagaactgaaactttgtttataggagctcagaaaatgatcacccctgccccctcccccgtttaggataggagctgacagtctcctgcgtgtcccctccccaccatgttgatggttaagagatgggcaaacgagtcaggctggaccaatcattatgctccacctggaacagaatggagactgaaccaatgagagtccttccctggggtttggatctgcagcctgggcacaagaagccttttccttttgggtgggtccttcccatagattctgactatggtcattttcccactctgccccctatcttgaggaacaaagtgtctagagaagaagagaaaaataaaactgacacagtggagaggtaaagaagatggccgggcgcggtggctcatgcctttaatcctaacacttgttactcagtctcaaatctcatgttaaaatgtgatcaccaatgttggaggtggggcctggtgggaggtgtttgggtcataggggtggatccctcatgaatgacttggtgctgtcctcacggtaacaagtgagttcttattctgttagttcacacaagatctgtattttttttgagacggagtcttgctctgtcacataggctagagtgcagtggcatgatcttggctcactacaacctccgcctcccaggtttaagcgattctcctgcctcagcctcccaagtagttgggactacaggcacccaccactacacttggctaatttttgtatttttagtaaagacagggtttcaccatgttggccaggctggtctcaaactcttgagctcaagtgatccgcctgccttggcctcccaaagtgctgtaatcacaagaatacaaccatcaggagtgcctcaagggagaaatatcctctgagaatagccacagacaaagtggggaggtgggactaccatccccagccctggaaactctctctactctataacttggccaaaggagatgccaaatcagagtggctgttcgttagcaccatgctgtgggaggtttcttccatagctcccctgggaatgaacccctagccagctttcctatgctactg

SEQ ID NO: 1560092 - DNA, 4001 bp, Homo sapiens
atcccagtcctcgggcttcttagcatcagggtcagggatatgctcgggcttgtcccagtcctggggggtagatgaagagatcagagttggcccagatgtcttccacaccctccaatgtggagagcagagcccctgcccaaacaccaacctcaggcttggagtctgtgggatcatcgatcttggcccgctcatcccagtcttccggttttgaagcatcaggatcctttatcttcttgggtggcaggaagtcccaatcgtcttccaaggagccggactccacctggctgttgtcaatcttcacctcataggtgttgtctggccgcacaatcagtgtgtacaggtgtgtaaactcatcatcctgaagaaggaagaaggtgagcgggggccaccccccaatgaggctgacctctgaatctccccatgacagccatttgccaccacccccaggcacaccttgcaacggatgtccttgttgatcagcacgttcttgcccttgtagttgaagatgacatgaaccttcttggtgccagggccacagatgtcgggacctaggtgtgaagcagatccagttaagagtcagagactacccatcatctcgaggctctcacccctctttataaaaggaagacctggttcttcaactcgggtctgtcaaggctgagaagagaaactcagaccctgattctgtcctgaatgggctgtgggtggagccttaagtttaaaggagaaaaaaaaaaaatcagtgctctagaactcaaaatcctcattagtaagattgggaaataactatatacaaacacgcaaattaaattaacagcctagatctgcgatcataatgcaataaattgttgctgggacttattcttttagctccccttccaaaaaaaatcattattaagaaagtcaatggggtctgggtctccctctaactaatgggacagagatcagcaccaggaagcaggccctcaccaaacatgatgttgtattctgagtctccgtgcatgtctgtctggtccaaactattaggaaacagcttcacatagccgcccccacagtcgatgttctgctcatgtttcaccgtgaactgcaccaccagcgtctggcctttgttgctgaaaggctcgaaactggccgacagagcataaaagcgtgcatcctggcttgtctgcaaacctgagacgggacggtagtgaggtcaccgttgggccttgactcgcgaggaccctcgacttagagaatagagaagactcccccacttcctccacctgtcctcctccaaggggactgtcccggctgtgtgtgtacagacaaggacttctgccaggaagtcctcccggatctgagcacccactcctaggctcttacctttatctttctcctcgtcaccgtagaacttgccggaactgagaacgaatttgccaaaatctgacttgtgtttggattcgatccagcgggaagtccacccgtctaagtgggggattagaggggtaggtcagagcggctgtgctaatccccccccacaccaaacatctgccgagagccacaagctgctggggacaggaaaggagatccccgacactccccattccaacctctagtttgacacgtcgggtgccttcagagatcctcgggctaaccctaactcccgccgcgggaggccgctacgccctccgcgctccccagggacgcagaagagaaatcgcccgcggctctagtcccgggaggccaccgtgttggacctctaaacggtaattacgggcgacaacgcagatccaggatcgggggccggccgcgtcgtcggggcggcctcgaggcgggaccaggcgttacctccgtccagaaactgctccttgaagtagacggcaggctcggcgacggccaggccgaggaggccgagcagcagcggcacggatagcagcatggcgggccgagggggcggcaacgcgcgggccctttaaaacgaccctccggcagcggctctgcagtacggacggacgccgccgcccgccttgcacttttatacccacccgcctctcaaaccaacctgacccagcccttgggcccgcccctgccactttgtcattggtctatgcccatggccgtctttttccattggaccttcgtcggttcactatgttaggctgcgcctcggaacgctgggttcccagatggccgatttctattggcctcaccaccgaccaatgatggtcgaccacgcgtgggggggacgcccactggtggggtgggggccgcgagcacctcaggccaggtcatgtgaccagacctgaacccaaccccgccctcgtccgcgcgcgtcgttgcccatctgggcgtttaaagaaaccgcgggagcgcagctgtctccacgcgggaccgggaccctgccctcagcttctctccctcccattccctctaggtggaggggctgggcaaggctttcttagccagctcttatcttgcatttgagaaccagcaccccactgctgctcccccacccctgcctgggatgggagagagctcacggattggggcccttggggcttcgctgcaccccggtgctacagtcacgcgggccggtgggaagaatgccagccctctcctccttctgcccctagagccctggcagcctatcggactgctgctgtgtgaccggggcaagtcacttaagctctctgaagtgacagacgttcctgagcagacagagggggcgaccctggccagatgctacccagcagaaatgcttttaacgtttttaaagctgtcctgggacaagaggggaggaaggcttaacgatgtgactgtgacttctggagtggggatagggttattacccagattgcagccgcccctttaccctcctctcaaccggtaaatgaagggggtcgctgtctgtggtctcccacaaacggcctggcttttgcaattaaacggctataggcaggcgagagggcagggggttccgtttggggagggaaaaaagacacagatggtagggacgataagatgctagggagatgggcaggacccaccccccgaccccagtctagagtcttcttcagaagccagaggcacgtgactggcaccagtaccctgcccccacgctgtagaaaggaggaaggagagctgggggttttccaaactctgggcaaataagccctggacctgggagcgcgggagtggactatggaaggagggaatgagggggatccaggaaagagggtggggagggggtgcttcctggctaatggttgtgactcagaaaagagaggaaggaaaaaatgaaaaggaaaataaagtggagtggggggaatgacttggcaagggtctctggttaaaaaaaaaaaaaagaaatggtggccgggcgcagtggctcacgcctgtaaacccagcacttggggaggccgaggcgggcagatcattttaggtcagttcgagaccagcctggccaacaaggtgaaaacccatctccactaaaaataaaaataaataaataaataaaaattagccaggcgtggtggcgggtgcctctaatcccagtactcgggaggctgaggtgggagaatcgcttgaacctgggagccagagattgcagtgagccaagatcacgccactccactccagcccaccagcccaggtgacagagcaagactccatctcgaaaaaaagacgggggagaatgaactgggaagttggggttctaccacttcctctaggtagtattcagtattgcctagtctggtcccccccatgaggatcccggggaccatcccaggcctcttgctgacccttcctcctgttcctgtgtcaggcacctgtgggcttggcgcttcctacttgaggttagacactgcctgttttgttcacttcgcatcctccagtgtcacctgcagcacctggcacagaacaggcttaaaaagtacttgctgcatgatagaagagaggaaggaaggactcttgtggaaattaactaaaaacacacggggcacagtggctcacgcctg

SEQ ID NO: 1560093 - DNA, 4001 bp, Homo sapiens
tgggattatagttgtgcgccaccacacttggctaacttttttgtatttttgtggagacagggtttcaccatggtgaccaggctggtctcaaactcctgacttcaagtaatccgcctgccttggcctcccaacatgctgggattacaggcgtgagccaccgtgcctgaccatatttttctttttttttgagatggagtctcactctgtcactgaggctggagtgcaggggcatgatctctgctcactgcaacctctgcctcccgggttcaagtgattcttctgcctcagcctcccgagtagctgggactacaggcatgagccaccacacccagctaatttttgtatttttagtagagacagggtgtcaccgtattggccagactggttttgaactcctgacctcatgatccgctcgcctaaggcctcccaaagtgctgggattacaggcatgagccaccgcgcctggcctatttttctttttaatacgaaaattaaaatgagaaaaagtacccactaaccttttccttctgaggggcatggcccttgatcctcaaatgcacttgactagtgtctattaagaggggcaattttggtaatgcctactaataacacattcatataaatataatccaaagaaggttaaataccattgcatatttgacagtgcttcaagtatgattttattataccaaataagctgaatatgtctccttggacttcaggggacctaataccaataaaagtaataataatgataataggccaagcaccatggctcacgcctataatcccagcactttaggaggccgaggcaggtggattacttaaggccaggagtttgagtccagcctgggcaatgtggtgaaactctgtctctaaaaaaattagcagggcatggtggcgcacgcttgtaatcgcagctcctcagaagcctgaagcaagagaatcacttgaacccgggagacggaggtttgagtgagccaagatcgtgccactgcactctagcctaggcgacagagcgagactcctactaccaaaaaaaaaaaaaaaaaaaaaaaggaatctttggcaataaagaaaggagagaggaggctggatgttgtggctcatgcctgtaatcccagcactttgggaggccaaggtgggtggatcatgaggtcaggagttcgagaccagcctggccaacgtggaccctgtctctactaaaagtacaaaaattagccggtcatggtggcgcgcgcctgtagtctcagctactcgggaggctgaggcaggagaattgcttgaacccgggaggtggaagttgcagtgagccgaaatcgcgccactgcactccagcctgggcaacagagcaaggctccgtctcaaaaaaaaaaaaaaaaaaaaaggagagaagaaacaaaaaaacaaggaaaggagccccttaagttctacctttgccttaatgtcttcatctgtaaaacgggaataaaagcgttttggctgtgccacaactacctagagaggttgctatggaaatgtaacattaggctcaatttggtcctgattctacactaacctttatctttctctttatgaccataaaacttgcccgacgaaagtctaaaatgcccaaatcgggagtcattggtggactgcaaccatcggtttctccaatgctctgtggggaaggggaaataacaccggttagaggtgataatggttaatttgggctaagggaagggtgaaggggaccctcgaggattcgagggttcgctgccgtggaccccgtggcgactctggccagccttagggggcggagatgggggagcttacacctccgccaccacgggcgtggccccttcacctccgtctagaaattcctcttggaaatagacggtagccagcgccactcgcagcatgcatatggcccagagctggaccaaagcccgggccatgggggtgtgcactgcgcttccggtcgccgccaccccttagctcccagctctctctgcggctcttcaggcgcgtcccgaaactacaactcccgtcacaactcgcgattatgacctgagggtcccattggtcgctgcggcgcggggcacgttgggcccgccccggaactaccgctcccatgacaccccgcgattgtgattcggggcgccattggtctgcggggcgcggtgcttcccgggagatgtagtctcttctgctctggctctgttgcccagggcaaccgctccttcaggcgtgaatgtggcggctgcctctgcgaatggacggcgtgggaagaggtcggcagggctggtggggaggtgacctagctgggcgtccgggctcgcgagggggatacggggaaatggggccttctccggggctgagctggttgggccgctgcaggatggtcccgcgcctcagtttccctgtctggggtctattggagcatggtcctgcgcgggtcgcttcatagctggggagaagagcaggatggtctcaggggcgccagggttttcaagttttggtttgttgatttgtaacaactttattgagccttcatttacataccatagtgttcgccacttttaagctgacgactccgttatttttagtaaatctacaaagttgtgaagccgtcgccaccatccagctcatccagctttagaactttgcgtcaggccgggcgcggtgattcacgcctggaatcccagcactttgggaggcagaggcgggaggatcacttgaggccaggagatccagaccagcctgggcaacctggcgagaccccatctctaaaaaagataaaaataaaaaattagccaggtgtagtggcacgcgcctgtagtcccagctactcaggatgttgaggcaggagggaggattgcttgtgtccaggaggtcaagggctgctgtgagctgtgatcatgccactgcactccggctaattttttgtatttttagtagagatggggtttcaccatgtttgccacgctggtctcgaactcctgacctcacgtaatctgccagccttggcctcccaaagtgctgggattataggcgtgagtcacagcaccggcccgatctgctttctgagtttattggtttgccttttcttgacagttcttacaaatgaaatgatagggtgtgtggagtttagtgtctggctactttcttttttctttccttttttttttttttttgagacagattctcgctctgttacttaggctgaagtgcaatggtgcgatctcggctcactgcgaactccgcctcccaggttcaagcaattctcctgtctcagcgtcctgagtatttgggattacaggcgcatgacaccacgccccgctaatttttgtattgttagtagagacggggttttaccatgtgtgtcaggctggtctcgatctcctgacctcgtgatccgcccgccttagcctcccaaagtgctgggattacaggcgtgagccactgcgcccggcttggctactttcccttagcgtgatgtatttgagattcctgcgtgctgttatattagtatttgttttttaaattgctgaactgtattacactgtatggatggaccatagtttgtaatccattcactaattaatggatagttacattgttttccgttttagtctactaggagtaataaatattatggggccaggtatgatgatgtgggattgtaatctcagcattttgggaggctgaggctgcggatctctagaaccccaggaatctgagaacagcctgggcaacacagtgagaccttgtttctacaaaaagttagctaggcatggcaatgtgtgtctgtagtcccagctacccaggaagctgaggtgggaggatcgcgtgaccccgggaggtcgaggctgtagtgagccatgataacaccactgcactcagcctgggcaacagagtgagagcctgtctcaaaacaaaacaaaactattacgaacatttgcatacatttgcatttctcttgggccacatgggagtggaatccctggatcacatggtaa

SEQ ID NO: 1560094 - DNA, 4001 bp, Homo sapiens
cacacagcagagggagctgggtcaacaagaacagaactgggtgagtcagggcactgggagctcaccaacacccctcatcagaagtttgctttgctgtcttcaaaatgggataatttctactctgattcctggccaggggataatggataacgttaatattattcatcaaaatataccaccgccaatcacaccagcagcgagcaaccgtttcgcatgtatcacgcgccccgtgccacgcgaagaattctgtggtcactacagcttttacgcctcccagcaaccttgcaaagaggtaacggggggtctccatcactggagcagtgccctacacatagcaagtgcccctgccccacaaacattcgcaaaacagataagtctgtgaatgaacgccttcttttatagaaggggaaacagaagctcagataattgggataattcgcattctggtgcagctggacttcacattcaattctgacactccacgttgagttctctacagcctggtaaccttggaagtgaggagctggggctgtcctggctgtccaatgcccaatctctttcttcctcaagcaaatatctgcagggaggtagaccccagagtgggaaatgcatgcatggaacgacgcagacagagactgtctgggagaaagagggacaggctggggcggaaccaggagacggacagctgtcactgagacccacacccagaacaggttgatctgggaaggccagggagaggggggatgggctgtgccaacaccagtgggcagaaccagtgggagaaaaggatgtacccccacagctccccgctggaaagcccagaccttaattaacccctgtcttctctggccaggccctgactcctagctctggcctggggttgtgaagctgcccaaagccgagactgagtgtttccagggcctctaatcccggggacccgggattacggcatcctccccattagggtggctcgggctctcaggcaagcgggcctgggggagggagtgaaggatctgctctaatgggagaaggccccgcagccgggaggagcggggggcccaccccaggcgatcttgtactacccatttcccttcagctgggctcgccaacctccccagtaaaatggggccataagtcgcagctgccaggcgctggagggggctatggaggcgaaagggggttcccagagctccccggtcgccgcccgcagcgcggccagggccgacgcggggtgtgtgttggggcctgggggtcgtgcggtggtggagaccggagcgctcgagaccccccagcgaggtcggggtctgggtctccagggtgtgtggcgggggaagagaccgagaggagatcctcgcaggggcgtgatgtgtgtaaaagagaagaaggcgtgcaagggaaggccttgggggtgcgggaggcgggaacgagaggtccgcacggggagaccccacccggcccgcagaccccgcccggctcacctggaggcttggacgccggggacccccgcgcggagctgggccgcgggccccacccccaccgcgctcccgcagccggcggggcaaagtccaccgcccgggccgagcaggaagctcggaggccccggcgcggcaggggcccgagcccggggacccccggcggccggcgctattgttcccacggccccctgccttcccggcccggcgccccgcccccccccagcacctgccgcgcccggcccgccgcccccgaccccggtcccccgagccccggtacctgcgcccccgaacgcggcccgcagcacccacgccaggctggccgccgccttggcccgcgagaaatcgtactggtccagcgacttgatctcgggcactagaaaggtcctccgcagcggcccgggcccggggggcgccgcctccaccatggcggcgccggggctgcgggcgccgggtccgcgctcggactgggctgggctgggctgcgccgcgctcgcgccccagccgggcccgctgctgctaccgccgctgccgccgccgccgccgccgccgctgctgagccaggtgcggccgcttgcgctggcgacgctgcgtcgggcccgccccggggaggagcccaggtgcgccccgcccccgaacccggacccggaccctggcgcgcccctgcgccccgcccgggcccctcactgcagtgtgcacggagcagcaggggcggggcggaggggggcggcctggactgcggcgatggtggagggagcttgcggaggactgagtgtgtatgtgtgcgcgcgcgcgtgtgtgagtgtgtgcgcgcgcgcctagcttactggaaaggattagggaccctctgtgtgtgccagccccagtgtctacccttaggcgtaggagctcctgcaagtgcttgcaataaacgccggccctcaggcagagagtggttgggtgcacctgtttctgattatgttagtgaaggcacaagaatatgagtgtcttcgtatctgtgtatctctgaatacatttgggtggtgaccaagtgtattggggggtgtctaggggtgtgtgtgtgtggggtatgtatctgggcacgtgtaagtgtgtgtttaatttgttgtgtgtacaaggatatgtattatatagatgtctgtatcctgaggatggatggaagtgatgagtgtgtgtctgttttttgtttttgtttttgtttttgtttttgagacagggtctcactcactctgtctcccaggctggagtgcagtggcgcgatctcgactcactgcaacctccgcctcccaggctcaagcgattctcctgcctcagcctcccgagtagctgggattacggggttgcgccaccactcccggctaatttttgtatttttagtagagttggggtttcaccatgttagccaggctagtctcaaactcctgacctcaggtgatcacccgcctcagcctcccaaagtgctgggattacaggcggcagccaccgtgcccggctgtgtgtgtgtttttggagtgctgtgagtatgtctatctctgtgcatctgaacgtactggtgtgttgtatgaggctgttattgatgcctctgtcaatgcaggagtatggagagacattgagagtgtgtgtatttcaggccgagagcggtggccacgagtgtaatcccagcactttgggaggccaaggcgggcagatcacttgaggccaggagttcaagagtagcctggccaacatagcaaaaccccgtctctactaaaaataaaatttttaaaaattagccgggcataatggtgcatgcctgtaatcccaagtactcgggaggctgaggcgggagaatcgcttgaaccagggaggcagaagctgagatagtgccactgcactccagcttggccaacagagtgagaccctgtctcaaaaaaaaaaaaaaagtgtgtatatttctgcaagagtgtgactatttgtgtctatgagtgtccttgcgtagctgtactgggtgtatttgcaagtgtctttgtgtattattctggtatctgcagtgtgtgctgggagaaggctctgtgtggaggtgaggctgtgtgtctaagtgggtttgtatttgagtatgtgaatctggctatatgcacatggatgtgtgattgattgattgattgattttttgagacggagtctcgctctatcgctcaggctggagtgcagtggtgcgatcttggctcactgcaagctctgcctcctgggttcatgccattctcctgcctcagcctcccgagtagctgggactacaggcacccgccaccacgcccggctggttttttgtatttttttttaagtagagaccgggtttcaccatgttagccaggatggtctcgatctcctgacctcgtgatccgcccaactcggcctcctgaagtgctgggattacaggcttgaggcaccgcgcccagcagatgtgtgatttatgatgagcagttcctgactatatttttgtgcatatatgtgtgtttatatgtgagtatctttgtggatttgaatatatgg

SEQ ID NO: 1560095 - DNA, 4001 bp, Homo sapiens
ggagccggggatacagagtaagggaggcggcagctgcaaggaaccagcagttacctgggaggagaggccaggattaggtgaggatggaaggagggaggcctggtgcggtggctcatgcctctaatcccagcactttgggaggccaaggcagaaagatcacgtgagcctaggagttcaagaccagcctggccaacatggcaagactccactacaagaaaatttaaaaattagctgggcatggtggcatgcacctgtagtcccagctacttgggaggctgaggcaggaagattgcttgagtccaggaggttaaggctgcagtgagctatgatggtgccactgtattccagaatgggtgacagagtgagaccccatctcaaaaaaaaaaaaaaaaaaaaaaggaaggaaggaaggagggaggagggagagagaggcctagggagagaagagactgaggagggatccaggggccgggagtgggtggacaaagggatggagctgtcaggatctcagctgaaactagctggatctgaggactccaggtgggttcagggtctcacccaggctcccctgacacacgtctgtgcggctcatgtcttcacagatgaacttcggctcagcacagaactcctgtgggtggtgggggattccaggcctcagcctgagaaagcgaggaaaggtctcatccagaggagtgagggcctccaagcccatgaaaggcctggaagcctgtgggcaggagcatggcttccctgggtctccagaagttgtgctgagccagtcccatggtagccccctcctccctcagacccgggagtccaggcccagcccctcctccctcagacccaggagtccatgtcccgagcccctcctccctcagacccaggagtccaggcccagcccctcctccctcagacccaggagtccaggtcccgagcccctcctccctcagacccaggagtccaggcccagcccctcctccctcagacccaggagtccaggtcccgagcccctcctccctcagacccaagaatccaggtccccagcccctcctccctcagacccaggagtccaggtccagcccctcctccctcagaccccggagtccaggtccccagccccctcttccctcagacccaggtgtccaggccttggcctctcctccctcagatccagaagtccaggtccaagccccctcctccctcagacccaggagtccaggtccccagcccctcctccctcagacccaagagtccaggcccagcccttcctccctcagacccaggagtccaggcccagcccctcctccctcagacctaagagtccaggtctcgagcccctcctccctcagaccagggagtccaggcccccagccttccttcctcagacccaggagtccatgcctccagcccctcctccctcagaccccagagcccagaccccagccacactttacatggggcctcatccatttcacgcctttggccttctccgagtccggccccagctggtcatagccaagggcatcagggccagcagggaagtaagggtcgcggaacaggatccccgaatccaggcaggctgcccgaattgcctcatagctctggccccgaaaaagctgcaggcgcccggctccgaccccagcctcctcatccacgagctggatggtgaccctcccactgctggatgccatctggacactggcctcacaagccggcaccaggccctttaacctcctgagtcacgggggcggggcctctcttccattggagccccagtggggtctttaggcaatgaggagccttccctcgttaatattaattgatggtttggggtgctggggagcagggacgcctcttcagtagctttcttcccagggcgtggggccttcagttgtggccaaggtagcagcttaatgggcttggccagcagcaggagagaaggcgggcagagctgagggaggaccggctgccgctgtcagagcaccaagaaggaggtcagtgtgggggtgagcttctgcctacttatgcctgtggggctggggaaggaggcgggtttacctcggtgtctctatctctcagactgcctctctccccctccctctgacagtttctctctccccgccttcatgtttcttctccatcagtttctggagtgcagtggcacgatctcagctcactgcaacctccgccttctaggttcaagtgattctcctgcctcagcctcccaagtagctgggattacaggctcgtgtcaccatgcccagctaatttttgtattttttgttagagaagggattttaccatgttgaccaggctggtcttgaactcctggcctcaagcaatccgcccaccttggcctcccaaagtgctgggattacagacgtgagccactgtgcctggtcaggttttgttaattaaaaaaaattttttttaaagtagagacagaggggtggcggggggcggtcccatatgttccccaggctggtcttgaactgctggcctcaagtgatcctcctgcttcagcagcctcccagagagctgggattacagatgtgagctactgtgcctggccctttcttgttttttgtttctggcaatatttgtgtctctgtatttccccaactccacccctctccccaccccaccctctttttttttttttttttttttttgtagagatggggcggggatctcactttgttgcccagactggtctcgaactcctgggctcaagtgatcctccccgcttggcctcccaaagtgttgggattacaggcgtgaatcactatgcctgtcccctctctctttgtgtctctttcagcgtgtgtctgttcctctctgtacctgtcagacccaggagtccaggcccccagcccctcctccttcagaccctgtcagtgtaccttgtgtctgcctccctgtctcttcctctccatctttctgtctgtccctgtaacccatatgtggctcctccatcatccaccgagggaccctgagctcccctccgctcacgccccctaagccctcaggatgcgcctcctcccctcccggacaaggtagactcagcctgcttgcccagggaggctgaccctggagggatggctctgtacctctcctgtgctgggagccatctggtgaccatgatgccctgccctggcccacgccactcagagtctggatggagcagtatttcccccaaaggactctggagccattggaggaaatgggagaaacaggtacggagatgccagagcctcagcagtgctggtcccagcagaccttccaccctcgttgagggtgtctgctgccctcccagagccttgtcacctccacgccactcagatgtccctcaagccttttggccttcttccctccaagtggacccacaaatattgtccaagccacccacgtacacggctaccaaaagtgggttacaaaacaggctttctggctgggcgtggtggctcatgcctgtaatcccagcactttgggaggccgaggcaggcagatcacctgaggtcaggagttcgagaccagccaggccaatgtagtgaaactccgtctctactaaaatacaaaaattagccggacatagttgcgggcacctgtaatcccagctactcagaaggctgaggcaggagaaccgcttgaatctgggaggcggaggttgcagtgagccgagattgtgccactgcactccagcctgggcaacagggcaagactgcatctcaaaaaaccccccaaaacagggccgggcatggtggctcatgcccgtaatcccagcactttgggaggctgaggtgggcagaacacttgaggccaggagttcaagaccagcctggccaacatggtgaaacaccatctctattaaaaatacaaaaattaggctggacgcggtagtttactacgcctgtaatcccagcactttgggaggccgagacgggcgggtcaggagttccagaccagcctggccaacatggtgaaaccccatctctactaaa

SEQ ID NO: 1560096 - DNA, 4001 bp, Homo sapiens
agcttcccaaggccttatcctcctcaggtgccatctgcccaagaccctactccatggcccgcttcctaaatgcccgtcttcccaacatcctaccccagccattggtccccgccccttcaagggatcactgctaagtggccgtggctaattaagccaacctgccctatccctaccagggcatttttctccattaatccagccagttcccagcaagcccagcccattctgggccatttaccctaccccattaggtcttgcttcctcctgggctcacctcctcattaacccacctaaaacctctgaccacactcataagtcaagccccttccgtaaaatgtcactcagacgcattggctccgcacctttaacgttcatctccaggttagccaatgcaggctgagcccagacccataagccccacccgccaaaactccacatcagtcccctcaggaccacattgtcctggtcccacacaatcagactactcccatatcaagcaccgcccccaatgactgatatccgcctcactggggtccacccccttacagcagaactctcaaaccaggcctccccggcctaattcatgtacccaggttagcctccaggttaatcctattctatttttagaccacgcccctcccagaccacgcctcactgaggctcctcccattcccaggccccgcccctctgatagtctccgccttacctgatggcgctgatgactccgcctaggatgcgcatggccgttccaccgccaccgccgcctccaccaccgccgccgccgccgccgccgccgccgccgcccccggccccgctgatcaggcctccaagcacatttcccaggcccccacccaggcccccgcctcccccgccgccgccgccgccgcccttcaagaacgagttaaccaggaacatggctgcgactcactgctggggggaaaaaaggggaccagtgggtgcttcgcccctgagcccacaccctcccttcaaacacgcatttccggcagctggacctgggaggaatctgaagcctccgggtgggggtctgagtttgcgagggcgggttgtccgcggatgggtggggcaggtatgggggatcaggtttgcaacctcctcaggtctaaaaggcacccgtggggcttgagggagcctggactgggtgcacgcgtgaaggggagggtgcagatctggtgggggttctcttggtggggaccccaagttggcgtaaggcgttcccgacatgtctgggcgctagaatgtgagatccagagcccagcctgaatgtagaggtccttggcaggtcatgggcgcggagcaaacatccacggcctaaagggccccagggcggggtttaggaaatcccaaatgtgggcttgagaatttaggtattcccagcggcaggattccagtgtcacctctggctctgtgggctcgggtctaagatcgtggctgtgagctctgggttcccggacaatggggttccccgctggaactgggggcacagatctacgatcgcggttcaggacaccccaaggaagaattcacagggtatctctgaaacctatgggcctgtattttggatcatgagacagagggtggagaagggtccccgggacggcataaaaggagatcgaacaggtctgagggttcgaatctgagaccatggatctggggggctcctgaggccgagacttcacggtttcgccgggtctgggggccgccaaagtcggagttgcggggtgcggagggggtacgggccgggcgcttaccgccgcacacgtccggagttctgggagtcggttccactgccgctcccgggcctcccgcagcgtccggctccggagggcggggccggtgactcaggccgcaactctcgggtcggacactgcaccgcggccctgctgtcgcccgcgcggtcctagagccgaagcggacattgcgcatgcgcaccccacaccgcccggctagctggatccaggtctgggccccgccctacgcgtttccagcgccggaggtcttaatcccgccctgactcggtaggcgggggtcttcccgacacccctcaggtctgggtggaggcacccgcggacgagaactcggaggggacccaccccccgagtgtcgtagtgtgaattttcaccctagggcatgccaatatccttccagggtggcggttttcggtccgctcactaagggactccgcacgggccctctgcaggtgttgtcgcgacaaacacctcctggaggcctggagtatggtttgactcacacgctgggggacagtcgcccgtgtctgtggcgaggattgaggctggattgcctttcccagtgcctgcagcagcccggatggcagtcaaaccgcaggcagcgcctgcgccgcctcccaggcgaaccttaccacgcccccgccccagtcaggggccaccagaatcattccttcctggactggcccaaagagtgtcctcagtatgctagcctctaaagaaggccccagacacaggaagattcctttggccacggcctggtttctttatttacttaaaaaatattattgtttttacataatagagacggaggtctcgctatgttgcccaggctgctcttgaactccgggcctcaagccgtcctcctgcctcagcctcccaaagtactgtgaggtactgggattacaggtatgggctaccggcctttttttgatttaatttaattttttacaataatatttttacatagcctggtttcttttcttttcttttctttttttttttttttgttttgagacagcgtcttgctctgttgcccaggctggggtgcagtggcgccatctcagctcactgcagtctctgcctcccaggttcaagcgattctcctgcctcagcctcccgagtagctgggattacaggcatgcaccaccacacccagctaatttttgtatttttagtagagacggggtttcaccatgttggccaggctggtctcaaactcctgatcttaggtgatccacctgcctcggcctgccaaagtgctaggattacaggcatgagccacgggagtccagtactttttcaggactcatcggggggagctaaatctggcccccaggcaggctggctggctcttatcccctaccctgcaggctggctaggcttgagttgaatcctggctgtgccctgtaataactgcacaaccccaaaagagtggcttgatattcctgagcagcgattttctcatctgtaaaatgggaacatgggttgctccataccactaggccccctatcaaaattaaatgatatctgcagcaatactgattattaaaaaaaaaacttaagtggtggctgggtgaagtggttcatgcctgtattccctgcattttgggaggctgaggcaggaggatctcttgagcccaggagtttgactccagcctgggcaatatagtgagaccttgtctctacaaataatacagaaattagctgaatgtggtggcatgcgcctagtcccagctactctagagactgaggtggggggatcaccagagcccaggaggcgggggttgcagtgagccgagatcatgccactgcactacaatctgggtgacagagcgagactctgtctcaaataaatactgggcacagtggctcatgccaataaccccaggactttgggatgctgaggcgggcagatcacctgaggtcgggagttcgagaccagtctgactaacatggagaaaccctgtctctactaaaaaatacaaaattagccggatgtggtggtgcatacctgtaatcccagctactcgggaggctgagacaggagaatcgcttgaacccagtaggcagaggtttcagtgagccaagattgcaccattgcactccagcctgggcaacaagagtgaaactccgtctccaataaataaataaataaattggtgataaatgctttgtaaatgcccccattagctctgtgtctgtgctcatgctgttccctcagcctcgaggccagct

SEQ ID NO: 1560097 - DNA, 4001 bp, Homo sapiens
gtgcccctcttctcccttcctcaggccaaccccaccctcgaggaaacccagagaccggtcccctgggaggctcccctcctgccaggcacacctacccagtggcagatttcagtcatcttggccaccctaaacctaaaaaatcccacgtagaatcaaaagaccccgccccttggagggctcacttcatagaggctctgccccagcttcccaaggccttatcctcctcaggtgccatctgcccaagaccctactccatggcccgcttcctaaatgcccgtcttcccaacatcctaccccagccattggtccccgccccttcaagggatcactgctaagtggccgtggctaattaagccaacctgccctatccctaccagggcatttttctccattaatccagccagttcccagcaagcccagcccattctgggccatttaccctaccccattaggtcttgcttcctcctgggctcacctcctcattaacccacctaaaacctctgaccacactcataagtcaagccccttccgtaaaatgtcactcagacgcattggctccgcacctttaacgttcatctccaggttagccaatgcaggctgagcccagacccataagccccacccgccaaaactccacatcagtcccctcaggaccacattgtcctggtcccacacaatcagactactcccatatcaagcaccgcccccaatgactgatatccgcctcactggggtccacccccttacagcagaactctcaaaccaggcctccccggcctaattcatgtacccaggttagcctccaggttaatcctattctatttttagaccacgcccctcccagaccacgcctcactgaggctcctcccattcccaggccccgcccctctgatagtctccgccttacctgatggcgctgatgactccgcctaggatgcgcatggccgttccaccgccaccgccgcctccaccaccgccgccgccgccgccgccgccgccgccgcccccggccccgctgatcaggcctccaagcacatttcccaggcccccacccaggcccccgcctcccccgccgccgccgccgccgcccttcaagaacgagttaaccaggaacatggctgcgactcactgctggggggaaaaaaggggaccagtgggtgcttcgcccctgagcccacaccctcccttcaaacacgcatttccggcagctggacctgggaggaatctgaagcctccgggtgggggtctgagtttgcgagggcgggttgtccgcggatgggtggggcaggtatgggggatcaggtttgcaacctcctcaggtctaaaaggcacccgtggggcttgagggagcctggactgggtgcacgcgtgaaggggagggtgcagatctggtgggggttctcttggtggggaccccaagttggcgtaaggcgttcccgacatgtctgggcgctagaatgtgagatccagagcccagcctgaatgtagaggtccttggcaggtcatgggcgcggagcaaacatccacggcctaaagggccccagggcggggtttaggaaatcccaaatgtgggcttgagaatttaggtattcccagcggcaggattccagtgtcacctctggctctgtgggctcgggtctaagatcgtggctgtgagctctgggttcccggacaatggggttccccgctggaactgggggcacagatctacgatcgcggttcaggacaccccaaggaagaattcacagggtatctctgaaacctatgggcctgtattttggatcatgagacagagggtggagaagggtccccgggacggcataaaaggagatcgaacaggtctgagggttcgaatctgagaccatggatctggggggctcctgaggccgagacttcacggtttcgccgggtctgggggccgccaaagtcggagttgcggggtgcggagggggtacgggccgggcgcttaccgccgcacacgtccggagttctgggagtcggttccactgccgctcccgggcctcccgcagcgtccggctccggagggcggggccggtgactcaggccgcaactctcgggtcggacactgcaccgcggccctgctgtcgcccgcgcggtcctagagccgaagcggacattgcgcatgcgcaccccacaccgcccggctagctggatccaggtctgggccccgccctacgcgtttccagcgccggaggtcttaatcccgccctgactcggtaggcgggggtcttcccgacacccctcaggtctgggtggaggcacccgcggacgagaactcggaggggacccaccccccgagtgtcgtagtgtgaattttcaccctagggcatgccaatatccttccagggtggcggttttcggtccgctcactaagggactccgcacgggccctctgcaggtgttgtcgcgacaaacacctcctggaggcctggagtatggtttgactcacacgctgggggacagtcgcccgtgtctgtggcgaggattgaggctggattgcctttcccagtgcctgcagcagcccggatggcagtcaaaccgcaggcagcgcctgcgccgcctcccaggcgaaccttaccacgcccccgccccagtcaggggccaccagaatcattccttcctggactggcccaaagagtgtcctcagtatgctagcctctaaagaaggccccagacacaggaagattcctttggccacggcctggtttctttatttacttaaaaaatattattgtttttacataatagagacggaggtctcgctatgttgcccaggctgctcttgaactccgggcctcaagccgtcctcctgcctcagcctcccaaagtactgtgaggtactgggattacaggtatgggctaccggcctttttttgatttaatttaattttttacaataatatttttacatagcctggtttcttttcttttcttttctttttttttttttttgttttgagacagcgtcttgctctgttgcccaggctggggtgcagtggcgccatctcagctcactgcagtctctgcctcccaggttcaagcgattctcctgcctcagcctcccgagtagctgggattacaggcatgcaccaccacacccagctaatttttgtatttttagtagagacggggtttcaccatgttggccaggctggtctcaaactcctgatcttaggtgatccacctgcctcggcctgccaaagtgctaggattacaggcatgagccacgggagtccagtactttttcaggactcatcggggggagctaaatctggcccccaggcaggctggctggctcttatcccctaccctgcaggctggctaggcttgagttgaatcctggctgtgccctgtaataactgcacaaccccaaaagagtggcttgatattcctgagcagcgattttctcatctgtaaaatgggaacatgggttgctccataccactaggccccctatcaaaattaaatgatatctgcagcaatactgattattaaaaaaaaaacttaagtggtggctgggtgaagtggttcatgcctgtattccctgcattttgggaggctgaggcaggaggatctcttgagcccaggagtttgactccagcctgggcaatatagtgagaccttgtctctacaaataatacagaaattagctgaatgtggtggcatgcgcctagtcccagctactctagagactgaggtggggggatcaccagagcccaggaggcgggggttgcagtgagccgagatcatgccactgcactacaatctgggtgacagagcgagactctgtctcaaataaatactgggcacagtggctcatgccaataaccccaggactttgggatgctgaggcgggcagatcacctgaggtcgggagttcgagaccagtctgactaacatggagaaaccctgtctctactaaaaaatacaaaattagccggatgtggtggtgcatacctgtaatcccagctactcgggag

SEQ ID NO: 1560098 - DNA, 4001 bp, Homo sapiens
actgcttctttcaggaaactgagcctcagtttcctcttctgtaaaatggaatataataattgtgcctgtccaacagggtggttatgacggttcggtcactttatataattaaagtgccagctgtgacagctggcattgttatgatttaccgccacatgtctgcaggtgactgtgttctgatgaatgcatttccacatctgtggatatgaaagctacatgttggcttcccaaacatactctcaaaaaactctctgtccacccagggcctctcccacactgcccccaaggatacatccatcacggccaccatgctgcgacatgtgtcaatgccaaaaccatcagtcttcagatcagggtctgtgggtaacaggttgaaagtcagaggccagaggtcaaatcctctctgacccctctgcctctgaatctaccctattccttaaccccggtcacttacgtcgtgtcacaaccttattgagaatgttcatgagttctgtggcgctgacctccatgtcctgcgggcggaagttaggggcaggtcaggggtgactgaaaggggtctgagaatgtcatggagaatgggaacactgggattgtcatggtcaagggtgtgtgtgcaagggcagccacaagggaagggatggaacggttaggacggggccagggaccccaggttacttacatctccagccagctgggcaaagagtctccggaactgccggacctcctcactctcgttggcctcaatgttggagtaatgtgtgcgtgggggctgcaaagggaggagagctcagagcagggggaggggaacccggccaggacggctccccaaacccaggtaccctgggtggggaagtcagagtgggctgggcagcttgatgaggaaaagaatgaggggtggtagtgaatggggtgcacgtatgtggggcatggctaagacccatggcgaagctgcagacacggcatgggaggaactggcagaggaatttcacaagaaggggaggaaggtggggcttctctacaggaacagggatgggacctcgaagaggccttggcaggagaagggggtctggttgcagagggggcttaccgggggctccgggttgtactgcgcagccgcctcgctgcgaagagataagggggaggggttagtgccaggggcggggcctccaacgggcagcactacagaaccatcagccccaacgctccagaccccagccgttatcttccttacttggttgctgtgcctttcatttgttcttgtcctcatctgtcccaatccacactgccctggtcgtgcccctcttctcccttcctcaggccaaccccaccctcgaggaaacccagagaccggtcccctgggaggctcccctcctgccaggcacacctacccagtggcagatttcagtcatcttggccaccctaaacctaaaaaatcccacgtagaatcaaaagaccccgccccttggagggctcacttcatagaggctctgccccagcttcccaaggccttatcctcctcaggtgccatctgcccaagaccctactccatggcccgcttcctaaatgcccgtcttcccaacatcctaccccagccattggtccccgccccttcaagggatcactgctaagtggccgtggctaattaagccaacctgccctatccctaccagggcatttttctccattaatccagccagttcccagcaagcccagcccattctgggccatttaccctaccccattaggtcttgcttcctcctgggctcacctcctcattaacccacctaaaacctctgaccacactcataagtcaagccccttccgtaaaatgtcactcagacgcattggctccgcacctttaacgttcatctccaggttagccaatgcaggctgagcccagacccataagccccacccgccaaaactccacatcagtcccctcaggaccacattgtcctggtcccacacaatcagactactcccatatcaagcaccgcccccaatgactgatatccgcctcactggggtccacccccttacagcagaactctcaaaccaggcctccccggcctaattcatgtacccaggttagcctccaggttaatcctattctatttttagaccacgcccctcccagaccacgcctcactgaggctcctcccattcccaggccccgcccctctgatagtctccgccttacctgatggcgctgatgactccgcctaggatgcgcatggccgttccaccgccaccgccgcctccaccaccgccgccgccgccgccgccgccgccgccgcccccggccccgctgatcaggcctccaagcacatttcccaggcccccacccaggcccccgcctcccccgccgccgccgccgccgcccttcaagaacgagttaaccaggaacatggctgcgactcactgctggggggaaaaaaggggaccagtgggtgcttcgcccctgagcccacaccctcccttcaaacacgcatttccggcagctggacctgggaggaatctgaagcctccgggtgggggtctgagtttgcgagggcgggttgtccgcggatgggtggggcaggtatgggggatcaggtttgcaacctcctcaggtctaaaaggcacccgtggggcttgagggagcctggactgggtgcacgcgtgaaggggagggtgcagatctggtgggggttctcttggtggggaccccaagttggcgtaaggcgttcccgacatgtctgggcgctagaatgtgagatccagagcccagcctgaatgtagaggtccttggcaggtcatgggcgcggagcaaacatccacggcctaaagggccccagggcggggtttaggaaatcccaaatgtgggcttgagaatttaggtattcccagcggcaggattccagtgtcacctctggctctgtgggctcgggtctaagatcgtggctgtgagctctgggttcccggacaatggggttccccgctggaactgggggcacagatctacgatcgcggttcaggacaccccaaggaagaattcacagggtatctctgaaacctatgggcctgtattttggatcatgagacagagggtggagaagggtccccgggacggcataaaaggagatcgaacaggtctgagggttcgaatctgagaccatggatctggggggctcctgaggccgagacttcacggtttcgccgggtctgggggccgccaaagtcggagttgcggggtgcggagggggtacgggccgggcgcttaccgccgcacacgtccggagttctgggagtcggttccactgccgctcccgggcctcccgcagcgtccggctccggagggcggggccggtgactcaggccgcaactctcgggtcggacactgcaccgcggccctgctgtcgcccgcgcggtcctagagccgaagcggacattgcgcatgcgcaccccacaccgcccggctagctggatccaggtctgggccccgccctacgcgtttccagcgccggaggtcttaatcccgccctgactcggtaggcgggggtcttcccgacacccctcaggtctgggtggaggcacccgcggacgagaactcggaggggacccaccccccgagtgtcgtagtgtgaattttcaccctagggcatgccaatatccttccagggtggcggttttcggtccgctcactaagggactccgcacgggccctctgcaggtgttgtcgcgacaaacacctcctggaggcctggagtatggtttgactcacacgctgggggacagtcgcccgtgtctgtggcgaggattgaggctggattgcctttcccagtgcctgcagcagcccggatggcagtcaaaccgcaggcagcgcctgcgccgcctcccaggcgaaccttaccacgcccccgccccagtcaggggccaccagaatcattccttcctggactggcccaaagagtgtcctcagtatgctagcctctaaagaaggccccagacacaggaagatt

SEQ ID NO: 1560099 - DNA, 4001 bp, Homo sapiens
catatgaaatgtatttgggaactacattaaacttttaactaaaaccctggcctctgcatgccccaggggcctcaggaagcccctgaccaggaacggcctccacctccccgggcgaggacctccagcagcctggggcctcatgctcccacccagcgtgtcaccagtgctggggtccagccacagccctgttctctccaccaccacccgcactttacccccacccctgctgcaaggccccgccggtctgcccccgcccagagctcccagcctcgggccgctcaccagaatgtagatactgggcccgctggacatgttacctgctatttttattccccatttgccatcttctgattgggggttgatgttttacagatttttttttcaaaggctttatttcagtttctgaggttaggatgcccctgtgcccctcgctccacacctgggcaggtctaaacttccttccaggatggcctccacacacagcctcccacctggggtcacctggcttcctgggggacccgcaagggaggggcagggagcagcagtccgggtgcggggatcgggggacctcggcgggggcatccacaggggctgcaagatctctggtcagcatggcgtgggtggggagagcgtttctccctggggtcctgagccagtgactcctgttaggacctttgtcccacctccgcctggtggaccggcagggacctggtctagccagtcctgcagcctccattcccccacctgcccctccccgctctgtggtgtggctgcccaggagagaaggggcccagggaagggaggtctccggcaggggtggggagtgacaggccagggcagcagggctgagccggagctgctcacagctgccaggcactggtcatcatggccacgaactcctcatccgtgttcatggaggcactcacgccgctgtagtagtcctggaattccgccagtgtgacctgggaacagagggccgtgagggggcacggccgaggaactgcctggggagggggccccccgcgcagccacccacctgcccgtccttctcagaggagtcgaagttgtccaggaagcggcgcagcacctcgtcctcggtccactccccactgcgcaccttggggtgggcacggccactgtacaccccgcggaggtcgtccaccgtcacgacgccgtccccactgcggtccagcttggcaaatgcagctgcgatgacagcctcccgggcctgggacatggggggctgggacaggaggtggtgactgggggtggtgggtagcacacccaaacccccaagacgctgtgcagagcactggggctgtatgccccagcaggcgcctcttaacagcagctcttagggaggagtccccgtctccgcatctcagcatcctctgtcgccccatgcccagggcacacgccttgactgtgaggtgggggctcacccgcagcgcccgaaggaactcctccagatccagcgtcccgctgccattgcggtcccacttcctgcacacaccctctgcctccgcctggtccagcaccagcccgagtttggccagaccctgccggaactcatcagcgtccagggatctgctcccgtcccggtctagttggcggaaaaacctggaggcaggggacacggttggaacagtggtctcaggggccggggtcaggaaggtgagaggggacagctcacctggccaggccctggatgcccgaggccccgcgggacaggcactgtgcccggagtttctccatggtggcatccacggcgtccatgcttggtctgggctctgggcagctggaagggagagaggtcaaggtggggactcccgcaagcccaccctggccgactgccccttgttcagatgctcacctggcctgcgtctgtcccagagtcctgcctgcggggccttgtgttagctgtgttgtgcctggggagactgttgctagtggaaggtgcctctggagatggggtggggcccagctgcatgaatgcactgtgctgggcagtggggagtgggggagggatgggtgcgcccagcctgactgcttactcaactgccagccccacagggcctgggacagagccagatccctgtggcactgcatcccttcctggctccaaggaggaggggcaggccactgccctgcaggggctgaaatgccctggatggagacaagtccgtggctggggaggcttgacgcatgattcctgtgtgaccctggacaggtccctttccctctctggcttcacaggggcttctcagcccgagccagggctgacaaaattgctgaggaatcaaagttcaaaagggccccaggttctgaccggccactgcggctcatgcctgaaatcccagcactttgggaggtctaggtgggaggatcacttgagcccaggagtttggaccagcctggggaacatatagagaacttgtttctattgtacagcaacaaaaatgccccaggtgggctgggcgcggtggctcatgcctgtaatcccagcactttgggaggccgaggtgggcagatcacaaggtgaggagtttgagaccagcctgaccaacatggtgaaaccccgcctctactaaaaatacaaaaattagccgtgcatgatggtgggcgcctgtaatccgagctacttaggaagctgaggcaggagaatcgcttgaacccaggaggtggagcttgcagtgagccaagattgcaccactgcactccagtctgggcgacagagcaagactccatctcaaaaagaaaaaaaaaaaaaaagccccaggtggcccaggtcctggggccctaagacctcccacccaggcccacctccaagggcaggtcctgcaacccacagagactgagctgagcctgagggacacctctgctcactgccacaaagcttgtcactggccgttgttaggagccagtcccaggatttctgtctttacggatcttttgttgttggttttcaggcctgaaacgtgacttagtgggctggctcctgacaaggtggtgagccagaggttgtgaccccgagtggaagagcagccctgatcctggacataaacctcaagagacgaagccacctcactgaaggccttcaacggagacatcggatatacctgcccgctaagataggtgggttttccaggacttgaaacgtgggccctgtttgaggacccactgttcgccccgacccaaggatcatcaatcggagccttctccaagcctggctttacctcgctcacagcacaattatattgtcagaagttgccttgcctgagcgcggtggctcatgcctgtaatcccaacactttgggaagccagggcaggaagatcacttgagcccaggagtttgagacccgcctgtgcaacatagtgagacccccccatctctacaaaaactacaaaaaattagccaggcatggtggtgtgttcctgtaatcccacctacttggaaggctgaggcaggaggatcacttgagcccgggagttggaggctgcagtgagctatgatcgcaccactgcactccagcctgggttacagagcaagacgcccgcctcttaaaaataagtaaataaactggccgggcacggtggctcacgcctgtaatcccagcactttgggaggccgaggcgggcagatcatgaggtcagcagttcgagaccagcctggccaacatggtgaaaccctgtctctactataaatacaaaaattagtcagccgggtgcggtggctcatgcctgtaatcacagcactttgggaggccgaggcagacagatcacctgaggtcaggagtttgagaccagcctggccaacatggtgaaaccctgtctctacttaaaatacgaaaaactagctgggcgtggtggtatgtgcctgtaatcccagctactcgggaggctgaggcaggagaattgcatgaacctgggaagcggaggttgcagtgagccgagatcgtgccattgcactccagactgggggacaagagcaagactttgtc

SEQ ID NO: 1560100 - DNA, 4001 bp, Homo sapiens
ccactcttctatccttcgttggtcctaaacaggagggaatgttaaccagatgaagttgtttgcacaacactgaatggactgagcttatttgaaggtaggatctctttatttagtgtgagcgtgtcagggatgatggacactagagtgatctgcattcactgcctttcacagacatcactcagcagtgacagacctgtcaaagttgttgcttaacctctctgagtatcagctttctaatttgtaaaataaggatacagtactctcgtcacaaatccttgtggtgattaatcatagaaggctaaaattacttagcgcaagagttggaaacactgggttcccaaagcaaacaattcgtcctagtccgtggtcttttatgcatgccagatcatctgtctcagtcatttcagacttttttttttttttttttttgagacagagtttcactgttgtcgcccaggctggagtgcaatggagcgatcttggctcactgcaacctccacctcccaggttcaagcgattctcgtgcctcagcctcccgagtagctgggattacaagtgcccgccaccatgcccagctaatttttatatttgtagtagagatggggtttcaccatgttggccagactggtctcgaactcctgacatcaggtgatctgcccgcctccgcctcccaaagtgctcggattacaggcgtgagtcaccatgcctggccaaggttgctatttttaaaacctatggactgagaagcttgtgaacaatataaatgtatttgtcacagctctggatgctggaaagcccaggatcaaggtgctggtagatcagtgtctgctcctgattcatagagggcagacttcttgttctgtccaagcatggggaaagagaaaggagctctccagggttccttcatgagggaactaattccattcatgagggcgctacctttatcacctgacacctctcaaaggccccatctcctaacaacatcacattggaagttaggatttcaacatattaatattggaagaacacaaacattcattctgcagcagtgtctgaattgcatacatgaaatatttggtcagattaatttgttttgagttccaagacaatgtaaaacagtgcattcattttctacaaatgagacataaacctggtgctgatgaggagccactgaaacacacagagggagggcttagtgagtcaggctgcttggttctgctctgatctgggcgccatgctatgggattgtcaagagcgtggtcaaggccataggcccatgcatcaaggaaagagctggaagaacagccctagactcgcttttgctcaggtatgaagttgccatggtcagaatcaaggaaggagagagaaggtctaaaaaggtcagaaacagggaaggagagagaaggtctaaaaagtacacctgggccaggcgcagtggctcactcctgtaatcccagcactttgggaggccgaggtgggtggatcacctgaggtcaggaggtccagaccagcctggtcaacatgatgaaaccccgtctctactaaaaatacaaaaagtagccaggcgtggtggtgcatgcctgtaatcccagctacttgggaggctgaggcagaagaatcgcttgaacccaggaggcagaggttgtagtgagctgagatggtaccagcgcactctggcctgggcaacaaaacaagactctgtgtcaaaaaaaaaaaaaaagtacacctgggtgcccatgggagttttcccttcattcatgcagagatgggtgaatgaataaaatgtgagcagaacctttcttccagaaaacatccatggtcctctgtatctcatgaactataacgaaacacagaagaatcagccatcaggagccctcacagagcgcaaagtcactcaccgtctcggcagctcttcctcactgctgctactcttttctggacactcctttttttccatttgtcaaatgtggtatttatgtctttactgtatcttttttaccctgaaaaaataaaaggaggttgtatttaggtacttgggaagaaccatcagataaatcttagcttctgtgtctctcaaaggttgacaaaagcgcttattgctcattcacaagagatgcatcagtggaattgctcctagtagtggtaggtacttgggacagaggccgaaacaggagagttgtaaaacagaaactagaaacttcctttttttttagatggagtctagctctgtcacccaggctggagtgcaatggcgagatcttgactcacagcaacctccacctcccgggttcaagcgattctcctgcctcagcctcctgagtagctgggattacaggcatgcgccaccatacccggctaatttttctatttttagtatagacagggtttctccatgttggtcaggctggtctcaaactcccaacctcaggtgatcggcccgtctcggcctcccaaagtgccggattgcaggcgtgagccaccgtgccctgccggatttttcaaattcttttatttttgatgtggccctgggtctgcaagttaagttatgcagaacaggaacttctaaagattccaacctgacagaggcaaaagtgtgattattttccttgccttccattcttctctcgtacaactctaatcgtttttcttgcctaaattgtcaccttgatttctttaaaatacttgggtttaggaaccgttgtctaatccattaccttcaccggctctgctatgacattttttaaagattagatttttaaaataatggctttatggatatatagttcacaaaccacacaattcacccacataagtctacaattcaatgttgtatatatagtaatgaagttgtacaaccaccaccacaatcagttttaggacagcgtcatcacctcaaaaagaaactcattaagcggcactccccattccccacaggcacgcacacccagccacaggcacccacgcatccaccttctgtctccataggttgactcattctggacatttgatttaataggagttgttatggaccgaatgtatgtgtccaccctcaagttcatgtgttgaaatcctaactccaaatgtgatgataggaggagatggggccttcgggaggtgatgaggtcatgagggtggaatcctcatgaatggtctcaacgcccttagcaaagagaccccagagacctcgctcccgctttctaccgtgggagggcgcagcaagaagtcagccgtctatgaacaaggaagcaggtcctctccaggcactgaatgtaccagtgccttgatcgtggacttcccagcctccagaactgtgagaaataaattctgttgtttaagccacatagtctatgatacttttgttaaagaagcccaaagtgactaagacaggcatcaaacaatatattgtcctttgtgatggattctttcacttcccgtatgttttcaaggtccatccatattataccgcataacagcacctcctttgctttcatggctgaataatattccaccgtatggagacatcacatattctcttatccattcagcagacgatagacatttgggtgagttccactttggggctgttatgaaaaatgatactgtgaatattcaggtacgaatttccatgtggacagattatttccttctcttgggtacatacttaggagtggagttgctgggtcatatggtaactctatgtttacccttcaaggaactgccagactgttttccaaagcgccaatttccgtgctcgcttcggcagcacatataccaaagcgccaatctccattcccaccagcagtgtaggagggggccagcttctccatatcctcacctataattgttattatgggccttttgaaaatggccattctagtacatgtaaagtgataagttattgtgatttttgaagattaacttttatataataataaaaatacatattattaatagcatttcagagactctggataacagaaaagataattagtgaaatacaa

SEQ ID NO: 1560101 - DNA, 4001 bp, Homo sapiens
ttttaacattaaaatacacatgatttttaccatttgtgatacacattgtatcatatgtattctcaattgaaatttcaattaaaattcagttaccactcatcaaattttactatgactatttcaactgaaaacattttcatattgcatttaaaaagttttgacggtttacttttattttagaaatcaaattatttcatgaaaaccaaatactcttcaccttaaattgtcttttttactcccatgaaaatctgtattcatcttcacaagaaaaaaatgcaaaattacattctttaaagttcaaatactaaaattcttgtatagtattttatgtgacattggaaattttaaaaaacatgtaataaaaatcccagtcacgcatgaagttatagccttgcctgcacgtattgcctgtagccccagccacccggaggccgaggtgggaggatcacttgggtccaaatggctgagaccagtctgtgccacacagcgaagccctgtcatttaaaaaaaattcctaaacttccaaaaattggaataaaattcattattccttgacatattgaagaaacaaacaacagagaaatgaattaatgatataaataaggaatcaaaaggataaaacacaaatgtcctgaaaagatgttaaaattcactagtaatcaggggaatgtgcatgacaaccactatcagttatcattctcacccacaatactgatggaaataagaaaagctgacaaaatcaagtgtgaatatgaatgtgtagcaatggaaactcgtaaaccagtagtggagatgactgaaaacacagccgctttggagaataaactggctgtatctagacttcaagacacacctacccttgaaattatgtgtggacaagaaaatgcatataaaaagtccattgtattatggtttgctatcagaaaacagggtaacaaactgaatgtccatcatcaaagaatggatacattgattataatatcatcattgcattaatactgtagcgcagttaacataaattattaaaaccacatgtaaacatggataaatatttaaaatgtactattgggccgggcacggtggctcacgcctgtaatcccaacactttgggaggccgaggcgggcggatcacctgagatcaggagttcgaagccagactggcaacatagtgaaactccgtctctactaaaaatacaaaaattagtcgtgcgtggtggcgggcgcctgtcaccccagctactcgggaggctgaggcagaagaatcgcttgaacccgagaggtggaggttgcagtgagccgagatcacaccactggactccagcctggatgacagaacgagactccgtctcaaaaaaaaaaaaaagtaatattgattaaaaatcaaattgcatgagactgcacagcacgataccaagcaaatacaagttttaaatattacagaaaataatatttaaaatacaaaccaaatacataaatcatgcagggggattaagacgtttctggatagtggcaacagccgagagtggctggatgaatttcagagaaatttcatatattgcttcaattttatttaaaatatattattacctatgttttagatattttattgtaaataatgggcaaggatattataaactctgcagaagtaagtgtagtcgtgttttttcctactcacattgaagatggcccagatgcttgcactaaccgcgtttaccgcccacagccatcatggcgaccggaagtcctgagagcttgtttccctcgaatctcagacagccctccttctctatgaacattatttcaaaagaagttgagaactagagaaaccgaagcttaaggggattctcccatttggcctgtcctcccctaaagtcaccacctgctgcgtttctgcagcgcttaccatgtgagtttcaggagccccagggtgcaggaaggaggagcggaggcttgttgcttggacactgccaggctgctctgtgttctgttcctcttggtcacttgagaagaaagggagaagttcctatgaggctgtcggaaagggaaatggggccctccgcttgttgaaaacaaaacaaaaccctcaggaagctttgcatcctgttagtcatagcttaaatttatgacttcaatgacttggctgggacagtcttaatctctccatactcaagttgttttaatttctgtaataataatttttataccaatgtttgtgttgttaatactaataattttacattgtaactgtaatcctttaattattacaagtgttaacctaaataacaaacatatgaaagcttcctaaaggaaacagtgtttatttgggaatagagcattgcaattgggaatagatatgccatattaaactatgtatatattcaggaagataaaggaagacagaaatggggaggattgcatattgttttgacaggattttccttggccacaggatcaggcacaaaggtgacattagtctgaggttggacaggcagttgctgggcagcattccttgcagaaatattttttgtttaaggttgcaatgacctttatgcaaggttgtgggttttgtagagtctttttcattttcaagcatacaaggataagaccccccctcttcatggctttcctggctttatttgtcagggtcatcttaacattagtggctccattttgttctgacaactttcagatttctccttgtgatcaagaactttctctaaaagcattattgatcaatcattctgtaattaagatttgatgtcccctgatgccagcatggacctctcccagtttgctggtctcatcccatgttgtggggagtgactggtgactaggaatcgatgtcaaaagcacatttgagcaacaaaagagatttgaaggatgtggctctcaggctaagtctccctggagtccattagtaagttcaattttgtctgttctacagtcttttgctatccctttaaagtgctgattcagtattattttgttaggagctgcacctctgaaaaaatttaacaagtaacacatacaaagtttaaaaaggagaaatacaaagtaaggggaaatacaaattaagagcaatatgagattttcagtttgcatatggttttgagccataaacctaggtttaaagacaactaattgaagaactcaaacagttattcgagacagcagggagttaggtgagacctggggtaaccacatggcctgctttcttattttgtgtataggagcctcaacttttctcagaggaatttattcaggtatagcatgtcgtattagcaacatcacagacaatttcttgcttaaccaatggatactaaagaattttgtaggttgggttctgttaagttataagcagaaggaattgatcataaaatttaagttacaccattattctgctaagtagaaaaggtcgaattaagtgagatgaaagtctcattatgatatagagtcttgtttcagcatcttgcagaaagttatacagtgtgaaaacaccaactttttctcctggtttgtagtgtgaacgtctctggttatgatattgggcagtttggtaaactattgtgtgatccgcatatcagccttgaggtttgttccctctttcattttcctctggatcaccaacatgctaatctacgttcacatcactgaaaccgtagaggccaataccaatttcaccatttctggtcctggatatttgcaagactgttgtcaaactaggccatacatacaataatttaatatacatttggggcttggattatatttctgttaaattgcactgctctatgggacttattttattcattccacaaatatattttgcacatgttccttattcttggtactatttaatggatttggcatacatccgtgatctaaacagataaaactcccccaaggatcatttataaatgtcatggtgattcgccatgtcctgtttgtgttcctcatggtctggaccagcatcaacatggccagtctcctctgcagacacc

SEQ ID NO: 1560102 - DNA, 4001 bp, Homo sapiens
tcacacagccattgaagaatccccatcatcctatctcaagcatagaggaaacacatagcatacatatgtagccacatagcaaacacagaaatgactatcaacaaagtggaagagtttaatgcacagattaagttatctgaatatatgtacaatgagttataaataataaataattgagccaggtgaagtagtacatgcctgtaatcccacctacttgggaggctgaggtaggagtttgagcccaggagtttgagtctggtctgggcagcattgcaagatcccatcccccaaataataaataaactaactaagtaatcaataattgaatgagaaaagttagctcatatttcaatatgttcaatcttaggatatatacttctaggcaaccacttagtgacaaaaattctgtagaaatccatcattgaaagttcattatgtaaataaatgtgaagactagataagaaccacagaacacaatgacattggaaaaaatgccacagtaattctttgaaaaaagaaatgcaggcctggtgcggtggctcatccctgtaatcccagcactttgggaggccgaagtgggcagatcacaagtcaggggttcgagaccagcctggccaacatagtgaaaccccgtctctactaaaaacacaaaaacaattagctgggtgtggtggtgggcacctgtagtcgcagctactcgggaggctgaggcaggagagtgctttcagagaaacttcttgatcacaaggggaaatctgaaagttgtcagaacaaaatggagtcacttatgttaagataaccctgacaaatagagccaggaaggccatgaagagagggctcttatccttgcatgcctgaagatgaaaaagactctacaaaacccacaaccttacataaaggtcttcacaaccttaaaaaaatatatatttctgcaaggaatgctgcccagcaactgctggtccaacctaggactaatgtcacccttgttactgatctttgtagccaaggaaaattctgttaaaacaatatgcaatcctccccatttctgtcttcctttatctccctgaatatacacatagtttaatacggcatgtctattcccaattgcaatgctctattcccaaataaacattgtttccggctgggcgcagtggctcacgcctgtaatcccaacactttgggaggccaaggcgggctgatctcgaggtcaagagacggagaccatcctggccaacatggtgaaaccccgtctctactaaaaaataaaaaattagctggatgtggtggtgcacgcctgtagtcccagctacttgggagactgaggcacgagaatcgcttgaacctgggaggcagaggttgcagtgagccaagatcatgccactgtactccagcctagccacagagcgagactccatctcaaaaagaaaaaaaaattgtttcccttaggaagctttcatatgtttgttagttaggttaacacttctaataattaaagttatacagttacagtgtaaaattattagtattaacaacataaacattggtataaaaattattattacagaaattaaaacaaattgagtgtgagagagattattaagactgtccaagccaagtcactgaagtcataaatttaagttatgacaggatgccgagcttccagagggttttgtttttaacaagggaggggccctatttccccttctgacacgctcatatgaacttctcactttgtcgtactccttccttgctgactaagaggaacagaacacagagcagcctggcggtgtcctaccaacaagcctccgtttctccttcctgtacactagggctcctgaaactcacctggtaagcgctccagaaaagcagcaggtggtgactttagggtaggacgggccaaatgggagaatccccttaggtcggtttctctggttctcaacttcttttgaaataacgctcgcagaggaggtgggctttctgagaactgagggaagtaagctctcaggacttccggtcgccatgatggctgtgggcagtcaatggggtcagtgcaagcatctgggccatctttaatgtgggcaggaaaaaaacacgattacacttacttctgcagagtttataatatccttgttcattatttaaaataaaatatctaagacataggtaatagtatattttaaataaaattgaagcaatatatgaaatttctctggaattcatccagccactctcagctgttaccactatccagaaacgtcttaatccgcctgcatgatttatgtatttggtttgtattttaaatatcattttctgtaatatttaaaagttgtatttgcttggtatcctgctatgcattctcatgcaatttgatttttaatcaatattacttttttttttttttgagatgaagtctccgtctgtcacccaggctggagtgtaatggagcaatctcggctcactgcaacctctgcctcccaggttcaagcgattctcttgcctcagcctcccgagtagctggaattataggtgcatgccaccacgctcggctaattttttgtatttttagtaaagacggagtttcaccatgttggtcaggatggtctccgtctcttgacctcgagatcagcccgcctcggcctcccaaagtgctgggattacaggcgtgagccactgtgcccggccttggtttctaaatactattttgaagtatctgtggagaaatggttacttcgagggctggggcaggaatatataagataacattggaacaaattctgacgccagaacatgaagaaatatttgaaaaaggatggggcatattgactgaacacagaagacaaacatgcatgacctcagcctaatcgtgagaaaacatcaaagaaatccaaattgataaacattctgtaaaataattggccatgctcagcaaaagtgtcacaatcacaaaagacaagggaagaataagaaacggtcacagcctggaggaatctaaggacataacaactgagtgcaatgtgagatcctcgattcgatcttggagaagaaagaggacgttaagagaaatattgacaaaattcaaataaggtctgcacattaggtaatggtaagatacgttgacatcaatttcctggttggatacttgtattacatatactattatgtatataattattatattacaattacatatacagttgtatattatatataatacaataaatgtatatatatgattataatacaataaatgtatatatacagttttatatataacaactattatacatataatacaattatatatatagctaacatcaggataggctggttgaggatttatatgaatctttgctaattttgcatgtttaaaattatttcaacataaaaaaattatatgggtcatgtagttttttgtgcagtttaattctaggcaccatagtttctgttttaatgggtgtattttcttctttcaaggaattgggatagtctgttgtattaaaaacctattcatttttgtacattaagattcttctggccaggcgcaatggctcaagcctataatcccagcacttgggaacctgaggcaggcagatcacctgaggtcaggagttcaagaccagcatgtccaacatggtgaaaccccatctctactaaaaatacaaaaaaaattagccaggcatggtggcacatgcctgtaatcccagctacttgggaggctgaggaggagactcactagaactcaggaagcagaggttgcagtgagccaagactgcgccactgcactctggcctaagcaacagagggagactccatctcaaaaaaaaaaaaagattatttctctaacttactggtttatcttttatagcttatttcaggtgatttgttgtgtttgtctatagagtaaaataacatgtctaatgagttataatttaatgtccttccattcaatcactgtatttcaaatttattccaatattttggaataagcttccaatatttta

SEQ ID NO: 1560103 - DNA, 4001 bp, Homo sapiens
tcactctgtctccccggctggagtgcaatggcacgatctcagctcattgcaacctctgcctcccaggttcaagtgattctcctgcctctgcctcccgagtagctgggacaggcacatgtcaccacaccccgctgttttgtatttttagtagagacggggtttcaccatgttggccaggctggtctcgaactcctgacctcaagtgatcctcccaaagtgcttagcctcccaaagtgctgagctaccccgcctggtcctaaaaaaattttttaaaggtttacttaaaaatgatagccaactctcctggaactcctttgaggataagccctgggaccctagttttggaaacgctgccccgctttgttctgttcaggacaaagttggctaccaatgcttgcccagtgaataggttttgcttatgatctggggttctgttgagctgagtgtctgccttgaactctgaaacccccgctgaaataccctccttcccctctcatctggtccaagaagacccaggctctgcaccagcaaaaagagacggcaccctcggacagcagacacaactcctttagtccacgttttcaaagtcgaggtgcagggaaaacccagtgtgaacggactgctcctcgggctttcctttaatcgggccgtttccaaagtggcaaaaaattcacacaggacccaagctagctagaggcctcctgaggggttccccagggcatcagtgcaagaagccctgaaagacaaagccaaatgacacagagtagcaaaatgtgaacaaggaatcaaagagaagagataagaaggagtaacaagaagaagaatgaactacaaagactgggagcgggggtggggggtgctggcaaacgcatttgtgattttcttttccccccagtgaaatgtcagttttgaaagcagcttcggaaaatgtaaccagcttctcacatcccccaaaagaagatgggaggaggctgttagctcttacttcgaagcccggcatcaggaaggggcccgtcccgtccacgtttccacgaggagctcaccctgcggctcccaccgtccccgcatgggccctctccccagatcctgaagtttcccattcgggggtcctgaacgccacacctcgcacagcggtggaactcggtactcgcgggcgccccagaccagcaaacactttccaaccgtcctgagctatccagggggtccccagagggatcccgggccgcccacgccccaccctcctccctgcagaggcggccacgcccgcccccgagacgcccacctctcccgcaccccggacctccctcccccacgcttaagcccaccacgcctggcgtcctccaaattccccttccactcagagccccccacttcctgctcacccacccctcccaaatctcaggcccttcactccccatttcgcgctcccttgctcactctgggcaccttgcccctccggccaccacgcacgccctcttttctctgtctgtcccctggcaccggccctccacggtcgctccctgcaggccaccggctcagtcccggggaccccacgccaggcccccgcgctcagggcccctccccgccggcccccgccccgggccggcctcgtgagcagccccggccctgcgcctgccccggggccccgtactcacggctgtagagggcgatgcccgccgagtccgggccggcgcgcacctcgaggcgcagcgcctgctgctccgcgtgccgctggatctcgccgttcgcgtcgccgatggtgaggaggcgggcgccggggaacaccgacacggtagcgcagggccccgcgccgcccgggaccgccgaccccgcgccgcccgcgcccggccccaccgccgccgccgccgctgccatcttagatccggctccaggccccgccgccgccgccgctgcgcccgggcccaggccgccgccgctgccgccgccgccgccgccgccgccgccgccgccgccgccgccgccgccgctgccgctaccgccgccgcagccgccgtgcaggccgaggccgagccgggcagcgccgcctgccggccacgcgccgcctcgccgccgccgccgccaccgtcgccgcggcccggccccgtggcgcagcgccctctgccggccgtcctgggcgcggggagctagcgagcgaacgagagggcaccccgtggggcgggaccggctacgccccgccccgcgagaacggtcgccgctttgtgaggtggctccaccgcccgggaactgcggggcgggagggtacgtcgggggcggtgctcgggcgcgcgggcacgcccctcggaggcctgggccccgcccccaggccggcgcctcattaacggctgctttcgagtgaggcggtgcggggacggcgggggcggtgctcggccgcgtggacacgccctgtaccccgccccacacaagcagccgcgcgtcgtgatgcggcttccctgccccgacctggacacgcccctgagactgggccccacccccccgggcccgcccggctttgtgaggcagccctcagggaggcgtggcccagccgcgacgaggccccgcccccgtgcctgcccgcgccctcccacccggactcgctttgtcagccgccccgctctggggaatgggcgggggaaagggcgtggccagcgcccgggcctcgcccccaacccttccccccaccgcccccgcaccgacgatttccgatgagccctggcctccaggagcaacctgagcccggttgaaaggacccctccccgacattcgaccgctcctcctcccttccccatcatctctgcccacattgccttcttaatccttaatgtttgactgtctcctttcgcacaagatatcctttgaccccctcctctctcagcccctcctccaacgatgctgagtccagcctggcccggcgcagggcccctctcccgccacacaaacccgtcttctctctgcatcccccttcattttgggtggccccatctcttttgggcgacccagtgagcttgggccacttcctagcactccagctttaactcttccctagacctcatttacgcctcattccttttttttttttttttttttctttgagacggagtctcgctctgtctcccaggctggagtgcaatggctcgatctcagctcaccgcaacctccgcctcccgggttcaagtgattctcctgcctcagcctcccgagtagctgggactacaggcatgctctaccacgcccagctaattttttatttttagtagagacgaggtttcaccatgttggtcaggctggtcttgaactcctgacttcaggtgatccgcccgcctcggcatcccaaagtgctgggcctacaggcatgagccaccgcgcccggccccttttgttttttgagacagggtctcactgtgttgcccaggctagagtgcagtggtgccatcatagcttactgcagcctcaacctcctgggctcaagcaaccccctgcctcggcctcccaaagtgctgggattataggtgtgagccactgcgaggggccctcattctccttcatgtccctcacccgtagcccctgtcattccacctcctaaaccctctaatgcaagtaccgttgcagagaccctggcatggcactgctgcactccccacacccccaggaggctccgcatacaccaccctgactgcccttgagagatgcttcaaatttggtgaattcagacacgctccaccccccagccatccaaccatgggatccagaggtccccagcttgaaggattccactccatagaggcctgggaacaccttgacccgtgttataattaataacttaagcaagccagcaggcagacacacaacacacccaagggcaccctatgctcaaaaacccactggggaagggaggaattccacgggtgtgcagagacctgggacgtcttatggcccagctgggggacaagaaggggtcctgacatctccttctctggtggtcctgaggagccgaaggtcgagag

SEQ ID NO: 1560104 - DNA, 4001 bp, Homo sapiens
cccaggctgtctggggtgcagtggcatgatctcggctcactgcaacctctgcctcctgggttcaagtgatgatcctgcctcagcctcccgagtagctgggactacaggtatgcgccaccatgcctggctaattttattgtatttttagtagagacgggatttcactgtgttagccaggatggtcttgatctcctgacctcatgatctgcccacctcagcctcccaaagtgctgggattatagatgtgagccactgcaccccaccgggaatgctttttttttttctatctagatccttctctgacaattttggtggcataatatctgctatgccttcccccatcaaccatccattcatctatgtttttatccatctatctatccagtcacccatcaattcattcatctatccatctaccatctatccattaattcatcatctatccatccattcacccactcacccttccatctattcatctgtccatctacttatctattaatcagtcatcccatccacccatccttccacccgcacatctatctagtcatccatcaatccaatttaacatccatccttttattcatcaacccatccaccaatttatctttccacttacctatctatccactcatccatccatccatccacccactcacacatctattcatccgtctgtctacccatctattaatcagtcatcccatatacccattcattcttccatcaacccatttatctacccatccatctatctatccatccacttattcatccaaccactcattcattcatccatccatccatccattcatccattatctctctctgtcttccatccctccatctattctatcttccaactatccctccatctagccctccttctatccattccttcatccatcatctctatcttccatctatccatccacctatttacttatccatctacccacccacccatccatccatccatccatcaatccatccacccacccacccacctacccagcaaatattttctgggtatctattatgtgttatgcacttagaatccattaagtaagacagacatgctccctgactttctgtccttctgtagctctagtctgtgacagaaatgaatattaaatctctctctctctctctctctctcacacacacacactcacacacacacacagcaagtgctgtgacgaaagaggagccaaagattgtgagggaggaagtggaaggagcatagccctggagccagaaccgaatcctgcctcagtcccttcccagctgtgtgaccttcggcatctcactctcctctctgagactcgattttcccatccgcaaaggacctggggagagctctaggtgcttaacagcaatggtgacccaggtaggttttaggatccctcttgacctcctggaactttcctcttccttctctggactctcacagctctgcttgctcctacttgaattacagcagtgtttttgattcttactctcatggctgaactggcagctcagttttcaggactgaaagcctgacttcattatctctgtctccatcatggccaacagtgtggcagggagcacagaggtggtgttggagagaatttgctgagtaaacaaataagaaaaaaatgaacagatgaaaagaaagaggggatggatggaaatttcttccattctgccaaaactggccagagcattaattcatgaagggagagggagcgtatgtgtgtatgtgcgtgtgtgtgtgtgtgtgtgtgtgtgtgtgtgtgtgagagagagagagagagagagagagagaggctaatatccaccaaatcacttaccaactctagaggcagctgttcctcaaggccaagttcaatctcactactctcctagttgccaatactgagctgggcaccgaggaggagtcaggcccacgtactgatcttggagaaggggctgacagtgtggaatctcccggggtttctcctgagaagcctggtctatgaatcgggtggcacaatcacctggccctttattgtcggtgagttttctgtcactcaagaaacctcatgacacacccttggcacacagctgtggtgtggaaatggagccaacgccaatgggatgagtgatcgcaaggctgaggggactccctctggcaaaggtggcctaggcagagagtctaaatgagtcagatgtctgtgccagcccagccacaacctctcccaacccccatcccatagccagcccatctggttattaccatcatcattatgcctagtttattcatctcaccttccactgtgtagataacaccgacttcacttagttattatctcatcgagtcttcaagagtctagacagatcagtatttttgctcccattttgcagatggagaaactgaggctcatagaggtgaaatgactgcccaaggtcagcaattggcacagttggcattcaaccctataaggggtgaggtgtggtgggtcacgtctgtagtcccagcgctttgggaggccaaggcaggaggatcgcttgaggtgaggagtttgagaccagccggggcatagtgagaccctgtcactaaaataataataataataaaaatgatggcatatacctatagtcctagctactcaggaggctgaggtaggaggctggcttgagcctaggagtttgaggctgcagcgagctaagattgtgcctctgcactccagcctgggtgacagagcaagactctgtcttaaatataaaaacaaacaaacaacccctaaaatgttccagcccagttgccttaactgatgcatcatgatgattcctctcttcctcctcctcttattatttttcagccattttgtttcattttatttcttatgttaatagtgaaaccaaaggcgaacctgattaagccctccagacttaatctgccttgcgtttaattgcttacttacttttaattgcttacttatagttgatcttaaaagcgccactagcaagtcacgtagccaaataatgcataactaaactcccactggcttccttacagataacatttttgtctgtgggacactatagtaatgggtgcttaaagttgtttttcaggaactaggtaggaggcagctcttgtttagtttaagccagtggagatcactgacccttcaactgcacctatgtgggtagctgatatcagagggccgtaaactccaccttcagatcatgctaaatgctattttttgcacaaatgtcctatctaaagccatgtagctcaaccatgcttgctcagaaattctgattacctcaccttccctacctgccagtcacctttctccgtactttagatcaccccgttttctatcccataagcaccctcaaaccctatttttggggaggagaatttgagacctgttttaccacctcgtcgcttaattgcctcatgaacgaactcttcctcttctgcaaaatctgtcattacattgattggcttgctgcacagaggaagaacaaactcggttcgatagcaacagcttaaatgagatataatttacgtattatacaattcacccacctgaagtgtgcaatccagtgggtttcaatatattcacagtgatgcaaccattgcgtcagttcattttggaacattttgttttttcttttttcggagataagatctgtcacccaggctggagtgcagtggagcgatcacagctcactgcagcttaaaactcctgggcttattcgatccttccacctcagcctcctgggcagctgggactacaggtgtgcacgtacatgccttgctacttttttcctcaagattttttgtagagacaaagtcttgctgtgttgcccaggctggtctcgaacttctggcctcaagggatcctccccactcggcctcccaaagtgtgagattacaggcgcgggccaccacacctggctcattttagaacatttttatcaccccccaaaagaatcccagtaccctttagctatcactcccaatc

SEQ ID NO: 1560105 - DNA, 4001 bp, Homo sapiens
gtccagggaactgcatttctaaccaattataataaattccaggtgatcttgatgctgctggtccagggaccattctttgagagcctgtgtggggaaatgagagaactggatataacccacattttcagaactcgagacaaatcctattagtaaatttcactggaaaatgtttctcccacttactaggtatgtgttgttaggcaagtgtgtctttaactttcctaagtatgctttcgtatctataaaataagggtgttggccgggcgcggtggcacacgcctgtaagcccagcacgttgggaggccgaggcaagtgaatcacgaggtcaggagttcgagaccaacctgggcaacatggtggaaccctgtctctactaaaaacacaaaaaattagctgcacgtggtggcaggcgcccataatcccaactactctggaggctgaggcaggagaattgcttgaacttgggaggcggaggttgcagtgagccgagaccgtgacattgtactccagcctgggcgacgagaacaagactccatctcaaaaaaataaaataagggtatggctgggcatgggtggctcatgcctgtaatcccaacactttgggaggctgaggcaggaggatcactggagcctaggagttcaagaccagcctgggcaaaacagtgagaccccatctctttttttttttttttcctttgagacagagtctccctttgtcacccaggctggagtgcgatctcagctcactgcaacctccacctcctgaattcaagcgatttttctgcctcagcctcccaagtagctgggattacaggcacctgccaccaagcctggctaatttttgtatttttagtagagacgaggtttcatcatgttggccaggctggtctggaactcttgacctcaagtgagtgatctgcccacctctacctctcaaagtgttgggattacaggcgtgagccactgcacccagccagtgagaccccatctgtacaaaaaataataataaataaaataaaataaggttaaggaatcattatgaatcttcctgtaaacatcaaatgaggccatacaccctaagaatacagctcacaggtccctactgaatgtgacagtttagtccagatgggagttccctgagggcaggaacggagtttcagcaactggtccccatggcaggttggagtatgcactaacctaacatttactgaaatttcaaaatgtgctgggtaaggctgggcgcggtggctcacgcctgcaatcccagcactttgggaggcgggggttgcagtgagcagagatcgcgccactgcactccaccctgggaaacagagcaaaaactccggctccaaaaagaaaaagaagtgggagggctaggcccggcgtggtggctcacgcctgtaatcccagcactttgggaggccgaggcaggcgggtcacgaggtcaggagatcgggaccatcctggctaatacggtgaaacccccgtctttactaaaaatacaaaaaaaaattagccgggcgtggtggcaggcgcctgtagtcccagctactcaggaggctgaggcaggagaatggcgtgaatccgggaggcggagcttgcagtgagccgagatcgcgccactgcactgcagcctgggcgacagagcgagactccgtctcaaaaaaaaaaaaaaaaagaggtaggagagcttaatatcgggctgggaggatggggtggagtagggtgagcgaggcgtcaagttcgattcctaaaaagagtaaaaggggagcctcagtgaggttggggagcaggcctcggctccaagatgaaccagcaccctcccgacccccggcagcaccccagccccaggagtcctggcagccccaccgacagagctgagctgtgaccagcggtcggagccacatggtcacagccgccaccagcatcaacatcagcatcgacttgggcttccgccgccaccactgcccctcaaccgccacggggagtcgctgcacaatccgagtacgtgcaggctgaagccctgcgcatgcgcatcaatgagtcccgggagcgggcctccgcgcactgcagcccggcgctccgcctgaatcttgagcatgcgcagacgaatcccgggaagcccgaatccgcgcaccccaaagtgcgctcagagcctgagtatgcgcacccggccacccgtggccagtctagagtctgagcatgcgcatgttgtccgcgcgcctaagcatgtgcacaggctgctcatgagttcctaaacgttgcgtttgcaacactaccagtgttttgtacgggcgctggcgcctgctcacagccttccacgtgaccggaaaaggccttcagcgcataaagtgggagaccggaagaggcggagacgatccgatgctcgaactccgccccctcttctccgcgtaggcccagctccctgaagcggctgtttcgagccacgcgcccatcgggtaccgaggcacgcgccgggcgtcacgtgcgtttcgcggcgagcggaaatgacgcgagttgtgtgagccgccagtatggccgggctatggcggcgagcactggctacgtgcgactgtggggagcggcgcggtgctgggtgctgcggcggccgatgctggccgccgccggggggcgggttcccactgcagcaggagcgtggttgctccgaggccagcggacctgcgacgcctctcctccttgggcactgtggggccgaggcccggcaattgggggccaatggcgggggttttgggaagcgagcagccgcggcggaggcgcattctcggggggcgaggacgcctccgagggcggcgcggaggaaggagccggcggcgcggggggcagcgcgggcgccggggaaggcccggtcataacggcgctcacgcccatgacgatccccgatgtgtttccgcacctgccgctcatcgccatcacccgcaacccggtgttcccgcgctttatcaagattatcgaggtaatgggagtccccgcctcggcctcaggtttcccacctgtgcaagcagcgggctgaaccgtgggatcacttgagcgcccttgtgtttcgcaactttttcagacatgaagtttctcgaagggtgcagttcgaatccttgtctgctcaccactagcttgggaaccttgagccaaagtcctctccctttcggatttcttaggatccgttagatgagaggagttgaacccgatgagcctaggattatccactttagaacgccggtcatagaaatccggggccgggagggacctgagtagtgttacggcgctgttagttttctccttacttggcacgagttttgtaatacctcctcgccccaggcgctctgccgtctggttacgagcctcactgggatcagaattcattcctttcttagacaaatacttcttgattgcttattatttgccagagagtgttctaggttctggggatatggcagtgaacaaaacagacaaaaatttctgcctttgaagctgggcatggtggcgcgcgctgtactcccagctactctggcggctgaggtggaaggattgttggaaacctggagtccagcctggtcaacatggcgagaccctgtctcttaaaaaataaatctgccttggagcttacattttggcaggatgagacaggcaataaagatgtttagtaacgatattgtattagaaggcaataattacgagaaatagtagagcatggatgggacaggaggcttaggagggtgggaagaggtgggttattcagtgtgttcttgacctcctaccacgtagcaagttctgagaatactgtagagaacaagtcattccggtggtagaaattagatcatttcagactaagagccttgggggtggggagggagcaggatgatgtaatagagagaaagcagtgagtgtaaggaacttgagcttttacagtaggaaggccccaaaagccttctcccccagctccccttcccttaaaaaaaaaaactactgatgtggaaagtggcatc

SEQ ID NO: 1560106 - DNA, 4001 bp, Homo sapiens
gaggttgcagtgagccgagatcgcgccactgcactccagtctgggcaacagcgcaagactccgtctcaaaaaaataaaataaataaataaataaaaatgttagaggtgggaaaaccaaggctcatagaatgagcctatccgtgctgcacccactcaccttttcctcgcaggagtagttgatcttcaggtagtaagggaagcccaggtatttctgcaaagagaggttaggccacacgtccagaaatgagtggagtgcgggttcaaaatccctctggttcacttgaccctggtcccctcacctcgctcgggtcgatgggtgagtccaccagcatgtgaaacaagctgctcactgtgtccacgggctcttgctcaaagaagctgtcgctcacaccactctcgcctaccctcttaaactcgttcaggacaacctgccaggtgcattcctggaaatccttgatcgcccacagcctccacgacgccaggagcactgccagcagggcccacagcacctgcacgactcggactctgggccacggaggaccggcagggaacatggctgggccgcacataacgtggctagaacctggagaacgcaggagtcaacacccacgcgccggacagctctctggagcccacttttaagattccacctcgcttctgcgcctctcacagcacttgctcctggccacgccccggctcttgctcctggccccgcccctgcacttgctcttggtcccgcccctgctcttgctcctggccctgcccccgcacggacttttagccccgcctctgctcttgttcctggctccgcctctgcacttgctcctggtcccgcccctgctcttgctcctggccctgcccccgaccctcgtgggtatcgcacctctgctattgctccgggccccagccctactaatgtttctggccacacccctgctcctccgcctcgttccgccccgccgcctccacgtctcttcctttaactttatcctcaccttgctccttattccgccccctccctgtattccactcttgctcttcacctggtcttggtttctatttctcgctttgacagtccccctcttaagttcccccgtactgcttctgcctgcgatcgcacccgtgtacttccacccggctgtgccccaacctcttgccccaccctcgcacttctcttggtatcgccgctttctcctcgctcggggtctgcccaggggctgggtactgtacctggtctcgcccgtctccgggccccgcccctgctcttgctcccggccccgcccctgctcttgctcccggccgggcccccgtttctcgcccggggcttgctcctcactctgcttccgctcctgaccgcgcccctactcctccacttggtctttatggacccgttccttccccgggttctcggcgattggttcttcccgcgcgggcccgtcgccccgtcccgccctctggtaacgcccctcctcctcgccctgccccttctcgatgaaaactgtctcttcgcctcgggatctttcctcgcccttcgttgtttcctcgccccacaccttctccttccacgccggcaccagcttcttagccggcaccttcttgagtctcaccttcccctcgtaccgcgacaccttcttgccccacttcttactcttccttcccatgccattaacacctgcctgctctataccccgactctcctgccccgccccgcccttcgcccttcacgttcggctccccctttccctcctctgccagctcccacgactcttcccctctttccctcctctcccagctcccacgactcttcccctctttcccctgcctctccccttctcgccttccccttcccctccccttcctagttcctccccgtccccggcatccccccgcccctggatggcacagctttttccccggccccgtggtaccagtcacttggttaaaaccggtcaactgtcactcggccgcaccagtcccgcccctcttgcccggtctcaaaatggccgcccacacttccacagccgacttccgcctttgcagaggcacgccctcctctcacgcggtctccaaggtgacgcgcaacccctaaggcaccgagggctggaggctgtctcagcactgagggcgcggggcctggtcggcagagggtgctggagactacgtttgtgccaggaaggccttcaaggagtttctattggttgttctggcagcaagcacggtccctacttgtgcttcctacccaaatatatatatatatatatttttttgagacggagtttcgctctttctcccaggctggagtgtgaagtggcgcgatttcggctcactgaaacctccgcgcccctgccccggattcaagcgattctcctgcctcagcctcccgagtagctgggattataggctcccgccaccacgcctggctaatttattttttgtatttttagtagaaacggggtttcatcatgttggccaggctggtctcgactcctgacctcaggcgaaccacccgcctcggcctcccaaagtgctgggattacaggcgtgagccactgcgcccggccctaccccaaaattctactccttaaaaaagtgtggtttcctggagaccttgtgagaatgaataggctgcttagcaccgtcctctacaaaacaggacaaggacagccatcctatactgttgtgggaagtgtgcccggctcaagtaaaatattcattaagttaattttcatttgcattctgatgccttacaggtaaggattcaggccatgactttttgatgaactccagaccagacgtttaacccagtggttttcaaatttgagcatgcattagactcacctaaaaggctgggtaagccaggttggtgggtaccacaccctgagtttttgtttttgttttaaagatggagtctctggctgggcatagtggctcatgcctataatcccagcactttggaaagctgaggcaggcggatcacttgaggtctgaagttggataccagcctggccaacatgataaaaccttgtctctaccaaaaaatacaacaattagccgggcatggcggcgggcacctgtaatcccagctactcgggaggctgaggcaggagttgcttgaacccaggaggcggaggttgcagtgagccgagatccctccactgcactccagcctgggcgacagaatgagaccctgtctcaaaaaaaaaaaaaaaaattaagccagatgtggtgctgcacacctgtaatcccagtactttgggaggctgaggtaggaggatcgcttgaggccagcctgggcaatatggtaagaccctgttgctaacaatttttttaaattagcccagtgtggtggtccatccctgtgaccccagctacctgggaggttgaggcaggaagaccacttgagcccaggagtttgaggctgcagtgagctctgaaatacacggaaatgcagtgagctgtgatcacaccactgcatttcagcctgggcaaaagagcaacaccctatctcaggttagccttgaatttcaggcctcatgtgagcctcccatctcagcctcctgagtaactacctggctacttccagaatttttcattcagtagatctggagtggggcctgataatttgtatttctggcaagttcctaggtgatgctgatactagtggtctggagaccacaccttgagaaccagtgctctagaaccttccatgaccctctaggccctcaggaaaacttccaaacccctcggtttccagagcccctcatactctcctccctgtcattctatctggctcatctgccctctcccccttagacctctgtggtccacagtctggtcacatggagcgacttgaatatccttggtcaggtgtgagccatgcatgctccagacctgtgcagactcagtaatgccctctggaataccattccatgctttttaacagggcccaccactttccttcctttaggtcttctctgtgatacatgaccagccctcatcct

SEQ ID NO: 1560107 - DNA, 4001 bp, Homo sapiens
gaattaaggaaacacttggctggacatggtggctctcacctataatctcagcactttgggaggctgaggtacgaagatcgcatgaggccaggagtttgagaccggcctagccaacatagcaagacctcctctctaccaaaaaataaaaagattagtctggcatggtggtgcacgcctgtggtcccagctacatgggaggctgaggtgggaggatcacttgagcccaggagttggaggctgcagtgagtcatgatggtgccactgccctccagtctgggcgacagggccagaccttgtgtccaaaaaaaaaaaaaaagagacactacaaaatatttaatataaagaagtggcatgggtccctgaactagaccttgttctgggctctgggccccaaacctcatctgcctggtcactctgagattccttcctcagtgcagaacagcagaggggtggcctccaggcaggtcctgggtctggagccagctgttcctcaggaactaaagaccaagtgggtagtccaggcagaaaccgtgatgggggcctaatgatcagtttctttgggtgtgtccatctacctctcctccacctaggagcccatggggtctccacattctgaggcctgatcctcccagctgggcctcccaaagagctgggattacaggtgtgagccaccgtacccagccagaccaggccaagttctgatcacaaatgtgcacacatctagaaaactttgaatcagagaataatagtaatagctaacttttattttatcctcagtgtaggaaaccccatggggtccctgaattctgagatagtgggatagtgggaaccagaattgggctgctgggtgaccaaggaaatggcaaaatcgggctgagggcatgggtgcccaaggaaggagaaaactgggtggcccattttccaggttcccttaggaaggaggggctggggcctggacccctgggtctgagggaggaggggctggggcctggatccctgggtctgagggaggaggggatgggggcctgagtttctgggtctgagggaggaggggctggggcctggacccctgggtctgagggaggaggggctgggggcctggacccctgagtctgagggaggaggggatgggggcctgagttcctgggtctgagggaggaggggctggggcctggacccctgggtctgagggaggaggggctgggggctggagccctgagtctgagggaggagggggtgggggcctgagttcctgggtctgagggaggaggggctggggcctggacccctgggtctgagggaggaggggctgggggctggagccctgagtctgagggaggagggggtgggggcctgagttcctgggtctgagggaggaggggctggggcctggacccctgggtctgagggaggaggggctgggggctggagccctgagtctgagggaggaggtggtgggggcctgagttcctgggtctgagggaggagggggtgggggcctaagttcctgggtctgggggaggaggggctgggagcaagacctgggcctcaccccagaggactttgttctggggcgaaggctcacctgagtctggagcccgcccggaagagctcgtcgttggcactccttcggccccggggaggcagcagcgcggccacctgcctgctcttggcctccagattggccaggtagatgagtagaaagtccccagagccgccgggacccccggggccgcctccgccggccgcccgccgagaatgggccacctctcgaagcagctgcgctgtgcggggcagcaggtcccgcagcgaagggggactcacggacagccgggggtcgacgcattgctcttctaggcgctgcagcatcctgactgcccggcccagggcgcgggcctcttcccactgtcgcccccacggggccaccgccagagccatgggagcctcgcgtgtgccgggaaggaccggtgcggctgggataggggcggcctcgcccagagtgaaaggagagggcgggtcctagagaaccggggaggggcctgcaggtaccagtgtctccaaagggggcgggggctggaggacctggcacgtgggtcttcaagaggtgggatttggaggccgggagcggtggctcatgcttgtaatcccagcactttgggtggccgaggtggaaggatcacctgagcccaggagttcaaaaccagcctgggcaacatagtgaggccctatctctaaaaaatttttaaaaataaaataaaatgtggctgggcgcgatgactcacaactgtaatcccagcactttaggaggccgaggcaggcggatcacctgaggtcaggagttcgagaccagcctggccaacatggtgaaaccgtgtctctactaaaaatacaaaaaagaaaaaaaaattagctggtgcggtttgagtttgattctcaaaaaggagcagggtggggtggctttggtgggtagcggtaggagggggcttctcagtgtgtgggtgggaagtgcaggtaggatatctgggtcccttcagagaggggcaaggggctaggggaggcctgggactttttttttttgagacagggtcttgctttttcacccaggctggagtgcagtggtgagatcttagctcactgcaacctctgtctcccaggctcaagtgatcctcccacctcaccctcctgagtagctggggtcacaggcgcgcatcagcagtcctggctattttattttattttattttttgtatttttagtagagacggggtctcaccatgttgcccaggctggtcttgaacttctgagctcaagcgatgcatccgcctcggcctcctaaagtgctgggattacaggcgtgagccattttgccctgccacgggactcttcttggagaggggaggggaagggctgggagctaccgagaggtgggacttggacacagcgccttgtcgaaggtatgggtctttggtcgtggcatgggattaaaggtcagataactgagatttcaaggaggaaccggtcagggaggcattgctctctctctgtctccgaggaaggaggcacagagccaccaggcccttgggttccctagaagcaagggtttgaaagtgggtgtctgagggggcaggaatttggcaacaagatttctgggtgcccctaatggtgtggcatgggagaaatcaggccagagttaagatactcctgagtcccgaagaagccaggcgggaggatggcgttcaagactgtgggggcggggagcaactcatttgtgtaggggtggccgggcgtggctttcacccaacctgtagaacctgtaacatcagcctggttgctcagttgctcgctgggcagccatcggggcgctgtgggcctcgcccctaagcaaggcattctggccgcgccccatcctaggccaagccaagttctttttttttttttttttttcctgtgatacagggtcttgcttggtcttgctctgttgcttaggctggagtgcagtggcctgatcatagctcactgcagcctggatctcctgggctcaatcaatcctgcctgctcggcctcctaaagaggtgggattacaggcgtgagccaccatgcctggtcagaccaggccaagttctgatcgcaaatgtgcacatatctagagaactttgaatcagagaataatagtaataactaacttttattttattttattttatttttttgagacagggtcttgctctgtctcctaggctggagtgcagtggttgttggatcaccactcattgcagccttgacctctggggctcaagtggtcctcctgtctcagcctccctagtaactaggactacaggcatgcactgccacgttggctattttttttttttttttttagtttttagtagagatgatgtctcactgtgttacacaggctggtcttgaacttctgagctcaggcaatcctccagcctgggcctcccacaatgctgggattacaggcatgagccactacaccc

SEQ ID NO: 1560108 - DNA, 4001 bp, Homo sapiens
atcccagctactcgggaggctgaggcaggagaatcgcttgaacccgggaagcggaggttgcagtgggccgagattgcgccactgcactccagcctggggcgagagagcaagactctgtctcaaaaacaaacaaacaaaaaaagaacccctaaccacaatgcaggtttgccatgcagacccgtcttcctatcttggctaatgaccaatcatgatgtgataacatcgtgtttaaccatatgaaattgcctttcctgtaggtaaaaaatggccaaatattggcaattatgtatggttccaccaactagtaataatgataatagtaacatttattgagtgctatgttctagcactttccataaactatctcaatgactctctacaactgtcctgtaatgtagggtctcttggaggtctccatttttaattttttatttatttatttattttcagaaggaatttatttatttattttgagaaggagccttgctctgtcacccagtctggaatgcagtggcgcgatctcagctcactgcaacctccgcctctcggttcaagcgattctcccacctcagcctcccgagtagctgggattacaggtgcccgccaccatgcccagctaatttttgtatttttagtagagatggggtttcgccatggcctcccaaagtgctgggattacaggtgtgagacaccaccccggacttccatttttaattttttatctttattttagagaaagagtcttgttctgtcacccaggctggagcagaagtagcgcaatcatagctcactgcggtcttgaactcctgggctcaagcaatcctcccttcttagcctcccaagtagtagtactacaggcacatgccaccatgcccagttagtctttttttgtcgagacgggggtcttgcttttgcccaggctggtctcaaactctggcctcaaatgactctcccacctctgcctccgcctccatctcctgaagtgctgggattatagagatctccattttacagatgagaaagctgaggctcagagctgtaaagtcaagtgtccgatgtacagaggccaggagggaacttcaggtcagccagactctaatatctgaacaccaagctatgtcctgggctccttccatcaaaactgagaaaaatcaaactatctggtgcctggggcaaagaagtcgggagagtgagaaggggtccagccacagtgccataagcttatggctgcagccctggatttgtgcttagccctggccaagctgttaatccctatgaccttgggcagatgtcttcacgtctctgagtctcaaagtcctcatctgtacaatggaataaaaagagtctgacatggcccgactgatgcaagggtttgatgtgtcaagtccgaggactgcccctcctcgactggagcagctgtggcaacaggtggccccgaacccggggcagggccccaggagctggggagccaaggccagtaggccacacttgggtggtgttggagcctcacctggggggaggcggggaccggggcttacctgtggggcggagatcgggcttccctggggggtggggcccttccctgagcgagtgacgggggtggggagggatccccaggtcgggccgtggggcgcaaactcacctggcgggcggccgcggcgcctctgcccgggggtcccgggggtcctttcctcttgtgcatcttcaaggctggatgcccggaccacctgcccccaagcccggccttgccctgcctccttccccgggctctgtcgccgcgcactcgcccttcctgagtcctgcactcctcgtcggcgccccgcggccgtcgatcccgagccctcgcttccctgcttggccgtcccacttccgcctcgggcctcgggcgccgccgcaccggagcgcggccactgggctcgccgggtctgccgagccgaaactacaactcccggcaggtagtgcgtgggcgcgcaggcgcctggctggggcggtgctgactgtcgcgggctgcgagggcggtgtttgcgtcgctcatgcgcggggcgggacctcgcggggcgcgggaaagaggcagagcgcgcgcaggtgtgaggggcggcgacatctgtggggttcagagcgtctgtcagtcaccgacgggctccggcttcacgtgggctctcggcctgtggagtcctcacttctcggtggtcggcgtagtgtcagtgtggggcttgtcaccgggagcggggtctacagcgcccaccctcaggcctttccatctttcacctccggactcgaggcctccagcgttctgtgagggccaatttggccatttattttttccaaaaagagtaacgcggataattcaagcgacttattcccaactgatccaggcagagctcgtttctgataaggacagagggtcctcaacgacttctgtggcccaggtccgttctggtttgcctcgcccccaaggctgggagaaaccggcctatggcagctctttcccctccaaggacccagctgtcccctttaaagtggcacgatcttggctcattgcaacctctgcctcctggccttgtaccacagcctcctgagtagctgggattacgggtgtgtgccaccgcacctgactaatttttttttttttttttgagacggagtctcgctctgtcgcccaggctggagtgcagtagagcgatctcggctcactgcaacctctgcctcatgggttcaaggaattctactgtctcagcctcccaagtagctgggattacaggtgtgcgtcacgatgcccaggctaatttttgtgtttttaatagagagggggtttcaccatattggccaggctggtctccagaggcccctggagagtcctcaagtgtccttggaagggcccccagataccccagtctggagggaggggcttcacacaggctgtttcatcctagggaccagagtctgggtccccggggctatctataaggaccccccagggcccatttgtctttcaggtcctgggcataagatcttcagtttggaggaggtttgaattcctacctggccatggcccaaagtggctgtgactctgtgtcccatcctgtgtcccagtgggagccatctgacccctggggcagccaaatgggctgaggtggaggtaggggtaacctctgctctcagccaaagccactggatataaacagagacagagactgcttataatgatgagagattttgcttgttttcagatttctcaaggggaagataaaatgactaagaggaagaagctgcggacctcaggtacgttcattcaaatggacacttgttgatttctgcttctgcttgtgggaagaatgtgggcttgtttattgcagatctggctaacacgactgccttaacctccttaaaaggaagcaaggattggccgggtgcggtggctcacacctgtaatctcagcactttgggaggccgaggcgggcagatcacaaggtcaggagttcaagaccagcctgaccaacatggtgaaaccccgtctctactaaaaatacaaaaattagccaggtgttgtggcacatgcctgtagtcccacctactcgggagactgaggcaggagaatcgtttgaacctgggagtccgatgttgcagtgagccaagatggtgccactgcactctagcctgggcaacagagcaagactctgtctcaaaaaaaagaaaaagacaaaaaggatttaattcatgctggtaagaaaaatagaaggccggtgtggtggctcacgcctgtaatcctagcactttgggaggccgaggtgggcggatcgcttgagtccaggagttcaagaccagcctgggcaacatagcgagatcctgtctctacaatgtaaagtaaggaaattagctgggcgtggtggcaggcacctgtagtcccagctactcaggaggttgaggcaggaagattgcttgaactgggaggtggaggttgcagtgaatccagatcgtaccactgcactccatcctgactg

SEQ ID NO: 1560109 - DNA, 4001 bp, Homo sapiens
gaatcaggggctgcaccctctctccctggctgggagatttggataattttctcctctggggcagggaagctgaggatctcatctccttgggcagggctcactctttgggtcttgggggcttaggcatctcttcctgggcctgtatccatcatctttttttgtttgtttgtttttgagtctcactatctcctaggctgaagtgtagtggccctatcatatttcactacagccttgaactcctgagctcaaacaatcctgcttcagcctcctaagtagctgggactagaggcatgcaccaccatgcctgactattttttttaaactttggtgcagagagggtcttgctgtgttgtccaggctggcctcaaactcctggcctcaagcaatcctcctgccttggtgtcctgaagtgctgggattacaagcacaaactaccaaacttggctaatttacctgcaatttttggagagatgggatctcactgtgttgcccatgctggtttgcggttggcctgattatagcttactgcagcctcaaactcttgggcttaagcaatcctcctgcctcagcctccaagtagctgggaccataagtgcatgccaccatgctgggccactaaaaatttttttttttttgtagagacggggtctcactatgttgctcaggctggtctccaactcctggcctcaagcaatcctcccgcatcggcatcccaaaatgctgggattacaggtgtgcaccaacacacccagctaactttttaaaatttttggtagagacaggttctcacctgtcacccaggctggaacacagtggtgccatcatagttcactgcaacctggaaggcctggactcaagcggtcctcacaccaaggcctcccaaagtgctgggattacaggcgtgagctactgcatctggccctcatcttcttgtgcccttattcaccggagttgggtgttctctctatggaaatattttttttttttttttttgagatggagttttgctcttgttgcccaggctggagtgcaatggcacgatctcggctcactgcaacctctgcctcccgggttcaagtgattctcctgcctcagcctcccaagtagctgagattacaggcatgcgccaccaggcccggctaattttgtatttttagtagagacgggggtttcaccatgttggtcaggctggtctcgaattcctgacctcaggtgatcaaccagccttggcctcccaaagtatggaaaggatttccccggggctggacaccgcatagcggaggcctcagtctttgcagttaggctggggttgggcgtgggggagggtcccaccttctcagacttgggcctgtagccccgcagcttgacgctctgctggttaataagcagacccttgcgcacttcgctgagcctgtggtcggtgacctcgcgctggcgcagcagctgtcgcacccgcccgttaatctggtgctgcgcgcggccgaggcgggcggcggtgaggcgcgctccacgcgcgtgcgcgtgcaccacctcggtggtctgcagggcgcgcgctttgcggtgcaagggtagcggcaggcgggcgtaccaggcgggcggcttcatcttgcccttccacagcgtgacgccctcgcctggcggcggcttctccaaggtgccgccgcctttgatcatctccacgcggaagcgccagggctggatgtaggcggcgcggccgaggtggtgggccacgttcgggtccagcacgctgtccttgggctgccacatggtcaccgcctcctgcccgcagcgatcggtcagaatgtgcgcggtcctcgccatggcctgagctgcctcgcgccatgctggggccccaacgcgtgtgtcctggctgcgctcagccgggggtaccaacacgcgcatggtccctgcttggtctctcggcctggccgggaaccctaggcggagcggaagggaccccaaagacacacaactctttcctggcctgtagagacagtgtactgagagcgcccgtcaccatagcgatgggcgcaacaagggaggtggaattccagaggtggggggaggagtaggatggagtctttgctttggaacttggcctaagtgcactggcatcctgactccttgagaaagagcccatctagcatccttctcgccgttgcttccagcaacatggcccttcttccagctttaggatgtcctaagcgcttccagctgtccaggtcacactctgtcgcatgtcggtaagcatggaagaagggccaggcttctcaccaggcattcctctcgccgttaccttccagcacatggcccttctttcagcttcagggtgtccgaagcgccttcacacttggaagcttgggacttgctgttcccacaggtagaatactcccatggctggccactttgcagtcttcagatttttgctggctgggttcttggtgtccttgactacccaaaagtagcttttttagtcttacgttttcttttcttttcttttctctctctctctttcttttttctttctttcttttttttttttttcatagagtcttgcactgtcgtctgggctggagtgcagtggtgcgagctgggctcactgcaatcttcacctctcgggttcaagagattctcctgcctcagtctcctgagtagctgggcttacaggcgcccaccaccatgcccagctaattttttgcattttttttttttagtagagacggggtttcgccatgttggccaggctggtctcgaactcctgacctcgtgattctcctgcctcggcctcccaaagtgctggcattacaggcgtgagccaccacgcctggcttagtcttacattttctttcgtgtcttcatagcactcaccgctatctgaaattatcttattcatttattggtttactttttaacttttgggcatctctcacctgccctagaagaattaagagcctttaaaaaaaatttatttttatggatttgggatacaagtgcagttttgctacatggatatattttctagtggtgaagactaggcttttagtgcaatcatcacccaaatagtgtacattgtagccaataggtagtactgtatccctcacccccttctcaccctcctacctacgggagcctccaatgtctgttttccactctgtttgtccatgtgtacccatggtttagcttccacttagaagtgagaacatgagtttttttgactttctatttctcggtcatttcacttaagataatggcctctagttccctccatgttgctgcagaagacaagatttcactgttttttatggctaagtattccacggcatatatatgtgatatatatctgctatatatagagcacatacatgtgacatatatgctatatatatgtgccatgtagataggatatctatgtgatatatatgttatctagagagcatatatatgatatttatagatatatagatatctatgtgatatatatgctatttagatagcatatctatgtgatagatatgctatatatagggcatatgtatttggtatagatatgctatatatatgctgtctagatagcatatctatgtgatatatatatgctatctagatatatgatagatatgctatttatagggcatttgtatccgatatatatatgctatctagatagcatatctatgtgatctgtgtagatagcatatatgtatattttatatatatatgtttatatatttgagacaagatctcactccaatttcccaggctgaagtgcagtggcatgatctcggctcactgcaacctctgcctcccaggctcagctgattccatcaccttggcctcctgaatagctgaaattacaggtgcctgcctgtaaaaaaaaaaaaaacgcgaattatttttgtttttttagtggaggtggggtttttgccatgttacccaggttggtttcaaactcttggactcaagcaattcgacttccttgacctcccaaaatgctgagatta

SEQ ID NO: 1560110 - DNA, 4001 bp, Homo sapiens
acacctgcctccatccgagcagaagagatgaatttgtccagctggcaccgcaggaagtccctctcttcctccaggtcctcgatgcgcttctgcagccaggagttcctctccagagccatgtgcagctgggtcttgacgctgttcatcagagccagggcggaggacgcagcctccggaggctctagggacacagcgagggtggggggaccaggtcacaccctgggactcagggcttggcttcccagctgactccagtccctccacaccccctcagctcaccctcgaagtttctccgagaggggctcagactgtaaaagatctgtgggtctaggtggggtgcctcatcgaagggaatggagatctcgaaggtctcatcgtccttcactggagaggagaggccccgggttaccccagagaattccccgggcctctcaggccaccccccaaccacggcagcctggagccgaccgcactgggacccagggtagggaaggggacccagcttcctcacttgtccgcctccgactgctccggtcattcatggcgcggcttcctacggaccccagcagccgagggcctcaggggcactggacagaaacggcagccacaaatggagagacgcagatggactggagggtccatcctgggggaggtgaagtgagacaggagggaccttctggcctggacccctggtctgagggaggagggagcctggaccccaggactgaggcaaaacgcgcctgggcttcaaactcctgggctcctggagtcaggggcagggggcccagccgcctaggtcctgggggagaagtgagctggggacgtgggctcctgggtatcgaaggaaaaggaagctgaagccctaaattgctgggtgccccaaggggtcgcctgaccagggacacctagcctgaaggggaaggaccctctctcatcgcgggccactgccaggcctaaggaagaggcaggtgcagggggaaactgccccaacttcccagggtaggaggaggtccagcccgtgcgcgctgcctcctctaccttcggggcccccacacccctcccccgcactcgcgtgggcgggcggaccgtcccccggtggtgggggctgggcgcgtgcgcagtacggggaaaggtcacgcgtgggggtgcgccccccccgcccccgccctttgtcccgcgggtgggagggggagcggtcgtggaacgattccagcgggaacatgcactagggcgggggtgcaaacgcggccaccatcccccgcccgcgggtgcccggggtccgaggggccgaggccccccgcgctcacccacccgctcgcggaatccggctcggggaccgacggcggcggcgcccatgcccggcgccggggagcgtctgcaaagtgtcacggggagccgagggaagcgcccacccacccgcgaacaggcggggcggcaggggagcgtgtcgtggaactgagcgacggaacgggcagggacgcggggactcgcccagtcgggccaggctagcgcccctcgttgaagagtccccgggtccaggtgaggcccgccgtttgcggcagaagcagagggtctgcacttgcgcgatagccccttacagcactcccccgccctccccgaagctcaggcagggaacatcacgaaattcccatcctggagagctggcgagtctccgggggtccccggattgggtggcggtgtgcccaatgggcccagaaggcaggagagtgtttgagacaccgagaaagttggagcgaaaggagaatctacttttaacgctctctcaggaactagccagcgcggacccctcagagctcccctacctcctacagccagaccccaaggttctcagggatgtgggggccaaaatcgggggagttacccctctcccggaaaatgagggccaggaacacgccacccccatccccatgttggtaattaagagctggctttggagcaaagctagattccagtcctgactgttcctgctcctccccagcctgttaactcacctgcaaaatggggaaattacaagcccttctaaatttattgtgaggatgcagtgatgcgacacacagaagctcagcccagcacctggccatcgtcagggctgaagagaggagcgctgctggtattatttgaggtcagatggtggggtatgatggcagcctctgggaggctctttcccactctggggagtatgaacggaagatttgttcttcctcccaaaaaaacaggtcggaagagcaaatgaggcctagcacagtgcctggcacaaaataggcaagaaaaatgaatgaataagcagatgtttattaagcttcaggctcagctccacctgcctctcctgttcaccagaagcatccaagctctggactgtggccagcccttataagagcaaggtcttaacccgatggagggagaatctaaatgtctgcaccgcctgcaaagctgtgaccatgatcctcccctccccactttacagattaactgcagcctggtccaaaaattccagggggagccatctgccctagattggtcttttccaaactacaggttcatgggtggagaattcaatagaataggatgaaatcagcagtttaaaaaaatatttagccgggcgtggtggtgcacacctgtaatcccagctactcaggaggctgaggcaggagaatcgcttaaaccggggaggtggaggttgcagtgagccgagatcgcaccacgctccagcctgggcgacacagcgagactccgtctcaaatagtaataataatagttgatggaaaaaaaaatgcacaaactaaagctaactatggtaaagaaatttttgtgggccgggcgcagtggctcacgcctgtaatcccaacactttgggaggcagaggggggcggatcacgaggtcaggagatcgagaccatcctggctaacacagtgaaaccctgtctctactaaaaatacaaaaaattagacaggcatggtggcgggcgcctgtagtcccacctactcaggaggctgaggcaggagaatggcatgaactcgggaggcggagcttgcagtgagccgagattgcgccactgcactccagcctgggcgacagagcaagactccgtctcaaaagaaaaaaaaaaaaaaaacttttgtttcgaggcctagtgccctgagggaggccgaggtgtgtggatcacctcaggtcaggagttcgagaccagcctgacaaacacggtgaaacccatctctactaaaggtacaaaattagctgggcatggtggcacacgcttgtaaccccaactacttgggaggctgaagcaggagaatcgcttgaacccaggaggtgaaggttgcagtgagctgagatcacgccattacactccagcctgggtgacaagagcgaaactccgtctaaaaaaaaagaggccaggcgctgtggctcacacctggaatcccagcactttgggaggccgaggcaggtgaatcacctgaggttgggagttcaagaacagcctgaccaacatggagaaaccccgtctctactaaaaatacaaaattagctgggcatggtggcacacgcttgtaatcccagctactagggaggctgaggcaggagaatcgcttgaacccaggaggcattgcggtgatccgagattgtgccattggactccagcctgggcaaaaagagtgaaactccgtctcaaaaaaaaaaaaaggaaacttggttcacgtgtattttgcttatctgtatactctattgccatataaaatgtgtttgtaacaggagattgtggttttaaaattgtttcagttaaaaacattcttcccagatgacccaggtcttcaggagctgaggaggggataaccccaaggcaggccaaccttcccattccccagccaggcaagctgaggtctccctgctagacggccaccaaagagggtctgagatgctgtctctaaaaacaaacctcgagtgctcagagtgggaaacgtgtttattgtttgatcagtct

SEQ ID NO: 1560111 - DNA, 4001 bp, Homo sapiens
aacaaaacaaaagaaaaactattctcctgcttcagcctctcgagtagctgggattacaggcatgtgccaccatgcctggctaatttttgtattttttgtagagatggggtttcaccacgttggccaggctggtcttgaactcctgacctcaagtgatctgcccgcctcagcctcccaatgtgctgggattacaggcatgagccactgtgcccggcctaatagccccaatttcacatgaggaagctaaggctcagggaggttacaacacttgcccgtaagcaggatccgtagaaccacctctcaaaccccacctgcttgtccagggccctggtctgctcctgcagctcctcgatctccgcctgcacctgggcccggcccttcagcaggcggtccatgttctccagccgctgactgtcccgaagccgcttgacctggttctgggctgcgctgatctgcacctggagatcgccccgtacctcctccaagcgccggatctcctcactacccaggcagggaggtggaagaggggccagtaagggggcagaactcagcatcactaaaggcaggacccaggagtccagtcttcagcccctctgaccccctcctccccagctcagggcccaggcgcccagctcacagttgcttgttgatgcgctggtggacttccttgctgtaggcccgcctctccccttccatcactttgcattgtcgctgcagcctactcagctcccaatccactgagaacagggccagccaagggactcagcagggatcctggccaccagctcctcccaacccaggacctaggaattctgctccctttggggtctcacaaactgcaactgaactgcagatccagcccccaacacccctctaggaatgcacctcagttccgggatccctcgagcttcctcatcccttcatacccaaaactgaactcagggtttttttcccctaaaacccactcccatcccaccagagggcacttctggaaggcctctgggtcttctgggacctgggcacaccacctggaattgggaaggctcttgctccctccctccttttctgccccaccatcagcagccctcagccccatcctcttgcctcctccctctctcaacccatcccctgggctcagcctcatcctctcctacctggaccatcaccccaacctttctctcaacttccagccttcctgcacagtcccagagggtctctctacacccacagccaaccctaccccacccacagcagaccctacccctcataggcctcccatgatgccccagtacctgcaggacaaagtctcagcacctcagcctgggatcccagaccccaagtgacctgaccttacccacctctccagtcttgcccgtatgctccccatctccaaaggcccagtagttttcaatcagcgggtgattctgccttccaaaaacatttggcaatgtctggagacttatttttttctagacagggtctcgctctgtcccccaggctctagcgcagtggcacaatctcagctcactgcagcctccacctcgcaggctcaagtgatccgcccacctcagcctcccgagtagctgggattatgggtgcacgccatcacacctggctaattttattttatttttgtagagatgaggtctcactgtgttgctcaggctggtcttgaactcctgggctcaagtgatcctccttcctcagcttcccaaagtgctgggattacaggcatgagccagcatgctcagcctagagacatttgtcattgtcatgacttgtggagaagggagggggctactggtatccagtgagtagaagccatggacactgcttggcatcctacgacacacaggactgcccccacaacaaagaattatcccaccccaagagtcaacagtaccaaggttgagaaagcctactctagccacattctgtcatctctgtagaaacacccttccttccttctccccttggcaattcctacagggagttctgggccccactcaaacttctgctgcctgaagtctccagcctgccccactgcccaggcttggcccacccaccgtggtgcccgccccgcctcccttagggcgcatgtctgttcccaccagagggcgctcctggacagacactctccctccctccctacaggacctggaacttgggaaagctgggggctggaaaagaatgggtgaatgatataaagaatgaatgaattacccattccctccagaaatgcctcgcttccctcctcggagcgggcgctccctgccaagcgtcccaaaggcatcctggccaaacagggtggggctcctgtagggatggacatataagacccttcagacagcaggcgggccagggcccagagagggtggacaatgaactgcgagggactgggaattgaaagggggtgaccctagaaccacgctggcctcattcctccaagaggggttggagggggacctctctcaggcctctcccacacctctccagccctcccacctctcacactctgggtcttgcgtctaggctccgattctggcgcgggtttggcaggggacaggcctcctgggctctcaggatatctgaggccaggctgtttggtcgcaggagagggggaaaccccggcctgctgtagtgggggttgggcagggtcgggggagtcctgggccctacctgccgacgggcctgacctgttcttggtgctccaagttcagtgttgtggtctggttactggggagataagggaccaatgaggactgaggacagcggccagggagggactgaggccgcgggagaaactatgggaggaggggcggagaaggatgcgaggcgtagacctgcagggttcccacggactgagaactgatgggcaaggccaggcgcggtggctcacgcctgcaatcccagcattttgggaggccgaggcgggcgcatcacttgaggtcacgagttcgagaccaacctggccaacatggtgaaaccccgtctctactaaaagtacaaaaaattagccggacatggcggctcgtgcctgtaatcccagctactcaggaggctggggcaggagaatcgcttgaacccgggaggcggaggttgcagtgagccgagatcccgccactgcactccagcctgggcgacagagcgagactccgtctcaaaaaacaaacaaacaaacaaacaaaactgatgggcggcgaggtcctgaaaggggcggagccgggagggcctgtggagcggtgctgcggagccctgagaggtgcacggctgtgaggcctgagaggggcgtgccgtagggagctgtgatgggcggggctgagacctgtgaggagagtgagtgggaagaacttcgaggggcggggcttcggggccggcgaggggaggggcacggacaccagtacaggacggggcttcgcagacagcgagcggaggggcttccccgtaaggggcgggcttcgagggtcgcgtttggaaggccttacgaggggcccggtggaagggcggtgaagggcgggctaatcgggaggcgctcaggccttgaaggcctgcgggaggtcgaaatggtcctggggaggtcgaggctgaggtctcactagtaccgcgggcctggaagcggcgggagttgaaagagcctgcggtgacctgtatggaagccctcgaagccaggccgaggtcctacaagacggagcccgagaggtgccggtcttaagctgactgtgaccacgttaaattaaggattcataggaaggaaggcggtgtcgaagccgggagttgcgcggagaaggagcgctcaacacagcctcagcggttcactacgcaagcgcgaccaacggcttcccgggaagcagccaaaaacgcttggccgcctaccacgtccgcgcgctggagggcggaagtgggtgagacctcgggcactccataccgccccccggtttctggccacgccccctctggttacacccactcgctctgtaaggcacgccccctccgcggcggcg

SEQ ID NO: 1560112 - DNA, 4001 bp, Homo sapiens
tgagcgtaggaggctgaggccacagtgagctatgattgtgccactgcactccagcctgggcaacagaacaagaccctgtctcttaaaagaaaaaaaaaaaaaggaaacaaggaaacaaggcaccaatacatacatgatacaatgtggttgaacctcaacaacacaatactaagtgaaagaagccagacacaaaaggccacacagtgtgagagtacatttatttatttattttggagacagggtctcactctgtcgcccaggctggagtgcagtggcgaaatctcggcttactgcagccttgacctcctgggctcaagtgatcctcccacctgagcctcctaagtagctgggactataggtgcaggccaccatgcctagctttttttttttttttttaaggcagggtctgactatgttgcccaggctggccttgaactcctgggctcaagtgatcctcccgcctcggccttccaaagtgctgggattacaggcctgagccactgcgcctggcccttcgttcctttttatggctgaatattcctccactgcatggatacgccacattttgtttatccattgtccacagctagacatttgggctgtttccacgttggggcttttttttgttttgagacggagttttgctctttcacccaggctggaatgcagtggcacaatctcggctcactgcaacctccacccacccggttcaagcaattctcctgtttcagcctcccaagcagctaggattacaggcacctgccaccacgcccggctaatttttgtatttttatagagatggggtttcaccatgttggcatgtgccaccatgcctatctgatttttgtatttttagtagagacggggtttcactatgttggccaggctggtctcaaactcttgacctcaagtgatccgcttgcctcggcctctcaaagtgcctggattacaggtgtgagccacagtgcctggcaatttctgctgtttaagccacccagtctgtggtattagttatgacagcccaagctggaaatacagacacttttctctgtgtagtaaacactcactcacttgcacacgtcattcaataaatatgtactgggcacctaatacgtgtgcgatgctggggaaagaggtggcacaaatgagctttctgcctgcatgggactcccagagaagagccaacacatgcaatcagagtcctaataaggacacgcagggcgccggggaagcccggagagggcttctgacccagcctgggtcaaagggcttcctaaaggagacatctaaggaaaagtctgaatgagtgggggagagcgcagcctgcacgcgggatgcaggaggtaggctggaaaagggggcgatttgtattccagggagatgggaaggtgtggagggcgttagagccgggaagcccaatctatgggtcacacaagccctctggggttagtgaggaggtggactccccagatggcaggagctgggagcccaggcggtacccagggagtggctcaggctgggcgaggggcacacttagaagcgaatcaagacccatggggattaagaccccacggatgtgaaggtaaaataacagaatacaaaattcaacaatgcctcctctaagcagccctcccggctatcccttttgaagtcccccaccactaatccccctacaagaggccgggggagtccgcgcccaactctgtccctctcgagaccagaagctgcctaggggcagtccggggccaggtggcctcgaacatgctgtcgcgtcgggcttcaatcgtctagtctggaaatgggcatcgcccccaactaggtgcggttcagactggacgccagaagtgctcctgcctcccagcacccctcctccagccttcccaggggatggtcccaggccaagcagcccccgccccgcgcctctgctccccgaacccgggttccgcccgcgccgcagacgctcctaccttcttaccccagcgccggcccggtcgcgcctccgtgacgtcatcatggggcctgcgcgctgagctcctggcggcgcgcactcattgcgcctcagtaccgccgccattttggtaaagaaaaagatggctgggcctcggacccaagccagggtagtcagccacttctttgtctcttcaaaaagaggacacttaatacgccctcattccctacgctcatttaatatgttgatgaaccaggaggggcgggcagaggcgaaaatctagaacattgcctttaccaagatggccgatgcccggatgaaagatggcagctgcgactacacacgtggtccggcggcttcagcctggagcggcccggccgccagagcgcgcccgcggtccatgaggggaggtggacccagtatagccctgaggaagcctctccgtagctcttcgcaatcccttaacgctttaaaagtgctttcctagtcctgagtctctgcgtcccactggtgacgctggggcggggctaggagaggggagataaatggggcagagaaattaacacacaccgcgcagtccaggtagggaaaccgaggctcagagagaccaggaattgagtttggccaaaatgtaaccgcgagtaggctcataaccgcgagtaggctcaaattccgtctcttgctcctgccagtgcctcttcctggattgctgacctgctccccacttctgcaatattatttattaattttatttagaaattaggtttgaggcgccaatttgtcttaggcactatactttagattttctgcatttactacttctcggtgttctcaacagtaaaaatggcagtattaggggtctaaggttacactggtcctgactgtggagagggaaaagcaaatgctttgggggcagttcaggtaggagtagttgaccacagagtccattccctaaaaggcatccccccagcgaccttgctgggacctaaatcccagtgcgcgatgcacctcccctgctctaacgcctcccctgggttcccattgtcccgcaagactcctcccacctcccaccccatctcccttggcttccctcaccctcccattagctctctgctcaggtcgcaccagcccccttcttacaaattgccaggcgcagtcttgcctcagggagttcccccaggaatttcccaggtttttccgtggccagttccttcccttcaggcatgagacagaaaggtctctgggtgcagggggcttaaagtcggaaaatcacatgaaagattattatcctggctggtcgcagtggcacatgcctgtgatcccaaccctttggaaggctaaggtgggaggatcgcttgaggccaggtgtttgaaagcagcctgggcaacattatgagaccccatctcgacagaagataaaaacattagctgggcgtggtggcatgctcatcctcccattcaagagaatcacttgagcccagaagttggagggtgcagtgaggtatgatagcgccactgcactccagccagcctgggtgaaggaacctctcttaaaaaatactaataaaggccaggcatggtggctcacgcctgtaatcctagcactttgggaggccgagccaggcagatcacctgaggtcaggagtttgagaccagtctgaccaacatggtgaaaccctgtttctactaaaaacacaaaaattagctgggcgtggtggcacatgcctgtaatcccagctacttgggaggctgaggcaggagaatcacttgaccccaggaggcagagattgcaatgagccgagatcgtgccattgcactccagcctgggctacagagtgcaactccatctcaaaataaataaataaataataataataaaggccaggcgtggtggcttatagctgtaatcccagcacttcaggagactgaggcgggcagatcacttggtgagtagttcaagaccagcctggctaacatggtgaaaccccatctaaaaattacccaggcgtggtggcatgcgcctgtaatcccagctacttgggaggctgaggca

SEQ ID NO: 1560113 - DNA, 4001 bp, Homo sapiens
tttggccaggctggtcttgagctcctgacctcaggtgatatgcctacctcggcctcccaaagtgctgggattacaggtatgaggcactctgcccagcctcttttttttttttttttttttttgagatggaatctcgctctgttgcccatgctggagtgcagcggggagacctcggctcactgcaacctgcgcctcccagttgaagcaattctgcttcagcctccagagtagctgggactgtaagtgtgcgccaccacgcagttaatttttgtatttttagtagagacagggtttcatcatgttggccaggctgatcttgaactcctgaccccaggtgatctgcctgcctcggcctcccaaagtactgggatgacaggcgtgagcgacagcgcctggtccctcctggcctttcagaccaaagctcagagggccctctcgctattcacccacattgacataatgaccactggccttggccacaaggcatgcgggccgcggggactcggagtgcacgcaccttgcgctgctccttcctcatgacgtgtttgtcgtcgtccttccagtaggcatcctccagctccttctgcttcttggcatcagcggccgccttggcctctgccctacgtgcccgggccgctgccgacttggtgttctcaccctggaacttcttgggcatccctcagcaggctgcgggaagaggatggggatgggggagcaggggccggaggggacatcggcactcagcacccccagaatcacacttgggcagccatgaccctcttggggcctctgtggccttctctgtataaaacaagggctttggacttagcgctctccttgtaaaagtttattaaggcaaaattcacatcatgacaccaaatgagctcatttaggccaggtctggtggctcacacccgtaatcccagcactttgggaggccgaggcgggcggatcacttgcggtcagaagttcgagactagcctggccaacacggcaaaaccccatctccactaaaaatacaaaaattagctgggcatggtggtgtgcacccgtattcccagccagtcaggaggctgaggcaggagaatcgctcgaacccgggaggtggaggttgaagtgagccaagatcgtgccactgcactccagcctgggcgacagagtgagactccgtctcaatgaaaggaaaaagaatcaatttaaaggtggacaattccggccaggcacagtggctcacgcctgtaatcctagcactttgggaggccaaggtgggcggatcacctgaggtcaggagttcaaaaccagtctagtcaacatggtgaaaccccgtgtcaactaaaaataaataaaaattgctgggtgtggtggcggacacctttaatcccagctactcaggaggctgaggcaggaaagccgcttgaacctgggaggcagaggttgcagtgagccgagatcgtgcaactgcactccagcctaggcggcagagtgagactcactctcaaaaaaaaccaaaaagctgggtgtggtggcacatgcctataatcccagctactcgggaggctgaggcaggagaatcacttgaacccgggaggcggaggttgcaatgagctgagatcacaccactgcactccagcctaggcgacagagcgagactccatctcaaaaaaaaaaaaaggtgtacaattcagtgtttaagtatattcacagcgttgtgcaaataccacctctgtctagttccagaacacttgcaccccccaaaagaggccacatcaccatcagcagtcactccctattcctcttcccctagcccctggtaaccatcaatctgctttctgtctctgtggctttccctgttctggacatttcagtccatatcaatggaatcacaggccgggtgcgatcactcacgtttgtaatccccgtgctttgggaggctgaggcaggaggattgcttgaggccaggagttcaagaccagcctgggcaacatagcaagagtccgtctctacaaaataaaaaataattaggcacagtggcttgtgcctgtagttccagctacttaggaggctgaggtggaaggatcgcctgagcgtaggaggctgaggccacagtgagctatgattgtgccactgcactccagcctgggcaacagaacaagaccctgtctcttaaaagaaaaaaaaaaaaaggaaacaaggaaacaaggcaccaatacatacatgatacaatgtggttgaacctcaacaacacaatactaagtgaaagaagccagacacaaaaggccacacagtgtgagagtacatttatttatttattttggagacagggtctcactctgtcgcccaggctggagtgcagtggcgaaatctcggcttactgcagccttgacctcctgggctcaagtgatcctcccacctgagcctcctaagtagctgggactataggtgcaggccaccatgcctagctttttttttttttttttaaggcagggtctgactatgttgcccaggctggccttgaactcctgggctcaagtgatcctcccgcctcggccttccaaagtgctgggattacaggcctgagccactgcgcctggcccttcgttcctttttatggctgaatattcctccactgcatggatacgccacattttgtttatccattgtccacagctagacatttgggctgtttccacgttggggcttttttttgttttgagacggagttttgctctttcacccaggctggaatgcagtggcacaatctcggctcactgcaacctccacccacccggttcaagcaattctcctgtttcagcctcccaagcagctaggattacaggcacctgccaccacgcccggctaatttttgtatttttatagagatggggtttcaccatgttggcatgtgccaccatgcctatctgatttttgtatttttagtagagacggggtttcactatgttggccaggctggtctcaaactcttgacctcaagtgatccgcttgcctcggcctctcaaagtgcctggattacaggtgtgagccacagtgcctggcaatttctgctgtttaagccacccagtctgtggtattagttatgacagcccaagctggaaatacagacacttttctctgtgtagtaaacactcactcacttgcacacgtcattcaataaatatgtactgggcacctaatacgtgtgcgatgctggggaaagaggtggcacaaatgagctttctgcctgcatgggactcccagagaagagccaacacatgcaatcagagtcctaataaggacacgcagggcgccggggaagcccggagagggcttctgacccagcctgggtcaaagggcttcctaaaggagacatctaaggaaaagtctgaatgagtgggggagagcgcagcctgcacgcgggatgcaggaggtaggctggaaaagggggcgatttgtattccagggagatgggaaggtgtggagggcgttagagccgggaagcccaatctatgggtcacacaagccctctggggttagtgaggaggtggactccccagatggcaggagctgggagcccaggcggtacccagggagtggctcaggctgggcgaggggcacacttagaagcgaatcaagacccatggggattaagaccccacggatgtgaaggtaaaataacagaatacaaaattcaacaatgcctcctctaagcagccctcccggctatcccttttgaagtcccccaccactaatccccctacaagaggccgggggagtccgcgcccaactctgtccctctcgagaccagaagctgcctaggggcagtccggggccaggtggcctcgaacatgctgtcgcgtcgggcttcaatcgtctagtctggaaatgggcatcgcccccaactaggtgcggttcagactggacgccagaagtgctcctgcctcccagcacccctcctccagccttcccaggggatggtcccaggccaagcagcccccgccccgcgc

SEQ ID NO: 1560114 - DNA, 4001 bp, Homo sapiens
taggtcatatagaaggaagttcttcacgcctgtaatcccagcactttgggaggccgaggcgggtggatcatgaggtcaggagatcgagaccatcctggcaaacacagtgaaaccccgtctctactaaaaaatacaaaaaattagctgggcgtggtggcgggtgcctgtagtcccagctactcgggaggctgaggcaggagaatggcgtgaacccgggaggcggagcttgcagtgagcaaagattgcgccaccacactccagcctgggcgatagagcgagactccatctcaaaaaaaaaaaaaaaaaagaaagaagttctagtttacactaaagagagactctgtgaagcagtgaagggtattctagaacagagattggcaaagtttctctgtcaagggccagaaaataagtatttctagctttttaggccagattatctctgccccaacaactcaactctgctttcatagctagaaatcagtcccaaacaatatataaatgaacgggcgtagctgcatgccaatataaattttattgatggacacagaaatttgaatttcacataatcgtcatgtcacaaagtattattcttttgatttttccccaactactagaaaatttaaaaccattcttgggggccggactcggtggctcacgcctgtaatcccagcactttgggaggctgaggcaggtggatcacttgaggtcaggagttcaagaccggcctggccaacatggtgaaaccctgtctctactaaaaatacaaaaattggccaggcctggtggcgtacgcctgtaatcccagctactggagaggctgaggcaggagaatcgcttgaatctgggaggcggaggttgcagtgaaccgagatcacgccactgcactccatccaaggtgacaagagtgagattctgtctccaacaaaaagaaagaaagaagctgatggaagagcttctgatggagtgggagtggtgtagtgaggtggtgaggcagtggtgcaaagtcccggatataaactgttctaccctcaccttagtcttgtatcctccaactataaagtgtgtcctttagattggattattccaaggtcccttccaacctaaaaatacttttgccaacaaaatagctaagtgccccttgaggcgttaggggacacggctccctgggcttgaatcccagctccactcctcatcagctgggtgaccttggtcagtgactgcgcttccctgggcttgtatttcgtcaccggtaaagggcgaatgacgacgacaagactgactttctggggatgctgtgaatcaactaacccacgggaagagcctgcaaagagcaaatactccgtttacaggagctcgagggtgtgtgtgtgtcttaagatggttttgttaccccagtaaatggcagacggggctatcgggtgggcgtgtagatatctccggtccttggtgcaaaagtaattaccgaccctgtttgtcctgggcttacggcttgggctcggagctccaccctgctgcttcctatctgcttgacttggggcaaattgttttctctctctaagcctcattttccttatgtgtaaaaatggctggttaaggcattcagggcagcgcctgacgccgagttaaacgtttggcagtttagtcatttctgctgctcacggttttacaagaatcatttttataaaatctggtgagatagggacttattggtcccattttcccgatgcaaaaacccaggacccttcaggcataatatggatccgggctaggatgggaccgggtcccgggcacttgggtcagaggtctcagctggggcctcagggactttggtcctggctgggacctgggccggctccgggcatctaaatcgggtcctcagctccgcgtcccccgacgcggaagggcgcgccgggcagctccgaggccagggtgaggcggctgccggacccccggccctccccgctcctccgcccgccggcacttacctgccctcctcccgacgtcacgccctgaccgtgcccggaagtgcgcgctgagagcgcggtgaacctgggcgccctctccgcgcccccaggacgccggcgtgaggcggggcgaggcagcagctccacgctgattggctgaaggacgatacgccaagcgttctgcgacgccggagtgggccaatccaggaatgccccgcccaaccgcgcttacgccaagaggctccatcctctgtccagcccactacgtgaggcccaatccgaggcccgcctcctggcaccgccctcccaggcgtgctgtcctgcgcgctgcagccggtcagcgagggtgtggtggcgggcccctgtagtcccagctacttgggaggctgaggcaaaagaattgcttgaacccgggaggcagaggttgcaaagagccgagatcgcgccactgcactccagcctgggcaacaacagcaagactccgtctcaagaaaaattatttgcacaggcaaggtcttactatgttgccccggctagtctcgaactccagggcccaagcaatcctcctgcctcccaaagtgctgggattacaggcgtgaaccactgctctgtttttgcatttttaaatagttaggtgggggaaaaactattttacgacttatgaaaataaaacattcaaatttcagcgtacgtaaataaaatttcattggaacacagggatatgcgcttttgtctgctgattgcttcaaaataagggcacttgggggaacagcaaatgcagggaaggagaggttttctctgaatttctcttatctgcctaaagacagaaagaggaatgctttcctacgatcttattaactagggaagagtgaaaccattcccaatcatgtatccttctgagggctgctctgagacaacttttattacctgcaagacttttttatttgcttaacaagacagactttctccatcatacaatttctccccttaccctcccataacttgtgttaccaccatcctcccagaagccccaaacccctattcttttctttgatacttttttttttttgagagggagtcttgctctgtggtccaggctggagttcaatggcgtgatctcagctcactgcgctctccacctcccaggttcaagtgattctcttgcctcagcctcccgagtagctgggattacaggcaccttccaccacgcccggctattttttgtatttttagtagagatggggtttcaccatgttggccagactggtctggaagtcccaacctcaggtgatctgcctgccttggccttccaaagtgcctggattacaggcatgagccactgggcccagcctctctgatcctttttggagtcttgtattttgtgggactcccctgcataggtacataattaaatatggcttttgccctgtctgtttacatgtcaatttaattcgtagcccagccaaagaacctataaaggtgaagggaagccatttttcacctacctacaaacagccgggcccattcatttatctattgtctatgtctgcaacagggttgaattcagtggttgccacagaggaagagagagcccaaagaatctaaaatatttaccatctggccttttacagaagaagtgggtggatacttctcttagagccttcagattagcctggccctgccttctgcacaggtgaatggcttttgaatttacttttttttttttgagtcggagtctcactgtcactcaggctggagtgcagtggtgtggtctcagctcactacaccctctgcctcccaggttcaagtgagtctcctgcttcagcctcccaggtagctgggactacaggtgcccgccaccatgcctggctaatatttgtatttttagtagagatggggtttcaccatgttggccaggctggtctcaaactcctgacctcagatgatctgcccgccttggcctcccaaagtgctgggattacaggcatgagccactgtgcccagactgaatttacttttatgccttgtagggcctaa

SEQ ID NO: 1560115 - DNA, 4001 bp, Homo sapiens
caagcacagtggtgtatgcctgtagtcccagctactcaggaggctgaggtggaaggatcgcttgagcctaggaggtcaagtctgcagtgaactgttatccaaccactacactccagcctcaacagcagagcaagaccctgtcagaaagaaagaaggctgggcgcggtggctcacacatgtaatcccagcactttgggagccaaggccgtggatcacttgagatcaggagttcgagaccagcctggccaacatggtgaaacccagtctctactaaaaatataaaaattaggtgtggtggcacgcacctatagtcccagctagtcaggaggctgaggctcgagaatcgcttgaaccttggaggcagaggttgcagtgagccgagatcatgccactgctctccagcctaggcgacagagcaagaccctgtctcaaaaaacaaaaaacaaaacaaaaaaaaacgcgggtgcagtggctcacgcctgtaatcccagcagtttgggaggccgaggcgggctcacgcctgtaatcccagcagtttgggaggtcaagagattgagaccaccctggccaatatggtgaaatccctctgtactaaaaatacaaaaattagttaggcgtggtggcgtgtgcctgtagtcccagctactcaagaggctgaggcaggagaatcgcttgaacccgggaggcggaggttgcagtgagccgaaatcgttccactgcactcccacctggcaacagagtgagattctgccaaaaaaaaaaaaaaaaatagagaaaataaattacaagaaagtatgaagtacagttcagtcggttctgaacccatgagaagttttaagagacagagaaggaaaaacatgaactaagtatgagtttttgcccagaaacggtttacctagactcatgctggagaaatacctttgtcacaccatgaagattggatgggcactgttgacccctgaccctctgtaccctctggagccatcttacctaacagttgtatctttttatgtaactcagccacctgagagtgcacagagggcttccctgcacctctgtggaaggatcctcccttggaacggcctggggtccacgcctgggctgtgcccttgcctcggaggtggctgggtttgcccgaagcctccctgcccttgaccctggaagagggcgtcgaagcctggtcctgaggaggcagggcgttggcggaggccgccctgcacagaggagatgtcatgatggggttggggctgaaggcccctaggggttagggggataactaggagtcagtcgcccctgtcagggatccgtcagctcggattcctagggctctgaaaaatgcactttccgaccgctaggtggttgcgctccgcatctctcggttgccaggtaaccgcctccccgtctctctccactgtttccatggagatcacccgcgttccgtggctgacactgcgttctcattggctgaggctgcatagaggggcggtcccaacagtgggcggggtagagccgcgccgcaggacggagggtctggacactttggggtcacgtgctcattccgtttccctacctcccccaaccttatcccgcccctgggggttcgcgggcatttttcaggaactttctttccggcttgagaagccgccactcccaagatggaggtacgctgcgccgccattaagagctagccctcagaactatcctctctaaggtttcacagtcctgcccaagatggccgtctcggctctggcaccgcccccactcctgcctctcccaacatggcgaccctgagtctccgttcccggtgcggaacgtacgaccggaagtgacggggtccagaaatttccgctttctttctgcagcaggaaccgcggctgctggacaagaggggtgcggtggatactgacctttgctccggcctcgtgtaggtgtgaacgagcgggtgggagggcacctcagtttcttacagggggcaaccggagggtgcatgtgtgggtgtggacggcggaggctgttaatccctttggtctgttggcgggaattgggtcacaattgggcacagggagcggaggttttgagatcttgagatcctcgccattgatttgagcaaagtgagactggccaggattggggagatcgctgcccctcgcccccatatcggaaacaaagtgaggcctcattgcctggaagcgatggaggaatccaattggctggaagtagccctctcccactgaccgggatccgctttcttcctgcagcgtgaagacacagcgcatctccccgctgtaggcttcctcccacagaacccgtttcgggcctcagagcgtctggtgagatgctgttgccgctgctgctgctgctacccatgtgctgggccgtggaggtcaagaggccccggggcgtctccctcaccagtgagtcctcctgttcaccctcccgccaggctggaggtgggaggggccaacattgggccttagggataggcatttacagccttttgactcagtttcccggtagtgctccgctggtggggatgggaggacagaggtggtatttggtggagaaggcgcttacctgccctgggctgagcttcctgtaccccgcagatcatcacttctacgatgagtccaagcctttcacctgcctggacggttcggccaccatcccatttgatcaggtcaacgatgactattgcgactgcaaagatggctctgacgagccaggtgagccttttctctgttcatccatcagatgtttattgaacactgctcagtgccaggccctgtctgtgtgaccaagatactacctctgctggctcccctttgagtgggcagaaacaagctcagaagtcagtggtcagtgttatggccccgggcagctggaggagcccagagtcgtcctcctcccaagcctcggggtcagagaaggctcctccaaggaggtgaggtttcagttgaatcccgaaggtgctgcagatggaggggtcaacacgggcaaacccctagaagtgggagacagggtggggccaagagcaatccagcaggagacagaggtgaagggagaccctggctttttgtttttgtgtgttttgaagagacagggtcttgctttgttgctgaggctggagtacagtggcatgatcgtagctcactgcagcctggaactcttgggctcaagtcatcctcctgccttggcctcccaaagtgctggggttacaggtgtgagccaccgtgcctggatgagaccgtgtctttggttttgtttttgttttgagacggagtcttgctctgtttcccaggctggagtgcagtggcgccatctcggctcactgcaagctccgcctcccgggttcacaccgttctcctgcctcagcctcctgagtagctgggactacaggcacccaccaccacgcccagctagtttttttttgtatttttagtagatacagggtttcactgtgttagccaggatggtctcgatctcgtcaccttgtgatccacccgcctcggcctcccaaagtgttgggattacaggcgtgagccaccgtacctggccttgttttgttttgtttttaatttttttttttgagatggagtttcactcttatcgcccaggctggagtgcagtggcatgatcttggctcactgcagtctccacctcccgggttcaagcgattctcctgcctcagcctcctgagtagctgggattacaggcacatgccaccacatccggctaatttttcgtatttttagtagagatggagtttcatcgtgttggccaggctggtctcaaactcatcacctcaggtgacccacccgcctcggcctcccaaagtgctgggattacaggtgtgagcccccgtgccaggtggagaccctgttttgaagggcctcagtgagaagaggcaggaggcggcactggagagctttatttcgagccctggctgtgcagtgtacaactctttccttcctttggtttcctttcctttcttgtgctgtgtg

SEQ ID NO: 1560116 - DNA, 4001 bp, Homo sapiens
tcaggatgaccaacaactgggccgaataattatttgccgtggggtgctctcctgtgttttgcagaatgttgggcagcatcttcaactctgcccactagatgccagtggcagacacacacccacaacagacatccatgccaccatgcccggctaattttttgtatttttagtagagacagcgtttcaccgtgttggccatgctggtctcaatgtcttaggacattgccaaatggcccctgtggggcaaaccaacccttttccaacaagaaccactggtttacaccttatggtactttgctatgtgccaggcactgttctaagcactttacacatttcaggtacctatgttgtactgttactatccccatttcacacatcgagaaactgagaacaattaggttactcttagtcccccaaggttggacaactattatgcagagccaggattccaacccagaaaatctggctctaaaaatctatgctcaggccaggtgcagcggcccatgcctgtaaccccagcactttgggaggctgaggaggaaggattgcttgagcccaggagtttgagaccagcctgggcagcatagtgagaccccatctctacaaaaagtaagaaaattagccaagcacagtggtgtatgcctgtagtcccagctactcaggaggctgaggtggaaggatcgcttgagcctaggaggtcaagtctgcagtgaactgttatccaaccactacactccagcctcaacagcagagcaagaccctgtcagaaagaaagaaggctgggcgcggtggctcacacatgtaatcccagcactttgggagccaaggccgtggatcacttgagatcaggagttcgagaccagcctggccaacatggtgaaacccagtctctactaaaaatataaaaattaggtgtggtggcacgcacctatagtcccagctagtcaggaggctgaggctcgagaatcgcttgaaccttggaggcagaggttgcagtgagccgagatcatgccactgctctccagcctaggcgacagagcaagaccctgtctcaaaaaacaaaaaacaaaacaaaaaaaaacgcgggtgcagtggctcacgcctgtaatcccagcagtttgggaggccgaggcgggctcacgcctgtaatcccagcagtttgggaggtcaagagattgagaccaccctggccaatatggtgaaatccctctgtactaaaaatacaaaaattagttaggcgtggtggcgtgtgcctgtagtcccagctactcaagaggctgaggcaggagaatcgcttgaacccgggaggcggaggttgcagtgagccgaaatcgttccactgcactcccacctggcaacagagtgagattctgccaaaaaaaaaaaaaaaaatagagaaaataaattacaagaaagtatgaagtacagttcagtcggttctgaacccatgagaagttttaagagacagagaaggaaaaacatgaactaagtatgagtttttgcccagaaacggtttacctagactcatgctggagaaatacctttgtcacaccatgaagattggatgggcactgttgacccctgaccctctgtaccctctggagccatcttacctaacagttgtatctttttatgtaactcagccacctgagagtgcacagagggcttccctgcacctctgtggaaggatcctcccttggaacggcctggggtccacgcctgggctgtgcccttgcctcggaggtggctgggtttgcccgaagcctccctgcccttgaccctggaagagggcgtcgaagcctggtcctgaggaggcagggcgttggcggaggccgccctgcacagaggagatgtcatgatggggttggggctgaaggcccctaggggttagggggataactaggagtcagtcgcccctgtcagggatccgtcagctcggattcctagggctctgaaaaatgcactttccgaccgctaggtggttgcgctccgcatctctcggttgccaggtaaccgcctccccgtctctctccactgtttccatggagatcacccgcgttccgtggctgacactgcgttctcattggctgaggctgcatagaggggcggtcccaacagtgggcggggtagagccgcgccgcaggacggagggtctggacactttggggtcacgtgctcattccgtttccctacctcccccaaccttatcccgcccctgggggttcgcgggcatttttcaggaactttctttccggcttgagaagccgccactcccaagatggaggtacgctgcgccgccattaagagctagccctcagaactatcctctctaaggtttcacagtcctgcccaagatggccgtctcggctctggcaccgcccccactcctgcctctcccaacatggcgaccctgagtctccgttcccggtgcggaacgtacgaccggaagtgacggggtccagaaatttccgctttctttctgcagcaggaaccgcggctgctggacaagaggggtgcggtggatactgacctttgctccggcctcgtgtaggtgtgaacgagcgggtgggagggcacctcagtttcttacagggggcaaccggagggtgcatgtgtgggtgtggacggcggaggctgttaatccctttggtctgttggcgggaattgggtcacaattgggcacagggagcggaggttttgagatcttgagatcctcgccattgatttgagcaaagtgagactggccaggattggggagatcgctgcccctcgcccccatatcggaaacaaagtgaggcctcattgcctggaagcgatggaggaatccaattggctggaagtagccctctcccactgaccgggatccgctttcttcctgcagcgtgaagacacagcgcatctccccgctgtaggcttcctcccacagaacccgtttcgggcctcagagcgtctggtgagatgctgttgccgctgctgctgctgctacccatgtgctgggccgtggaggtcaagaggccccggggcgtctccctcaccagtgagtcctcctgttcaccctcccgccaggctggaggtgggaggggccaacattgggccttagggataggcatttacagccttttgactcagtttcccggtagtgctccgctggtggggatgggaggacagaggtggtatttggtggagaaggcgcttacctgccctgggctgagcttcctgtaccccgcagatcatcacttctacgatgagtccaagcctttcacctgcctggacggttcggccaccatcccatttgatcaggtcaacgatgactattgcgactgcaaagatggctctgacgagccaggtgagccttttctctgttcatccatcagatgtttattgaacactgctcagtgccaggccctgtctgtgtgaccaagatactacctctgctggctcccctttgagtgggcagaaacaagctcagaagtcagtggtcagtgttatggccccgggcagctggaggagcccagagtcgtcctcctcccaagcctcggggtcagagaaggctcctccaaggaggtgaggtttcagttgaatcccgaaggtgctgcagatggaggggtcaacacgggcaaacccctagaagtgggagacagggtggggccaagagcaatccagcaggagacagaggtgaagggagaccctggctttttgtttttgtgtgttttgaagagacagggtcttgctttgttgctgaggctggagtacagtggcatgatcgtagctcactgcagcctggaactcttgggctcaagtcatcctcctgccttggcctcccaaagtgctggggttacaggtgtgagccaccgtgcctggatgagaccgtgtctttggttttgtttttgttttgagacggagtcttgctctgtttcccaggctggagtgcagtggcgccatctcggctcactgcaagctccgcctcccgggttcacaccgttctcctgcctcagcctcct

SEQ ID NO: 1560117 - DNA, 4001 bp, Homo sapiens
gggaagcgaggggccgtgtctggctcccacacagccctgggcagctgccattcttgccacatcagcctggatttggccggctggcttctcatgggagtttgatcctgacttgcccctgctcctgatcctcccatggctccctaatgcccccggactaagttccagtccctcaggctagagtggcattgagtagtctctgaagctcctgcctcttcctgtcccttttctctccgtcgggcaacccctaggtctctcctcatcatggccccaaacctgctgctcccctgggttccaactcaggatgtacatggtcccccaagcccaggccacctcctcctcatccctgccagccccacttgcagctgctctgggcagtccctgcagcagtgacaggagtttggggggccccatcctgcctccattccacccaggccgacccaaaaccttagtggccgcactctgggggctagagagagacctgggcgctgctatcatcacagcgggcacgggcgccccttggggccaccagtcgagcctgggctcgcctgtcctcacccagctcccccagtgcctgctctccccaagccacgtgagcccgctgccaccgttctggaaacacgggtctttgaagagaggcccttccagggtctggaacaccctgcagggtgcaaaggggggcgatggccttggctgggccctggcgcacggagtgggttcgggatggagtcctgagggaccccgggggtgttggttgatctcgggggtctgacgggactgagacggggacactgaagcaggatggggccctggcaggagctctgggtggtgtgggccttggcgggctttcaagggctctgacaggattttgggggggtctctgactggatttctggggagtgtctggctggattttggagattttgatttctgtgggggtctctgactggatttcaggggtctctggctggatttcgggggtcttgatttctgcgggggtctgattggatttctgggggttctctgactggattttgggggtcttgatttattcggggtctctggattttgggggtcttgatttatgcgggggtctctggatttctgggggtctctggctggattttgggggtcttgatttctgcaggggtctgactggatttctgggggtctctggctggatttggagggtcttgatttctgcgggggtctctgagtgcatttcggggtctccgtttctggggtgtctttgatggacttctgtgctctctgacggaatctgaggtccgactgggtttgggaggggacctgccaggatttctggggatctctgacacgagtctaggtggctctgctgatctggggagagtaataggattttggggaaagtttctggcaggctctgagggagaagtctgacaatttctagacgattctgacaggatttcgggggtcaactataagatttcctggtggactcctttcagtatatctgaggggatgtggtcaggatttttttttttttttttgagacggagtctcactcttgtcacccaggctggagtgcagtggcgcgatctcagctcactgcaacctctgccttccaggttcaagcagttctcctgccccagcctcctgagtagctgggattataggcgcgtgccactacgcctggctaattttttgtatttttagtagagacggggtttcacttccccgggatggtctctatcttctgacctcgtgatccgcccgcctcggcctcccaagtggtcaggatctggggggccctgacgcaggggtatctctcccacaatatgggggggcttcgctaggatttcggtaggggctgggaagggccattctgggaacctcgccgcggggcagggcgcacctggagccacgtcctagtctcgggacacaacggacatccacgaacgacgaacggcagttgagttgggggaggtgcgcgtgagcttttcccgccagaaaaagcaaaaggaggcgaggggtcgcgagtgcgcgtgcgcagcgtctgagccccgcccctccccgcccggactcctcttaagacgcaggtgcaaaccggcggccgacgcgtgtcacgcatgcgcgctggcggtgtgggctgtggccacggagtttgtctggtggtggaaggagggggtggctgcgcccgccatgctggggctcgtgtttttctcttccgcttcaggctttggtgaaatgggctgaggaagggggaattgaactgagagactccttgtccgtcccccatttctttcttttttttttttttttgagatggagtctcgctctgtcgcccaggctggagtgcagtgggacaattttagctcactgcaacctccgcctcccgggttcaagcaattctcctgcctcagcctcccgagtagctgggattacatgcgcccgccaccacacctggctaatttttgtatttttagtagagacggggtttcaccacgttggccaggccggtaccgaactcccaacctcaggcgatccacccgcctcggcctcccaaagtgctgggattacaggcgtgagacacagcgcctggcctgtcctttttatgtattgccatattttcttttcttttcttttctgtgagatccctgttgagttttgttaacaaggctatgctgatataatgtgtggagaagtgttctctctttttctattctttgaaagtgctagtgtaggattgatgttatttattttttatgtgtttggaagaagtcaccagccatctggacctagagttttctttgtggaaagactttaaattacaaattctatttcttttataaaaatacaactattcagatgttctattttatttctggtaagttgtggttttggtaagttgtggttttcaaggaatttttccattttatctaaaatttcaaataatttgcataaagttcataatattgtctttttttggagggggagaaacacggtcttatgttaggctggtctcgaactcctgccctcaaatgatcctcctaccttggcctcccaaagtgctggggttactggcatgagccaccatgcccaatctttttaatatctgtaagatctgtggtgacggatattaataatttgtgccatctctcttttcccccctcccttcccctctgctcctctcctccccttcccccactcccctcccctcatctcccctcccccgtaccttcccctcccctcccgcctcccttcccttctgctcctgtcctccccttcccccactcccctcccctcatctcccctcccccgtaccttcccctcccctccccctctcttcccctctgctcctctcctccccccactttcctcccctcatctcccctcccacctcccttcccctccccctccctttatctcccctcccttcccctcccttccccctcccttcccctcccttcccctcccttcccctcccttcccctccgcgtccactgcctcccctcctccctccccttcctcccctcccctcccccctcctctctttctgagacaggttctcacccaggatagagtgcagtaatgtgaccctagctcactgcagcctccacctcctgggctcaagtaatcctcccacctcagcctcctgagtaggtgggactacagccatgtgccctcaagcccctgatcttgctgtttttttttttgtttttttgttttttttttttgagacggagtctcgctctgtcgcccaggctggagtgcagtggggcgatctcggctcactgcaagctccgcctcccgggttcacgccattctcctgcctcagcctcccgagtagctgggactacaggcacccgctaccacgcccggctaattttttgtatttttagtagagacggggtttcaccgtgttagccaggatggtctcgatctcctgacctcgtgatccgcccgcctcggcctcccaaagtgctgggattacaggcgtgagccaccgcgcccggcatgatctg

SEQ ID NO: 1560118 - DNA, 4001 bp, Homo sapiens
accagcgtggccaatatggtgaaaccccgtctctactaaaaatacaaaaactagctgggcatggtggtgggcgcctgtaatcccagctactcgggaggctgaggcaggagaatcacttgaacccgggaggcggaggtggcagtgagccgagattgcaccactgcactccagcctcagcaacagagtgagactcagtctccaaaaataaaaaacaacaacaaaaaagattatcccagccccaaggtttgggctgggcagtgagaaggacccagaaggccccaaagaaaaaaaatcaggcctcagaagagtccaaagaaaaaagggaccttgacattggcttaaaggaaggcctttcctggcagggagcagcatgtgcaaaagcttggaggtgtggaatcacatgctctatgctggtaaattcatgatggctgaatcgaggtccgagaggaagcagcaggaggttagcagagcagctccagtaaggcattgacggccaagccaggagtttcgacctggccccacaggtgaatgccagccatagagtgtgagcaggagaggcagggcatatctgttcaataaatgttagctgaattggggcccagacccgtgctagaagaggctggaaacaggaaacagctgagctctgggtctcacattcaactcccctccccctccagtatagccacatatggcacagatggagatatctggggcaggtctgcctggagaaacttctaggtgaaaggcaccttgccctgagtcacactcagcctcttcccccaaatcctctagacctttctctctgtcacccttgccaggccctctgcctgattcagtcgacctggaagactcctacacgctcttcagaactactcaggctgggcacggtggctaacacctgtaatcctagcactttgggaggccaaggcaggtggatcacctgaggtcaggagttcgagaccagcctggccaacatggagaaaccccatctctactaaaaatacaaaattagccaggcgtggtggcgcatgcctgtaatctcagctacttggaagggtgaggcaggagagtcgcttgaacctcagaggcggaggttgcagtgagccgatatcatgccactgtgctccagcccgggcaacgagagcgaaactccgtctcaaacacaaacagacaaacaaaaactattcagcatatcttcagtaaaatcttccttaatccttttttaggctcctattttctgagcacctaattgagtgccgggcatcccctaagcattcactggatcttcacacccaccctgtgatgtacacgtttttcttctgcctgaaatgtcctaagctgcccctccgagagtcactgcctcagggaggtcctcacttccagggacagcagagtatgacggttaagcagggaaactctccagctagatggcctgggttcaaatcctagctctgtcccttccagctgtgtaatactggtcgcgttactgaacctctccatgcctcagtgtccccaactataaaaacgagatgtcataatagtcaccttactgggatgttgtgattagataaattaatccatgccagtgcctggtatagagtaatggggagctgtgtttgctctggaatgtcacgctgagaacccgggacttagggaccataggaagcctgggaggcttggaggggaaaaggagaggcatttgagaaccagcttaggtccccagtagtgcctcctctctccccgtcccatcccggttgctgcttccgtgtccctcccgggagaattatttagggagggggcggggtcatcatcctggctccgccccctgggttgtgaaatctacacccgccaggctccagaaccccacctaccacataccacctgttcatgctctcccatcagggaccacgaagccagtcctcagctgtgacgctgaagtttgatcccgcggggacaccatcgtattaaaacgctcagagactgagtcacagagaggggtgtggccggcattttagttccgcccctgccggagtagccgaaggcctcattggcgccttcacgcttcagctgcgcttagtagccgcggcgtaattggataaaagcccgtggagggggcgggatcccaggggggtttctacgattagtcaatacccaggagggcgggatagaaaggtgcagatctacgacccgattggcttcgggctcagctgggaggcgggacgaattattggttgggggaaacccacgaggggacgcggccgaggagggtcgctgtccacccgggggcgtgggagtgaggtaccagattcagcccatttggccccgacgcctctgttctcggaatccgggtgctgcggattgaggtcccggttcctaacggtgggatcggtgtcctcgggatgagatttggcgtttcctcggggctttggtgggatcggtgtcctcaggatgagatttagggtttcctcggggctttcgggatcttcacctaatatccggtattattttatgagaggagtggtcttggctgtcagaactggatccctggggtgatatttgggaattagtggagtgatctctgaagacctagggctatgatctggagctgctgtggctgaaatttggggcctctgaagtggcatggagattgaggtccagagagcctgagatcttgagggctgacatttggagagatggggtcgagggttgtctttgggccttgactgctttgggcctttctcactctcattcccgggatgctttgccagaatctctgctggattggccgtaaccctgtccccgagcgggctcacagggtctgaaggccacgcatgaggcaaaggtaaagttctgagccacccggtgcctccttcccaggactgcaagatggaggaaggcgggaacctaggaggcctgattaagatggtccatctactggtcttgtcaggtgcctggggcatgcaaatgtgggtgaccttcgtctcaggtagggaccctcagcttggatgtcatgggtacctggggtggggatggaaataagaggggaaccgggaagtgccctaacacccctgtggtccccataccctgcaggcttcctgcttttccgaagccttccccgacataccttcggactagtgcagagcaaactcttccccttctacttccacatctccatgggctgtgccttcatcaacctctgcatcttggcttcacagcatgcttgggctcagctcacattctgggaggccagccaggtacgtgggtttgagtgccactgccctctggagacttgttcccaggacctcagtcagcgcctatggctacaccttttccagggggggaaaaaaaaaggctaggcatggtggctcacgcctgtaatcccaacactttgggaggccgaggtgggcggatcacgaggtcaggagttcaagaccagcctgaccaacatggtgaaaccccgtctctactaaaaatacaaaaaaattagccaggcgtggtggtgtgcacctgtaattccagctactcaggaggctgaggcaggagaattgcttgaaccgaggaggcagaggttgcagtgagccgagatcatgccattgcactccagccagggcgacaaagcaagactccatctcaaaaaaaaaaaaaaaaaggaaaggaaaggagaggagaggaaaggagaggggagggaagaggaagggaggggaggggagccccttcttcctggtagatacaaagctgggctctggatacccttgagcagtgcacagcctgtacaacagtccccagcagccctgtctatcccccagcatctccctgctagctgctgttccctctcctcccgctggctgggcctgctgccaagctgtggtgactcagctgagctggcacattgaccccagcttattgtttaaaaaccagcccgactgggaatttatggtttcctatccccttccacacatttttctggccacaaggcaagaaactatctctgcatctcagat

SEQ ID NO: 1560119 - DNA, 4001 bp, Homo sapiens
ccgagatcgcgccactgcactccagcctgggtgacccgcaagagtccatctcaaaaaaaataataataataatctatatcaggtagtggtgttatgaagaaaaataaagccaagtgaagggccatacagtgacaggagttattttagcttgagtagtactttagcaaatgcctggttgtgaagctgacgtctgagcggagacctgaaagaggtgtggaagaagccacacagacacctgaaaagacctgatccagaaggacaggacagcgagtacaaaggccctgaggtggcagtgcgttcagggacagcgagtacaaaggccctgagatggcaatgtgttcgctatgttcaaatgacagcggggaggccagggtggctgcagcagagtgagccaggggaatgagagaagtgatgggagttgaggggagggaggaggaggaacccaataggttggggcctcgtggatatggtgaagacttttgcagtgtaatgtgggagccaggagagggtttgaaaggagaaacaacctgacctgacttctgttctactagtatccccctaacagtgagaggcagagagcccacctggaaggccactgcaacaaaccaggtaagagcaggagacaaactgaggccagagtggtagcaaaggagctggtgaggcatggttggattctggatgtgttttgaagacagagctaatgcgatctgctagaccatatataagtaagacaaaagggagaagtgaagaagactccaagctagccaggcacggtggctcacgcctgtaatcccaacactttgggaggctgaggcgggtggatcacctgaggtcacgagttcaagaccaacctggccaacatagtgaaaccccttctctactaaaaatacaaacaattagctgggtgtggtggcgggcgcctgtaattcccttgaatctgggaagtggaggtttcagtgagccaagatcgcgccattgcactccagcctgggctacaagagcgaaactctgtctcaaaaaaaaaaaaaaaagaacactccaagcttcttgatcttagtacctggcaggatgaatgtcccatcaactgggtttggaggttgaaaggaagaaatcgcaagattggtttgggacaagtttatgtctgaatgtcagatgaacttccaaagagagaagagtcggccatgatatgagtctggagttcagggcagagatccaggctggaaatacacacgtgggagttctcattagataaagagggtgaagctagccaatggtatagacagagatgatgtcattctactgatgatgaagctgaggcacagaagggttaaacaactggcccaaagccacagtaatgatcagtggcagagccaggattcaaattcgggattcaacccgacgccagagcccacattcttaaccatcagtagagtaagtttaagagttaattcacctaaaacacttggcaggtgcacagcacatagcaaacgccacaggcataatagggcttcacatctctttaaagtacatgctcatccctggaggtctccttccctcccttcctcaatattgcttcttcccacgactttcacccaaatcaaagcttgtaaagcatagtgcgctgtaataaccctctgccttaaaacctcctactaaatcgccacgctgcattccaaggacgtctctatattttaccatctgctgtctcctgctttacaactttccccattgaagaccctcctgcgatatacagatcacccccaactcacatgctgcgctcagcctcacaacccctcaatcaagcgcctacccttgttaaagggcaccctccctcccgattcctacaaggccaggtcagctgcccaccgcagcccactctcccccgagagaagccccttcccctccacctaagacctccaccacggcccgcgcaaccgccactcccgcggcctctcaccttctccactagcaaccctcctcgcgagcggttcaactgacgaagctccagccccgccccaggatccggcgttctcgcttctgattggtcacagcttaccagcagccaagtttccattagccaaaagagacgcccatcactctgtccctcccccagaggagaacccgccctccaaaacttccaattggctaactaagaagaggctgtcccaaatgggttgggggaggcacctaacgtcgggctcttctctaatcactactggctaataatgctgccagtcatacaaaaaggttgttccccagagtggaagggaaagaatcccggaagtagccccttgactccacctattaccccctgcgggagggtaggccgcgcccacgtggtggggagggcctggaagggagagccgggtgtgcatgcgcatggggagatagtggccgcggctccggaaactggggagtggtctcagcataaagacaggttgagatttgtcatcgcttggtgcattccaaacctgcactaagcattttgcaggacttggcttatttaaactttataacagccctgcaaagttattatgatttccattttaccactaagaaaacagtctcagagaggtatagccactagcccgggttcacacggcttttgaacgacccatattttaaaccgatcagtcatgaactggaaggatccagctaaaggaattgagcgcggggatgggggaggagggacctctttaagaaaggaaaataaagtttaaagaaaaaaaaaaactgacatgaaagtttacttagaatatgaaataataacaaattacatatttaaaagagccaaataccacaaacattgcaaaatcccaaaggataacgtaatgtttttattaattttctgcctgacacacctctgtgatgtttcctactttttcagctgcatgtttcacaatatccttgtctacaaagagaaaagtaagttatctttcctctagcgtggttgatggaactttttaaaaattcattataatttagaacaagtttcagcttcacaaatcagtattggtgatgttattgaagtcttttggaaatctagaaaaacttctggccaggcgcggtggctcacacctgtaatcccagcactttgggaatcacgaggtcaggagttcgagaccagcctgaaccacctggtgaaaccctgtctctactaaaaatataaaaaattagctgggcgcagtagcggacgcctgtaatcccagctactcaggaggctgaggcaggagaatcacttgaactcgggaggcggaggttgcagtgagccaagatcgtgccactgcacgccagcctgggcaacagagtgagatgccacctccaaaaaaaaaaaaagaaaaactttcataaagtttcattcacatgttaactatgttttggaaaatgtttccacagactaacttctggctcaatactttcaattttttgtttgttggtttctttgtttgctgagacagggtctcgcttcatcgctgggctggagtgcagtggcatgttcatggctcactgcagccttgaactcctgagctgaagtgatcctcctgccttaccctcccaggtagctggtactacaggcacacgccatcacatctggctaatttttttttaatttatttttagtacacatggggtttcactatgttgcccaggctggtctcgaactcctgagttcaagcagtcctcccacctcagcctcccaaaatgctgggattacaggtgtgagccaccgcgcaggcttcctttcaattcctgacatttctgttacacagatgcttctggaatgagccgctaaaagatacattcatgccatttagtaggctgtggcctcgcatctagtgagttagtaacttacacaacagaagcattccgggaagccatttctacgccatgacaactaattaggtggtttaagtatccgagaagtatctatgaaccacataaaaatatccctgtaaacccaatctaaatgtattctcacttcaccttcccctcagctaaat

SEQ ID NO: 1560120 - DNA, 4001 bp, Homo sapiens
tggttatctgtgccctgtgacctctggtcagctggggcctctgccctctgattatctgcagcctcttccctctggttatctgcagcctctgccccctcctcagctggggcccctgccctctgattatctgcagcctcttccctctgattatctgcagcctctgccccctggtcagctggggcccctgccctctgattacctgcagccccttcccgctggtcagctatggcctcttccctttgactatctgcagcctctcccccctgatcagcctcgatgtctgccccctgacctgtgggtgctgtctgctccttcctgcggcgccgaaaggaggcccagttgatcttgggcctccatcgcctaggggaagcctggggcacacaaacatctcccgcgtttcccaagcgatcccccgggctggtgccctctggcgccgatgatacccctgcgctctccactgcggtggaggccagccgggcctcgcccaccccggggcccgccctcggcgcccaacccttcaccctccgcttcagcttcccccaggacacctggctgacatactcccgccacctgtccgctttggacagctgaggccccaggttgtcctcaaacatgggcactggcaggttgacgcggcggcgggcaggcggcgcgctgggctgcttctcctgtcgccggaggaaggcctcgaccagttcctcatcatcctcactctccaggtcgcttcccaggaacttgctgcccaggtagctgacgggcattttgcgcaccttcttgccccgccgcgggccctggcggctcttgtctctggaggtctcgaagtcgctgaactcgctgtcgctggcgttgctgctgtcgtacgtgcccacgaccagccggggcggaggagtcaccatctgctgcactctcctcctcactcggggctccttgggctttttggggggctggggcgggtgcggggtgctcttctccatgatgcgggccacgtcctccagggtgcggccctcttcttccaggaactgggtcagccgctcccgaaattctgcttccttggtggcgggcttagagatgactctccagacgcccccagccagcctgacctcccgggggatgagcaaatagtcgacgtcctccccgatctgcagcatccccaccgtggagtcctcctccttgcggaacaccttgccgatcttcttaaatgtccccacgggctttagggcttccacgaggacgtccaaatccacatctttgcagacatcggggacgctccaaagaatgaggcagtcgggggacggcaggaagccccaggggaaccagccccccacgtggcttttctcgagagtctttaagatctccagggtgatatctggggtgagggggcaatgagccccaacaaactactgtagcccttagtcttgagggagggactggatggggggagttccagcaacgctgaccggagagtctcacctccctagccagggacgagccaaacgcctccaatctcttcgcctgcaacaagtacagtcttgaccaagtccggctcccccaccaaggacttgggggaatcaatttccaggatgcctacgtgagccgggggcgaggtcagtcccaaggctcaaggcccactccaagctggaaacgtggtgtcccagctccaagttggggcgcgcgggctgccagcgactcttcctgccccaggccccagggacgcggctggaacttgggacaggacttcgcagacaaagacggtccagtcgaagctattcaatatggccgaggcgctgggaggccccagcccgggcctccagtagggtcccccgcccccaggcaggccgccacccagctccaggctgaccttgacgcgccgcagcctgccagcccgcgcgcttagagctctgcaccgtggagcgcgcgggcaggaagttcctcctcgccctccgccagaatgaggcccaccttcccccgtctcatcttacactcccagactctggaagactgacaggggggctgtccactcccttcggggcggcctccttcccctcccccacaggggtgtggccgcgccccgggcctagctgggcccattgcttcccagcgaagcggcagtggcccacgtcagcacctttcctgaaaggcagcggttcccaaacctgccatccgaaatgtgcaagtttccagccaagtccgggaggtgggtgtgctagtggattctactttttgagagccactggcaccacagattagcattttaaattcacgcgactatcggtacccgtacacctatatgcgtgggtagagaaatgggtacctgactgcaacagtcccactgtggcgcttggcaggtcagggctcaatacatatttttgaggggatgaataaacccaaatgttcatggccaggcgcggtggctcatgcctgtaatgccagcactttgggaggcccaggtgggtggaacacttgaggccaggagttcgagaccagcctgcccaacatggtgaaaccctcgtctctaccccgggtgtggtggtgcgcgtgcgtagtcccaagctacgcgagaggctgaggcaggagaatggcgtgaacctgggaggtggaggttgcagagatcgcgccactgcactccggcctgcgcaacagagggagactgtctcaaaaaaacaaaagtgcaaaaaaacccctacaaataaacaacaacaaaaaaccctaaaagttcacgagtagagactgcctctattttatggtagtatcttacagtgaaatattttgcaacttcgaaaaaagaatgagatggctaaggataggcacggtttatgaggcgcttcctatgtagtaggcaccattcccagtgctttctatgaatgaactcaggaaatccttgctataacaggagactggtagcatgagtacaattcccattagacagctgaggaaactgaggcccaaggacataaaaccacactctcaaggtcacagccatggggagtggttgagtttggatttgaatccagaatagtctgccttttgtgtcgaccaaagagtcaagatggccaggcgcggtggctcacgcctgtaatcccagccctttgggaggctgaggcgggcagatcacgaggtcaggagatcaagacaagaccatcctggctaacgcggtgaaaccctgtctctactaaaaatgcaaaaaaattagccgcgcgtggtggtacgtgcctgtagtcccagctactcgggaggctgaggcagaagaatctcttgaacccgggaggcggaggttgcagtgagccgcgatcgcaccactgcactccagcctggacgacagagcaagactccgtctcaaaaaaaaaaaaagaaagaaagaaagaaaaaaaagaatcaagatgtgaaccaatgctagtcgcattcggccgggagctcggttcttgagacgcgagtctaccgaagctcccgccagttgagaggcgagtctgccgaagctcccggccgaaaaagccaaatccttccttaacccagtgtctgaggggttttgtccgtggctcctcctgctacaggacatgcgactagcattggtccacatctttggaaccaggcatccagagacatgttgaataggcctcgttgttaggaaccctcagaggtacatggtaaggccagtgccatcaatcatctttttacagacggtgaaactgaggctggtctgaagttgcacagctctgagtggtggatctaatataatattagaaccagatcttgggcactagcatttaaaacactagctgacgctaaagacacagctaatccccttctcctaaatgtgttgcaccatttaaccacttagcagccacaatacttgcagccactcttgcctggatgtgtacaaagccccctcactgggcttcccgcctccccatcactgcttgcaatccaggccccatccagaagctgggggcatcttttaaaaacttaggtccgatctgtctctactcttttgaaaattctccatc

SEQ ID NO: 1560121 - DNA, 4001 bp, Homo sapiens
ctatggatcccatcctcccaagcccccttccccaaaactcagattctagagaccccatttttcagcctcaccatttcgctggctgcgtggagccaaggtcccagcaaacctcccctgcagaatctagacgcagcactgagggttcctggggacagagggaaaaaaaggacaaaggccaatggccccccaacctacttcaccctctaacatactgcgggatcctcacagccatacacaaaaaaccctgtaccccaagagaattgtagccctcactctccctcctttcaactgccacctccatcttctccatagaaattcagactcagccctttcatgatctttgtggactcacccagttcccatgtaaacgatctagtcaaacccaccttggggatgttctggcccccacccactgcttaagtatccaacactgctctcctccaaaggctgattctaggccagccgccacaccctgtggtatgagtgttagcccgggttccctatctcaagagagttccaactacaacccctccaaccagcctgcaaaagaaagttccagacccacctccctgtgctcatcctggtgcctctcatatccaggcgaatattctagctccaccaggtaaggttcagaaacattcccaatcccacgctcaaagaaagtccgaaccccactcttattggctgcccaagctctcagagaacattccaagcccgcgccttcctcagggacgtcctagtcccgtctccagcgccctacggaaggtcgacagcctcccgcctcccccgaaaggattctgtacacaggcccagaactcactggcgaggcttcctggaactggcgttttgccccactgaatactccacccgccccaacaaggacaaaactacccaggcccgccccagattttctgtgcaaagctccagcctcaatccggctgggaatgccagggccacgtccccgacatcctggaaaccgctctggccccgcccacggctcgggaaaaaactttctggccccgcctttcccgccagacttctggccccgcccccacccatgggccattaatgtggccccgctcccgactttcccagccacgctctttccccgcctcctggctcgcaggcaacagcctacacccgcccctaccatctcttattattattccagccccgcccccggcctgcccagtcaaccctctggccccgcctccgattggcctggccaacctcctggacacgccccctgactccctcccacacctcgttgcgtcagcatctggccccgcccatggcttccccagggttctggctcaactccccgcttccccgcctcccggccaacgctctggccgcgcccgtggctcagacgaaactttctggctccacccccagcattccccgccagcaccctggccccgccccctggctcccccactacattgtggccccgcccccgccattgcgtcagcctctgggtccgcccccaacgtcccggccaagaatctggacccacttccagtaaggcaaaactttctggccccgcccacagagcttccgcccggcgtccgagccccgccacacagctgaacaagcaacactatggccccgcccacagtccagccacaacttttaggtcccgcccacagccgccggcccaggctctggccacgccccgccccgaccctgcccacccacccaacggcccgccccgccagcgcccctccagcttcccatgtgggcgtcctgtccccgccccccgcagagaactccgaccccgcccgggcctgttcgcactccccgccacgtggggcttcaggccccgccttctctgggcgcgctcccggccccctcccccaggtcacctgtcccggagaccccgcggcgtccgcgactccggctccgtcggcctctgcgaccgcagctcccgggccaggcgcgtcacttcctgcctgcaccacgtgaggaagggaaataaagagggtcacttccggtcctgtgggaccgtttccgggagccttaaaggggccgcgcctccgcgatggatgcgggagcggggccgactggccccccgggtgttccgcaagctcatccaacttccttctgcctgaattaccaacttccaggaaaaggagacaccgtcctcactccctggcctctacctctttcttcaagctgtttccgcctccagcccctcattcctggtttctatcagtagatgccaagcactgggcactgacgcctggaagcctggcgtggttcgagccccctcgtgccaatgaaaccttagagttcgctttagaagcttcagatgttctaccggccgtgggcggtggctcacacttgtaatcccagcaccttgggaggccgaggcgggcggatcacctgaggtcagaagttcgagatcagtctggccaacattgtgaaatcccgtctctacaaaaaaaattagccggttgtggtggcgcgcgcctgtaatcccagcaactcgggaggctgaagcaggagaatcgcttgaaccggggaggcagaggttgcagtgagccgagatcatgccaccgcactgcagcctagacgacagagcagaccccttctcgaaaataaaataaaatgctgggcgcagtggctcacgcttgtaatcccagcactttgggaggccgaggagggcggatcacttgaggccaggaattcgagaccatccttgccaacatggtgaaaccccgtctctactaaaaatacaaaaaaaatcagcccggcgtggtggcgggcgcctgtagtccgagctactccggagactgagccaggagaatggcgtgaaccccgggggcggagcttgcagtgagccgagatcgctccactgcactctagcctgggcgacacagggagactccgtctcaaaaaatatacatatacaaaaattagccaggcatggtggcgggcgcctgtaatcccagctacttgggaggctgaggcaggagcatcgcttgaacccgggaggcagaggttgcagtaagccgagattgcaccactgcactgcagcctgggcgacagaacgagagactccgtctcaaaataaaataggccgggcgccgtggctcacgcctgtaatcccagcactttgggagtccgaggcgggtggatcacccgaggtcaggagtttgagaccagcctgaccaacgtggtgaaaccctgtctctactaaaaaatacaaaaattagccaggcatggtggcgggcacctgtaacacctgtaatcccagctacaggctgaagcaggagaatcgcttaaacccgggaggcagaggttgcagtgagctgagatcgtgccattgcactccagcctgggcgacagagcaagactacgtctcaaaaaaataaataactggccaggcgcagtggctcatgcctgtaatcccagcactttgggaggccgaggcaggtggatcacaaggtcaggagttcgagaccagcctggctaacatggtgaaaccccgtctttactaaaaatacaaaatttagccaagcatggtggcagatgcctgtaatcccagctacttgggaggctgagatagagaattgcttgaacccgggaggcagaggttgcagtgaggcaagatcgtgccactgcactccagcctgggcgacaaagtgagactccgtatcgaaaataaataagtaaatgaaatcataaaatataaaataaggccgggcgcggtggctcacgcctgtaatcccagcactttgggaggccgaggcgggcggatcacgaggtcaggagatcgagaccatcccggctaaaacggtgaaaccccgtctctactaaaaatacaaaaaattagccgggcgtagtggcgggcgcctgtagtcccagctacttgggaggctgaggcaggagaatggcgtgaacccgggaggcggagcttgcagtgagccgagatcacgccactgcactccagcctgggcgacagagcgagactccgtctcaaaaaaaaaaaaaaaaaa

SEQ ID NO: 1560122 - DNA, 4001 bp, Homo sapiens
ttccgcgacaggcagggaggactcgcaggactcagtacagtcagagggaggccaggcacaagcttcctgactctctcctagtggagttatacaggacgcatttaattctcctaaataccagtcatgacaatacacatgaaatgctgtctacacgggaagctctaaaaagccagggtttgtttttgtttttgttctgagacggagttttgctcttgttgcccaggctggagtccagtggcgcgatcttggctcactgcaacctccgcctcctgggttcaagcgattctcctgcctcagcctctacagtagctgggattacaggcgcccaccaccactccccgctaatttttgtatttttagtagagatggggtttcaccatgttggccaggctagtctcgaactcctgacctcaggtgatccacctgccttggcctcccaaagagctggtattacacacgtgagccatcatgccctgccctttgtagaggttaagctttgcttagcacttctgttgttcaggcaggagaccgagttccccgaggagtcccaactccccagcaattctgtagagggtaaaccaggactctgttagctcagcctcccaatcacgatactacatccgtttcctacagagtcatctccctggatctgaatcctgaggagctgaaacctgcagggctcagtttactcctctgtgaaatgcgcacactgtcctctgtctccaagagtctttgcacgcattccttgaggcaagggggataaagtgctctttgcagtgtctggcacccagtaggtgctccaaacacaaagtgctttattttccagtggtgcagtggaggtatctgtcataatccatactcacactccctttgtatcccagggctcctgtttcccaggagttcctacagcaagcctgagactgctctcctagaaagacctgcgtggggccgggcgcggtggctcacgcctgtaattccagcactttgggagtatgaggtgggtggaatgcctgagatcaagagttcaaaaccaccctgggcaacatggtgaaatctcatctctactaaaatacaaaaaaaattaaccaggcatggtggcgggcgcctgcagtcccagctactcaggaggctgaggcaggagaatcgcttgaacccaggaggcagaagctgcagtgagccaagaacgtgccactgcactccagcctgggaagcaagcgcaaaactccatctcaaaaaaccaaaaaacagaagtgtgccaacagtatagtttatactgaacctctgcttttcttctgggagtctggaatcttggccactgtcaggcagaggttatctgcatgaccagaccccagtaaaatcttggccactgtaaggcagaggttatctgcatgaccagaccccagtaaaaaaaacaaaacacacacacacacacacacacacacacacacacacacacacacacacacacacacacacacacacacacacacacacacacacacacacacacacacacacacacacacacacacgcgccaccccaccccaccccacccaaagtacacgattggttacagtccccaagtggggcggggcttctcagagccacgcccctcaagaagagggcaaaacacggccgccagcatttaaggaagccccgcccccagaaaaaaaaccctatctggtggtgattgggtaaaagcccaagccacgccccgcaggtgactaactacaccccagcccagaagggagacttagcgaaggcccacccccccgacggaaggcgatggggaggagtctagggaggagtctgggaagccccatctcgcggaaggccgctgggaaagaagggttccaaagaagagatctcaggaagctcctccctctcccggagttccgggatgtcctgctccgattgaaaagccccagtcgcccaacacttacgtttaatacttttcgctccgacatctttgccttctgatcacctcgcaagcacctgagaaatggttaggctgggtaattatcgagcttttccgacggaagccttacttccgcaaacgtcacttccttcggccgctattattggctgcagcatacacagcagacctctttcattggttccaatccccgcctatcaagctggaagtcccagcgtcttccctccggagttgcaacctgagtagcgcgaaataaggattccgggagccatgtggaattggagaattttgtatagtgcgctgcgccccctagaagcgggcagcggctcgttaaaattttgtaacgtgacctcttgttcttcattcttttattcagcaaatatgtattatgcgcctgccttgtattctgggctctgggaatccacacatcgttcctgggcccgcaactctcacatggggttggggccacacatagggtgacttaagaggaccctggacgactcttgagtcacagacattgacttaaagatcaggctccaaaccaacttcctaaacatacgcagtgtctcccaaatgtccctccattgcccacctgtgccttccccttaacgaggacttcccatcccattccttccccagcctccttccccagcctcctccccacctttcatggacgtttcctctgtgtcagattgttccaggaaaggggtccggatccagaccccaggagagggttcttggatctcgtgcaagaaggaattcagggcgagtccacagtgcaaagcaaaaacaagtttatttagaaagtagatgaataaaagaatggctacttcacagacaaagcagccccaagggctggtggttgcccatgtttatggtgatttattgatgatatgctaaacaaggggtggattattcatacctcccttttttagaccatatagggtaacttcttgatgttgctgtggcaattgtttgtttatttatttatcttttgaggagtcttgctctgttgcccaggctgacgggcagtggtgcgatcttggctcactgcaacctctgcctccagtggtgcgatcttggctcactgcaacctccacctcaggattcaagtgattctcctgtctcaacctcccgagtagctgggattacaggcacgcaccaccacacctgcctaatttttgtagttttagtagagatggggtttcaccattttggccaggcaggtctcgaactcctgacctcaggtgatctgctcgcctctgcctcccaaagtgctgggattacaggcatgagccactgcacctggccaaaaatcaactccatcttaaaattaacaaggcacattcgctgccagtcacgagccagggtcataagatgtttacaattgagaaaacgtcttacaaatgcctaggaggacacactactacaacaatggaaggtccagatgtcctgatattgcatagcaatgtatgcttttaagatcgttatagtcgccaggcgcggtggctcatgcctgtaatcccagcactttgggaggccaaggagggtggatcacctgaggtcaggagttcgagaccagcctggtcaccatggccaccatggtggaaccccatctctactaaaaatacaaaaattagccgggcgtggtggcgggaacctgtaatcccagctacttgggaggctgaggcaggagaattgcatgaacccaggaggctgaggttgcagtgaactgagatcgagattgtgccgctgccctgtggcctgggcgacagagtgagactccatctcaaaaaaaaaaaaaaagagaaaaaaaagaaaaagataccgggcatggtggcttacgcctgtaatcccagcactttgggaggccgacgtgggcgaatcacctgaggtcaggagttcaagaccaatcagaccaacacggagaaaccccgtctctactaaaaatgcaaaattagccaggtgcggtggtgcaggtcgagagttcaagaccaaccagaccaacatgaagaaatcttgtctctactaaaaatacaaaattagccgggcatggtggtgcat

SEQ ID NO: 1560123 - DNA, 4001 bp, Homo sapiens
atcacttgaacctgggaggtggaggttgcagtgagctgagatcatgccactgcactccagcctgggcaacagagtgagactctctcaaaaaacaaacaaacaaacaaaaacctgaatggggggactgaattgaacaacatgggggaagtcagtgcagaccctaatcagagcagtttcttaggagaaaagtcagacagtcgtgagcaggagacgaggaaatgaagaccaagtatacatgactctctgaaggagacagatggggccaagagacaaattttttttcttttttttgaaacagggtcttgctctgttgctcagactgcaatgcaatagtgcaaacacagctcactgcagctttgacctcctgggctcaagtgatcctcccgcctcagactcctgagtagccgggaccacaggaatgcaccatcaaacctggctaatttttttttttttgagacagagttttgctctgttacccagactggagtacagtggtgcgatctctgctcactgcaacctccgcctcccgggttcaagtgattccagttggtgcctcagcctcccgagtagctgggattacaggcacataccacgacgcctggctaatatttgtatttttagtagagatggggtttcgctatgttggctaggctggtctccaactcctgacctgaggtgatcttcctgcctccgccttccaaagtgctgcgattacaggtgtaagccaccgggcccggccttaatttttaaattttttgtagagatggggtctggctatgttgccagtgctggtctcaaactcctgggctcaagtctcactctgctgcagaggctggagtgcagtggtgtaataatcttaggtcactgcaatctcaaaggattcgagtgacactcccaccttagtctcctgagtagcttgtcctagctactccctagccaccaggcctggctaatttttaaatgtttatagagatcaggtttctctctcttgcccaggctggtctcaaactcttgggctcaagcaactctcctgccttggcctcccaaagtgttgggattacaagcgggagccactgcacccggccttaagactttttttaggttaaattttttatttttagaaaatttcaaacatacacaaaagtagaaagtacaacgacaattctccccctacctccatataccaatcatctccatctggcttccacaattaccaattcttggccagtggtgttggagccacgcttccaatcacacctcacccgacgtcggattactttgaaggttgtgggaaagcacagaaattgagtaaggactttgaaaggagcctggctggatttcggactttgggggaaacgggagttacaatgaaatgaaggaatcgttagattgggataagtttgcatgaggcaggtagaagtttagcctggaaaggtaggaggattcgtctagagagcaagggaaggctcagcttggtacagggaaggaggtaatttgagaagggctggtctgaggcaatgcaggaattaggccggggtagagaggtttctgttaatttgagagttagcctggtaaggaaatgaattagggacatggaaaggattggtctggaactgggaagaggttaatttcggggggaaggaatggaggaaaagaaggtcagcccgcgacaagggagggaataatctgggcaaagtagtgaagaggaccggtaaagctgaggggggtgggtgtccccctaaaacgagtcctacttcgcgttcctgggggaatcatttcctagagacaccgcaaccgcacccacccgccgcctgcgcgtgaccaagatctcacccttatcgggttccttcgccgccgtcgccgtcgccacggcctccatcctgattctctcggacttttcaaccgcccggcgggccccgcacactaacctccggcccacgcacgcaagagacactttcgcctgagaatgttccgggtccgggtgcaccgctgcgcccaggcaccgaagttccgggcctaaggcagacgttgcattgcgcatgcgtgcctctctcgggctccgccctccgcagccaggaaggaaaggggctccccggagagtgagagacccttaaacctctcctgtcagtcagtaggaaccagaatcattgttcgttttatcactgctgtgactccagctcccagcgtgcttaattttgggatggatggctaaaggactttcccccggagcctggagccgtcatacgctgagggttcgtgctctcgtttagacccccgcttgtccttttcctttcttaactccttcaggaattcaggaatattactaagccttgactcttttttttttttttttttttgagacagggtctcgctttgtcgcctagacgaatgcagtggcgcgatcacagttcaagtaacctcacattcctgtgctcaagtgatcctcctgcctcagcctttggagtacttgggactacaggcgcgcacaaccgcgcccggctaatttttaaaatttttttgtagagccaggggtcccactttgttgcccaggctagtccccaactcctggcctcaagcaatcctcccgcttcagcctctcaaaatgctgggattacgcgcgtgagccaccagcctggcttacttccgtcatcataccctgtctctggctggcatgagatggatagtgagatagaacttcccattttgtgttcccaggacctggaggaaatctacaggtgtgaaacaagacaactctggtccttatttccctatgggatgggtggggctctatttaggtgttaccagcagagtagacagacatgtcactcagtggccagggctttgatggatccagagggctgagggagctgtccaccccaggctggagggtcaaggaagccttctttctgggagggtaccctcaagctaagacctgaagaacgagtaggagctgggttaagaggaaggtagggaagagtcttgaggaggatggcacgtacggacggttctggttgctgcaagcacttcactacggtcagggcataggaaaggagctctaacttgaaagccatgattgggctgtggaggttttgagaacctcatgaatttttatgcaaaattccatgtacctctgtattctccaatgcagtggttcatggcatcatttgtgggttccaaaaaggacttatggctcctcagaacaaaataaacactgatttgatattcaaagggggagcagaaagagagggcgccagcgatgttaccaggtgctaggccatgcagggcctcataagccatagtaagtggcttgacctcctttattctgaagggagtgggcatcaagggactggagatgagacgtgtgagaaaaactggctgagaacagaggaagagcttccccatttgcattcccttgaggtctggagttgtggaagaaagccaaggaggtccctatttaccaacccagattcctaggcattaccaggagaggccagcagagggcgctgtagcccagcatatggacatgaagggaaggggactttccagactaaaggccctgccacctcctctctggcgcattctagggtcccttttagccaccaaccttggttccttctcacgttctgatgccctacccgagattctgagactagtcagtttccctcccttgtttttgttgcccatctccccttcacaaggctctgagctcccaccagggaagattggggctgaattggcttctcctgtggcccagcattgtctctcacaaggagccaggaacacagcatgtatgagggaacgaagacataaggttgctaaggaaggggaagatgggccatggggatgcaatctggagtcttttaccctggctcactcctccaggaagccctccctgcacaccaccccaggctctcacagctgaccacttggtgctggcaggtctttgttctctctggagtgggagctctgtgagaacggggtccaggactgccgtggccata

SEQ ID NO: 1560124 - DNA, 4001 bp, Homo sapiens
aggtgtgagccaccatgcccaccctgttacggcacttttggtgccaccaatcatggtgacatcttgttttccatgacccagcaatggtgtctgtctgtcacctagtgaagtaggcacagcagccacttttcacagtggccaacttgctagtgatggtggcttgcttctgtgcaatggtgccatcttggttgctgtagtccatacagtagtgtggaagtataaggtaaaggccttgcacggaagttgttagccagtcgtggtgtcagtcttggccactgtgatccactagtgatggatctggtggtgcagggccaacaccggtggctgtgagttgtgactccactgaccatcatcaaccctgcctccaaactgtgttggtgttcctccttcatccccctactcacctccctctccgaagcctcctccttctcctgcctgggctcagcctctggctggtggtggtggtggtggtggtggggcaagtcctcgcgcctctctcctccgcctctctcggccccctgccacaggctgcggtccccgcccagcacccgcacccccttctcctctgcctggaactgggccgtctctttgtcactggccttctctgccacccgcttctggaggtcccctccattctctagatgccgctgccacaggtcctcaaaggtctccatgggccccctcttcctctcctccttctcctcctcctcgtcctcctcctggtggagctggcgatgcccttgcatgcggatggcttgttcctggacctcagacttgtgggtcctctctgctacctcctcctcttcctcatccctcacctcctggctggacctcatcttcccagcctcctgcttcttgaaatccccaagcagcaggcctttctcctcggtggacgcacagccgtggggctctgtcccgcacaactctggcagaaagggaaaggacactctctaagcatccaattgggaaactgaggccgagtatggaggctcacgcctgtaatctcagcactttgggaggccgtggcggccgatcacctgaggtcaggagtttgaattgggaaactgaggccttgaggagttctgggccctgccgaaggtctcacaggggggctgcccagactacagggggagggtcctatttcatcccacctgggaggggatgttccctgccccatctggcccctctgcagggaaccacaagggtgttgctggtggccaggctctgtcaggtgtgaatgctgggcagtgccccgctggtccaggcaacagggctctgggaatgaggacctcttcctccaggtagcctgggtgggagagcatgtgggcacctgggcaggaccctgggtggggtagggtagggtcccatggggttgtggagggcaagtggggcccggggcctccttacccttgtggagaagagcagtgcagggtcctctctggacctggcccacggtcagcacctctgtgaccacctctgccagacagcgggtcagctggggggcaggggtgccgggtcagaggggaggttgagggcaggggagatggggaggagagcagctggtttgagggcaatgaggatcatggggcaggctgtgcagggagggcagggccccagctaggtgaggcagggcaaggcctccacactcctcacctcctccttggagggtctcggtgccaagggagcagcggtggctgtggagaaaggagatggcactgggctttgccgccctggctgctgtccccggtaccgaccccagctccatgggcgtcccggtccccacacatcccctccccatcccacccggcgggtgtactgtcccccgctggaggctcggcccctgaagcctctccactgggtgcactgcctgccccctcccactggagtccccgctccccggcccctggcaggtcccgcactcggcaggtcccgcactcacccgcccccagcaggagcagccgcagcagcagcagctcagaggctggccctcggggcggcatggtgggcgtccaacgggtccaaggcgctgtgcgggccagggttgcagcgccttataacccacgcggggaccctgcaggggaggaaatgatgtcacccccgccccctccccgcccgcggcggggcgacatctgcggggcggctgcctgcctgagaccctcaattattcatgaggcctccgccctgcacgcgctcccctcgaggcttcaggccaggagctcagcgcagatggtggaggcctcccttttttcgtttttttgagacacggtctggctctgtcacccaggctggagtgcagtggcgccatcacagctcactgcaggctcctgaacacacttgatcctcccacctcagcctcccgagtagctgggaccacaggcgtgtaccaccatatctggctaataatgtttattttttgtagaggcagggtctcactttgttggccaggttggtctcagactcctgggctcaagtgatcctctcgtctgggcctcccaaagtgctgggattacaggcctgaggtgccacacctggcctggggggatctcttcccagagcagcagggtctggtacactcgccctccacgctggcaggtggaccggggtgggaacccagaagcagccactcacagatggtccccaggcaactccttcccttcctgggcctgttttctcacagggtcttgttacaggctggagtgcagtgcctcaaactctcacacaagggatcctcctgcctcagcctccagatcagttgggactgcaggcttgcattatcatgccacagtaatttttttcattttttgtagagaggggttcttgctatgttgcctagactggtctgaaactcctgacctcaaatgatccgcccacttgggcctcctgaagtgctgggactacaggcgtgggtgagccactatgcttggctgagagtgggtctcataaacccgcttcctcagaggctgcagttggcttctggcctaagccccagctccaccacgtgccagctgtgcagcccaggataaccgcttaacttctctaagacctgtttcctcactgtaaatagggttggtgacaacctactctacagttggacagtgaggattaaatagttgtgtgtacagtgtttagggaagtgcctggtactgggaacggcacacgtccaagcatcttcagtgcagtaatttttgttgagcatctactacatgccaggtcctcttttagacctgaggctacagccctgagccaatgggtggatacctctgccctcctggagctggtatttgacacacatcaatacatattaaggaaagaaggcagaaatgcatcaaaaatatagtatctcaggctgggcgtggtggctcatgcctgtaatcccagcactttgggaggccaaggcaggtgcattacctgaggtcaggagttcaagaccagcctggtcaacatggcgaaaccctgcctctactaaaaatacaaaaaattagccggacatggtggcacctccctgtaatcccagctatgcgggaggctgaggcaaaagaatctctcagaggttgcagtgagccgagatcacaccactgcactccagcctgggacagtgagactccatctcaaaaaaaaaaaaaaaaaaaaaaaaaagtatctcagatgtaggtactgagtgctgggggggttttactgtggtcacggaagacttcttggaagaggtgacatttgagctaaggcctgagtgacaagatggaggccagcacacaccatctaggggagagacagccagagagggagactcaccaatgtaagtgcacgagtcaggaaggagtttggagagtttcaatgtcaaggcgggtcgggtggaccaaacaagacagaaagatgggctgaagaggaaggtggagcagctcaggtggggtcttaggggcctcgatgaccactttacccttttactctgagacgaagccacaggagacctctgagcaggggtgggacacccagctgaggtgctc

SEQ ID NO: 1560125 - DNA, 4001 bp, Homo sapiens
gatgaattagacctagtgttgtcttcagggagctcccgggaaactgatctctgcagaaagggggaagcacaggcactgtggggggtgcccagaggaggaggaggtgatgccagaaagttctggggggatgagcaggtggaatgaatgagccgaggatgagctgatgagatagtggaggaagctggggtgcaattctctgcctaaatggcctttggagttctctgcaatctcacctctgccagaactaacctccagaggccgagtctgagtccctgcagagcccagcccagcaggagcagggaaagggaggactcgagccctccaggtgtctcccaaccgcggcctctgagggcaaggggcagcgcattctgttggaacctcggactgcagtgccaggcaggtagttcccaaggctggaggccaggatcgaagggctgggctgggcctggctctgatagcaaaacaatcagaccacagcccaacccccttcccaggcaaaggccaaggacttggacccatcagacccagccgaggggcaggtgggtcaggtgggggcagacagggaaggagggtgggaccctgggtctgccgcccagccagggaccctgctttggccagctgctgaaactcagaggatgtaggacccagtgtcagggctcccgtggggacaccccaggcccaggaattgtcctttggcgactgaaatcctcaagtgcttgctctgcggtagggagtggggaagaaggaaagagttccctattaataacaggaacagttactattgccgccgccagacatgaggcctagtcttttgcaggcatgagctcactggaccctcaagtcagagccatgcagtgggaattttagattcccactttgcagctgaggaaacggaggctcctaaaggtttaggaagccgggcacagtggctcaaacctgtaatcctagcactttgggaggctgaggcaggcggatcgcctgagatcaggagatcgagactactctggccaacatagtgaaaccccatctctactaaaaaatacaaaaattagccgggcatggtacacacgcctgtagtcccagctacttgggaggctgaggcagaaggatcgcttgagcccaggaggcggaggttgcagtgagccaagatcgcgccactgcactccagccagggtgacagagtgagactctgtctcaaaaaaaaaaaaaaaaaaatggtttaggagcaactaactctcagctggactgcatggagggaccaggatgggaatccactcttgtcagtctccagggccctgatctccaaccccacccctggctcggcaggattaggattctacaatacatccctggcagtaactggctttgcccacagctggaagccaccctctgctccctcacatctttaggagtcttgcaaaagactccatggggctctcgaagaaggaactggggactctccatctccccgaccccatcccaagagctaaccaaacaccaggagttcctgcatgtcaggagcgggagaattcagtggagatgggattggggagacttccggaggagataagagacaaaaggggtggggtgggggcatggggagaggggcacttggtggtaggcattgccgaacacagtaccttgggtgtggacagcgggggcccaggctcccaggaagccggccaccaggcaggccaggagccacaggttcatgctgcaggcgggtcctcctccctgggcacctggacgaataacggggccacctggggtcgtggagggaagtggtaaggactgaggaagaggaggggagtgggtactgggaacatcccccctcttaagccccaggcatatggcaagggaaggaggttgtataaagtaggaacaagttgtgctggagggaaaagctgttcatctcagtcatgttcaaggaaaagactcaccgatatccactgggtcaagggagctgatgcccgccgggctgtaggccaagctgtcccatctgcaggaccaacacgctgagcttcactctttatagacagagccccacccagccaccccctgcccgccctcctcccttcctcctcctctccacctgcactctcagcctctggaattctccctcttctacagcaagctccaacctcgacccacaggcccccttgcctccccactccccatcccaggcctcccagccagcacccctactgtctccagaaagggccttttcccctgtttccctcacctgcacacacctggtggacactggctgcctgcgaacaaggctcagactgccttgagcccccaaacaagcccttaccttcatgctccccccgccctcaagccacctgttccctggtgggtccccaacttcactccatttccctctccttccacaccatggttaggtaacttagcatgtcacagaaatcctctggttgtgatcacaggcaaatccatagaaacagaaagtaaattagcggtggccacaggatggggggaggggagaatgaaggactgactgtgagagggtatgggtttccttttgttctgaaattagatgagagtgatggttacataactctatgaatatagtcagcacggcacaatggtgcacctcccaccggtgaacaaccccaacaagaaagaaactctctaggccaggcatggtggctcatgtctgtaagcccaacactttgggaggccgaggccagaggattgcttgagcccaggagctcaagaccaccccgggcaatatagagagacctgcgtcactacaaaaattttttaaaaaattagcctgacgtagtagtgcatacctgtagtcccagccactcaggaggctgaggtgtgaggattgcttgagccttggaggttgaggctgcagtgagctgtgatcatgccactgcactccagcctgggcaacagagcaagaccctgtctcaaaaaatggaaaaaaaaacggtggccggacacagtggctcacacctgtaataccagcactttgggaggccgaggcaggcggatcctctgaggtcaggagttcgagaccagcctggccaacatggcaaaaccccatctctactaaaattacaaaaattagccgagtgtggtgggggggcacctgtaattccagctactcaggaggctgaggcaggagaatcgcttgaacccgggaggcggaggttgcagtgagccgagattgggccactgcattccagcctgggcgacaagagtgaaactctgtctcaaaaaaaaaaaaaaaaaaaaaaacaaaagaaaaagaaaaaatggaagaaatgttttgtttttggaagaaaagccaggagccccgggtagccatgccctcaggaagcaaagcaacattcaccgagaaggcatgtcttttttttttttcttctgagacggagtcttgctcttttgcccaggctggagtgcggtggcgctgtctcggctcactgcaagctccgtctcccgggttcacgccattctcctgcctcagcctcccgagtagctgggactacaggctcccgccaccacgcctggctaattttttgtatttttagtagagacggggtttcaccatgttagccaggatgggagaaggcatgtcttctttccctggggcagcaggacccagccaggacacagggactgggggagacacgaggtgaagattagggagggcgaaaggagcgctgcagaggccgcacagctgattgctttaaactttttatcgcctgcatccatagctacatctgacctctgtgggtatttatcacatcctaaactcctttctcatttctccccttccactgggagcccagaggcggcggcccctagcctacttccctgtcccaaaccacatggccgggtgagtggggcttagaggtggggccgggcctggtgggtgtggcttctagccggggacgtgactagataaatgacacttagagcccaggggcagggctgggtgggcgtggcttatggctatgggcggggct

SEQ ID NO: 1560126 - DNA, 4001 bp, Homo sapiens
aactaccctggctgctgctctgcaaagtgaggggcttctctgctaacctagctgggatccctgcactcaggtcgaacactgtttctgttcagcgtttatctgtgatagagtcagaaggcctgaccagctagtttagagataggctgcttcccccactggagccataactacagtctccagccatttctgaaagtaaagagatagtacaagctttttctgcaagaaacttctgatattataatgattatcacactgcatgcaggaaatttggcaggaactccttaaggagagaaaagaaaagcagtcaaaaaaaaatgtattgagacaccacctatcattacactgaatgttccactgatactcttgctgaggtcaggctgagctggggatcaatgcaggtaattgctggaggggctataagaacttccagggccagaaagaggagaagaatttgaaatctgacctacagaagacggaggaggtccttaaacaccatgacaagaaaaataggtgtagatagggggaaagttgttgcttataaacacccaggaaccctcccccagttcaccagcttttacagacaaggccgagagcccaactttgcccctggatggcacaggactctgggttactttcttcctctaactgagtctcagtttcctcctgggcagaaggggaggactgaatactgtgatgtccattctggttcttccaggctaggcacatatctgtaatctcagacggtgccagtcaggaacaccaagcttcctggaatcccaggactggcagaggccagtgcccactgacaggtacagtgctgggccatatgggctgtggctgcattagagaagttcactctcaccagagtgtctccagcaagagacaagacagcatgaaaccccatgtgacccagggggagaaggacctccacagaggcccaaccccgggcggacctacctggctcccacactggtccctcgccgtcctgtcgattttggccatttcttcatctggatcctgcaaaaactaacatgaagccacccccatgaccccaaggaaacacaccaaacaagacaaaaacagagagaagaagagaaagctgatcaggttatgagctccgttcctgcccaagggacccccgcccccgtaggcagagccaagtcgggtacccaggtgagatgggggggatgctccccaacctgtctcttttgtactcacaacggtcacgtttgccttcctcttcctggagcgagccgagaactccgcgccgccgtcctccttcatggtgtcccgctccttcgcatccctgtggacccgggtggcaccgggccgggtgagcacccgcggccgcccctcccccacgccacccgtcccgtcccgtcccgtcccgtccggccccgcggcgcgggcactcaccgctccctgcgctccctcggcatgatggggctgctccggcctgaggcctgcggggcggcgcggggtgaggcggcggcggggtcaggccgcgggcccagtaccccttccccctttgcgcgcgggcggccgggcgagccaggaagatggccgatggcggggtggcctgtcacccgcgacccgggcacccgccgacccccgacccggggtcccgccgcccccgccgccctcaccggcccgtcgcctcccggggcccgggctgcctcagtgtcccctccaccccaccccgccgcgctctcagcaccctcccgggcgccccgcgacgccgcccggggacccgcgacccggccgcaccccgcccccacccagctccccggcgcggtctgggccccaggagtccctgtccgcagcccgcggcagtagactcaccagggtcttgtccgcggcggacggcgcgctccagtcccggcaggcggcggcggcgacggcagtggcggcggcggcgccgggagtcggcgggccgagcgcgcggcggtggcgggatccgcgcctgccccctacaccgcgctggcggccgcgccggctgctcctgcgcccggctcagagcgggacatttaaaatccctgcgcgcggaaccggccccggcccgccctcgcaccgccccgccgcggctcccagcccctcagcggccgcgcgggacccagagcccgtcccgccccgtccctcgccccgcccccggacccgcccctccacggcgccggcccgcgaggcgcagggacggggaatcaggggcggggccggcggacagggcggggccaagtgacagggcctgcgcgccgagggccgggcgcggggcgcggggcgcgggacgcggggcggggcggcgggcgggacgcgggagaagtctggcgcgcggcggcgaggggcgggccgcgggcgccgggggcggggccgagcggcgctggagcggcaaaaagccgcgtggctggcgcgggtggaatgtaaacacggcgggcggcgcgggttcgggccccggcagggctgagccaaggggatgtgtggggggcctacccgaggagcaccgcccgccgttcctccgcgcgcgctgtcccgccaggcacgccctccccgcccccgagacgccgagttccgggccctgagtcctgggcggggacatccccaaggtcaccgcgcctgtgccttggcctagaaccaaggcttcaggccgcggggtctggggctccctgggggccggctgctattcctggccgcctgtccattcatccgtcagtgcattgggtcgttcattcattcattcaaggaatctgtgagttccttccatgcgccccttccatatgcgcccctcccccgcaagcccttcctggctctctgaagacctttctgactctgggattcccttgcaccccatctctcacttaaagccttccagttgaggccgggcgcggtggctcacgcctttaatcccagcattgtgggaggccgagacggctgatcccttggggtgttcgagaccagcctgggtaacagtgagacccccatttctacagaaaaagaaacaaaaagccttccagttgtttcgcataagggtcaaatccacactccgtgtcctaggctacaggctccacaggacctgaccctgatcccccaccctcagacctcaggcctcctctccacagctcctctgtcctttctccctcaagacttgtattttttattgtggcggggggtggggggtggcaggtagggatagggtcttgctatgttgctcaggctggtctcaaacccatgagctcaagcgatcctcccgccttggcctcccaaagtgctgggagcccagcccctacacagtcttggtgcctctctgtttcttgtctctctccccaccttgcccatcttgctcactgctgtatctgtcagttcttggcatagtgcctggaccaagggagacacttaaattgtttctgaatgaacatttgaaagacaggcactggccaagcccttgcagggcttaccggctaatgagagagacaggtaaggaacagtcatcacctcagagtaccctctgtactcagcttcaggaagatgtgcgtaaaagaaggctctggaatgctcccagggcccttcttaagctaaagtctcagtcctgtccctcaccctcccctagtgaccgttttcttgaagttagagccagggtcttatcaaagaggctcacaaattcatgattcccccaggtgctctgaggccaaggctgctgggctacttgctcagcagggacccaggcacctgaaccccccatcctgtgcccgttaggaatcaccagtaacaggtatcataaacagtgtttccaaaatggcagcactgggctaagtccttcaaagtatcatctcaattaaacttcacaataatcctattcatgttgatgccacaattatcctgtttcacagatggcaactatctactcccaaggatcattgtgaagattgagataatgtagctgactcctgtacagtacctggcacacagtaaatgctcactaaatgagttattataatgatggtagacaagac

SEQ ID NO: 1560127 - DNA, 4001 bp, Homo sapiens
taggaaagtgacagacagagtgagggggcactgagagggcactggatttgatcagataccttctctgcaccccacttttgctggcctcaagagtcaacctgctcagccttcccaaaggggccttctgcagctcccatcatgggatctggatgtgggaaaataaagaagtgtaatccataaaagaggaagggagaatgaacaggaggtctgggtagaggcacccagggctgggtacagaaagtggtcttggctgggtgtggtgactcacacctgtaatcccagcactttgggaggctgaggcaggtggatcacgaggtcaggagttcaagaccagcctgggcaacatagtgaaaccctgtctctactaaaaatacaaaaattagccgggcgtggtggcaggctcctctagtccctgctacgtgggaggctgacgcaggagaatcgcttgaacccgggagtcggaggttgcagtgagccgagattgcgccactgcactccagcctggtcgacacagcgagacgctttctcagaaaaaaaaaaaaaaaaaaaaaaaaagaaaagaaaagggggggtgtcttgggtggcaagtgggggtggggggtgggcagggtggaggaggggcctgctgaggccaaatgtagactcagacatggtcaagtctgaacctttcaacaaagtctggccttccgaggggagacacagaagcagactcattggtcaagggaatgagggggtgccctggaacgagccagtgccttcacctgcaagcgctactaaacctccaagaacaggagacttctgtgttcacaagctgttccaataaaagaagcgcaaaatatctccctagactctttataacaccagacaaggaaagtggaaagttacagttcagtctcccttaggaagaggaaatagcaaaaaccctgcaggagaacttcttgaaccaaacgcaacagaataaaaaaagaatgcaggataacccagttaatggtgatttcatatcagaaatccgtcctgtttgctcttagaagaggaggggtgcggggattcccgggtggcaggtcggtgggagggatcgggagtgagtggggagggatggaaagggagcggggcggggcgatggtcagggagcagtcaggggagggatggagccagcgagggtcgggatagcgagcgagggtgggagggactccgtaacagcccctctgtgctcagcggatccccttctagcagcccctccctctcctcccgaccctcccgcaggcacctgctgggggctgtggggcccaaagcgggagggagttaacgaggttgttgcagaagtcctcctggcggcacacgaaggtgtaggagatcagggagaggccggggcccatccggtgctcagtgacgcggggctcctggtccttggcctccgtgcagcccttggagagcaccaggctcacttggggtcctggaccgaaagagggaggcaagcgaggatggaggtcaggcctccagggtcctggagggagacgctgctacacggcgtaggctgagaggctggaaaggggatcaccgggaccctaggagtcgatcccccggaggggtggctcccgggtccctgcacagggatcaagggactgaggggacagggcggggtctctgcacgccagggccttctcaccgctctcaatgagcatcaacgtgtcctggcaccccaagccgctgtcgcagctggtgttcttaggggtccattgccggggcaggtcggacaccttccacacatgctgaactgtcccaaactggcagagcagcgcctgcactcctggagtggcaagagcaaatccatctcagcagggttcccttgcccggcctccagggaatctcctccaggctgggctcatcactcacctggcagtgggaggatgaaccccaggagggccagcagtaataccgcgctcatgacccgtctgtggctggtaatctctttctgctttttcagcaggaaacaagtcctttataccagcccttaagcagccagcccagaaaagggtggggaggggagggccttgcaaaatggaggcttgggccccaccccaagtctcaatggccgcagtggcctatcagggaccccctttcttcctcagaccttcgggtccaggcatccagcccctcctccctcagatggagggtccaggacccccagcccctcagcccctcctccttcagacccaggagtccagacccccagcccctccgccctcagacccaggagtccaggcccccagtccctcctccctcagacccaggagtccaggcccccagtgcctcctccctcagacccaggagtccagccccccagcccctcctccctcagacccaggagtccaggccccaggcctccctctctcagacccaggagtccaggccccgaggccctcctccctccgacccaggagtccagacccccaggccctcctccctcagacccaggagtccaggcccccaggccctccatagttagaaactgtggcatcttgacccgaggttcccccggtccagactcccagccctctttcctcctgagcccagctatgtggatcaccacccccaccctctttctccagtagtttgggaaggcagtttcctcatttctcatgggctccctggccacctctgtaccccagatggggaaatggcccaactacctgtgaggacgttgtgcagtgggcatcagcttgtccccatgtcttccggtcctagtttctaccctccactgtcttcccacttctctgttctttctctttccttcttatattgctttcttttgattcttcttttcatgcttttctctcatgctttctcttctattctctaccctcacagtacaacataggactcaagtccccagtttcctaccaccaggaaaggcttggccagaggtggagtagagactgaatatctatgaaagaattaggatatatctgaaaaatgcaacatttatttgctggaagccgatgggagagcagtgttgtgctgaaaaaccaagttttctgaaaaacaatacccacaaatcctgcctcgtagtgttggcctatttctctggtgtaaatactcatagcatgtctgattttaagctacctacagtttgccaaccaggctgatgaaatccctagctatttaaccatgggcttgtccagggctgtacaaatcagctgtaacacactggggtggcggggaggaagacaggaaggaacctggggtatctgtcagtgactgcagagggacgttgtgggtgtctgtgacggagagaggagaagcagaagagggaaggcgagagcaggaatagcagagaaagagaaatgaatgtgacttgcaattatatgtttatttttgacatctctataaattttatctttatttgtctttgcaagtttattgcaagtttaatatttgccacacagacagggaagtgtttgtctgatctcctgctatgtctccaccacctacatggcatacagtacatgcccagtaatttttttttttttttagaaacagagtcttgctctcacctatgctggagtacagtggtgcagttgtagctcactgcaggtcactacagcctccatctcctggactcaagcaactctcccacctcagcctcccgagtaactgggactacaggtgcacaccaccatgtctggttaatttttgtattttcaatagagacagggtttcactatgttgttcaggctggtctcaaactcctgacctgcggtgttttcattttgaaaaatttcaggctgggagcggtgactcataccagtcatcctagcactttgggaagccaaggcgggtggatctattgaagtcaggagattgaaaccaacctggacaacacggtgaaaccccatctctacttaaaaaaaaaatacaaaaattagcccggtgtagtggcagccacctgtagtcccagctactccggagactgagacaggagaatcgcttgaacccaagag

SEQ ID NO: 1560128 - DNA, 4001 bp, Homo sapiens
aagctcacccactgcagccttcagccgggtcagctcctggtagatctcctgctgcttagatttctctggaagctcacccactgcagccttcagccgggtcagctcctggtagatctcctgctgcttagatttctctggaagctcacccactgcagccttcagccgagtcagctcctggtagatctcctgcatcttagatttctctggaagctcacccactgcagccttcagccaggtcagctcctggtagatctcctgcagcttagatttctctggaagctcacccactgcagccttcagccgggtcagctcctggtagatctcctgcagcttagatttctctggaagctcacccactgcagccttcagctgggtcagctcctggtagatctcctgcagcttggatttctctgagagctcacccactgcagctttaagctgggtcaggttctggtagatcgcgtcttgcctggattgttcctgacttatggagctggggaccttggacactgggccaagaaaaaaaaggaactgcaattattaaacacctactgtgtgccaagccttgaactgagccccatagggacatcatttgtgagagccaaggtcttggttaatcccctttgaagatgaagaaaactgacacctggagaaggcagcacagaaggccaaggagagccagattcttcctgtcctcctcctcctccctctcctgtcctgccctagagtggggaggggctgtgggagaggcccctacagacccccagggacaacatcttggctctcagtcccacctccctcccagatctggcagccccaggctgtgtccacagccaaaagccaggcgtggggaccccagaccctcagaacctgcccctgaccttggacaaggagcccagccaagagcgtgaaggagaggagttgcagcaccaggggaccatggccaagacaccctgagagaggatacatgcgtcagcctgccagtgtccccaccggagcctggcccagggagagcctggtctaaatccctcagcaccccaggacccaggaaccccagccccagccccctccactccaacacctgggaatccaggccctagctctaacctccccaggacccagggaccccgtccccagcctccccttccccaggtcccaggaaccaggtacctgcttccacctccccaggacccaggaatccaggccccagcctctacattcccaggtccctggaacccaggcccccagctcccacctccccaggacccagggacccaggacccagcctccccttccccaggtcccagtaacccaggtacctgctcccacctccccaagacccaagaatctgggtcccagcccctacatccccaggtcccaggaacccaggcccaagtccccacctccccatgacccaggagtccaggcccaggcccccacctctccaggacccaggagtctaggcccctgaccccacctccccaggacccaggaacccaggcttcaacttctacctccccagaacccaggagtcttggccccagcctccaccttcccaggaaccaggaattcaggccccaaactcaacctcctcaggtcccaggagtccaggcccctagccccacatccccaggacccaagagtccaggccccagcgtccagctcctcaggacccaggagtccaggagtctctcgtctctcctcccaaactgctaagtcctctctacctgctaagctcttgtatcctcgagtctgtcggaatccaaggcctctcagctgttcctcctctgaatggatagacgtgaaatcagagcctgggcaggctgaggccatggctggccatcccttcccccttcccagaatcccagcgtcccaacccagcctcacccaggaggcccagctgctgcagtcttggttccttggagtcactcatgtcaccccactctcccccagtgtccagaactcctgggggccacagcttttatttcccaccctgtgatctttacttcctaaatctagtctcccacagaaagagaaacaggaagttgggtagggatctgtcatccaaaagactagtggaaagcatcagagcatgagatgggccggatctttcaagaatttcagggaggcagtgggggatggtctggggttgacagggagaaggactcatccactcatggatggctgagcagtgggatgcttttaatgaaatctgataaattgtaagagaaagctactgtgttacaccccctccactagggcaagggtaggcaggtagcacccccagttcctggaagcactgtcccctgtgacctcctggctttcctgctttgagctgctgctgtcctcatttttgggaattcctgctgactttgggagttggggcagaatcataattgcttgtttatttaatgcctagggtagtcaggtacttttccaacagctttataaactcattcatttaatgttcctacccttcagtagatcatatgacctccattatacagatgaggaaactgaggaggcactgcaagtttagctaactggcccaaggtcacacagctggtagatggtggggctgagacttgaacccagtctgcctccacagtgcatgctgttaaccaaagagtgaaatagtatcaaagaggaaagaaaagatccatagcagctttatttagaatgatctgaaattggaacaaccccgtgtccaccagcaggtgaatgataaaaaatataatggcatattcaaagattggaatactatacagcaatgaaaaagcaaagtactagtacatttaataacatagataaatctcacaaaacagtaaaaggacccagacagagtgagtacacactgtaagatttgattttgtgtgaattttgagaacaggcagaactaacctttgaaggagactcagaatgggaattatcaggaaggagcaggtggagattgacaacggggtttctgtatgctggaaatgttctatattttgatcatagagatgtgcatttaccacatgtgtgttaaatctcagtttaaagatggaaaatacatacatgtatcataatcaaatagtggttttcgacctgatctttactttgtattcttttttaaaatgttttaattttagaataattttgggtttatagcaaagttgcaaatgtaggaaagagatttcccatatgtaaatccctcacctagggatccctaatgtgaacccagtttctcctaatggtaacatttcacatggtaatgaggtaggaaactggaagaacttgttttctggccacaaccctgcagacccatacagaatctggtccagatgagatgatgtgaagaaaccagcaggaaccagcagatggcaacaaaagcaatccctggctgcctcattgctcgtgggcataagatactccctccagtgccatgactgtttaccgatgccatggcaatgacctagaagttcccacctgtttccatggaaacaacctggacatcttcgcccttttccttaaaacttctaaagaacctgctcctcaatttgcattgacccaccccttaactgacgtataactgaaagtgagttgacatgagtataactacagctgccaagagcttgtatgttgttgactctgggtgcactgcctatgagttagccctgcttcacaaggagcagtatcattacataaaaaatatctgtctaaggccaggtatggtggctcacgcctgtaatcctaacactttgggaggctgaggtgggcggatcacagggtcaggagttcgagaccctcctggctacatggtgaaaccccatctcttttaaaaatacaaaaaaaattagccaggcatggcacgtgtctgtagtcccaactactcagggggctgaggcggaagaattgcttgaacctgggaggcagaggttgcagtgagctgagactgtgacaatgcactccagcttgggcgagagagtgagactccatctcaaaaacaaacaaacaaaacc

SEQ ID NO: 1560129 - DNA, 4001 bp, Homo sapiens
aggcagatcacttgaggtcaggagttcaagaccagcctggccaacatggcaaaaccccatctttactcaaaatgcaaaaaattagccaggcgtggtggcgtacacctgtaatcccagatactcatgaggctgaggcaggagaattgcttgaacccgggaagtagaagttggaatgagccgagatcatgcaactgcactccagcctgggcgacagggcaagaccctgtctcaaaaagataaaaaataaactaaaaatgtacagagctggtcaaacaaaacctatctgtgggttaggttctgcaactgttgcccatctttctttctttctctgcagtgagcttgtcctctaccatccctgacctctgcatagagttatatttacatagagttaaatttaagtcccaatttacatgatcatggccctccgtgctggcccccggggaccctgaaggatgtgacagcagagtgtgtctccggtctcagcaccaacccaagcccctcccactcacctgccaacatttcacacgcatcaatgttcctctctctgtctgtttatctcctcgggccacatggctcatgccaaaggctgctgggtatctgttcatgggtgtgcggaaagctaagctgcttgccgacagcaggaagggggtctggcctgggctaagcatgaatttggggtgcagggtctgaagctgaggcagattccccaggcagagctgacatcagccccgcaggtactcatcatgtcacatgcaaaaaacatcttcaaggtcacatacacttgagaaaggcagggtaaaagagttaagtaagattctttttttttcttttgagacagagtctcattcttctgtcgcccaggctgaagtgcagtggtgtgatctcagttcactgcatcctctgcctccagggttcaagtgattctcctgcctcagcctcctgagtagctgggactataggcatgtgccaccacacccgtctgatttgtttgtttgtttgtttgttttagtagagatggggtttcaccatgttggccaggctggtttcaaactcctgacctcaggtgatccccccaacttggcctcccaaagtgctgagatgacaggcgtgagccaccgcacctggcttaagtaagattctttactgcaggactttaaaaacctttcagtaaactctatctacaccattaatctctagacatggggattagagtatagtataatacattgtccatacttctttggccatgggatctattttacatgttccataaaaaacttagcagggttgcagagccagagttctttgaaatccccttaaggttacctaaggggtaacaagggctgtggcaaggactagactccgttccctgcagccaacacttgcctccaggagccgggccattgtccctcctctgccagcaccctccagccacaacctgctctgggacgggctggagcatcccagcatgagtgggagatgggcgcctccagagcaggactgtgtgctgcctcaaggagctccaggagtctctggagcacaggagtagggccccaggcccgggaattggaaggctgagggtggggtggaggttagggacagcagttattatgcacagaggctcaggacagggccatgctgtccagacctcctcagtccaggcctgttgagggccttgcagaaccttggggctgacctccctggctccttcttccctcctgggcatccaataacctaccctactctcagaagactcagcaggcctggcaaggaggatgctcaagacaggggtctgtctacaacctgttgtaacaccggtaagagagagccagggaggtccccactgtgttcccagctctgggaggtatgcctggcccataactgctgttccgtaataacttgcttgttgaatgcaaaataaaagcaaaatgatttttacctgtttccgcgtgtcttccctcttcagggaccctggcagcatctgagagcaaaaggagaagtacagtaaagtctctggtgacagaggtttcccctccatggccacaccccctgcttctctatggctctgagggggaccaagcagcaccgtgatctggggagtggggaaaagagacgattgagggggatgcgggctcggagtcagattggaagactcgaatacgtatgggcagttcttcctttccgtgtatgggtttgcaatatcagatcagtttcagaatgggctcctccacaactccccctctacccagctctcaggaaatgcgaatgactcaagccaagcaggagaactgcagcccgctgaaaaaggcacaggcctacctgaaagtatttgtagtttagtgacaccatccagttattaccatttccactcttttcatcataggcataaatggtggggaatctgaccacctacactgaagcccccaagggttgagggaggagcacatagatattgaggaggaaaaagatatctcggccgggtgcggtggctcatgcctggaatcccaacactttgggaggctgaggcgggtggatcacttgaggtcaggaattcgagaccagcctggcgaacatggtgaaattccgtctctactaaaaatacaaaaaattagctaagtgttttggcaggcgcctgtagtcccagctactcagggggctgaggcaggagaatcacttgagcccaggaggcggaggctgcagtgagaagagatcacaccactgcagtccagcctgggtgacagagtgagactctgtctcaaaaaaaaaaaaagaaagaaagaaagaaagaaagaaaaagaaaagatatcttgtaggactgggcatggtggctcatgcctgtaatcctagcgctttgggtggccaaggcgggtggattgcctgagctcaggagttcaagaccagcttgggcaacatggtaaaaccccatctctactaaaaaaaaaaaaaaaaaaaatccaaaaattagctgggtgtggtggcgggcgcctgtggtcccagctactcaggaggctaaggcaggagaatcacttaagcccgagaggctgaggttgcagtgagcagatcgcgctgtggcactccagcctgggtgacagagccagatcctgtctcaaaaaaacaaaaaagatatcttgtaggaagtgttattgaatggagagtctttaggctgaaacctcatcacctttataatcctgtagccagcgagtgtctcaggagcagaacagacagcattggaagccatgcacatcctacagatgaagagggatgcgctgagaggtcttcactccagcaccactgccctctatgggcagctggccatagggagggaaacagagagagggaagaacaccttcttccaaaagcaccgatagggctgggtgtggtgacttatgcctgtaatacgctttgggagagcaaggcaagaggattgcttaaggccagaagtttgagaccaacctgaacaacacagcaaaactctgtggggctagtcaacaaaagcaaaaaatgaaaagtagctgggcatggtggcccatgcctgtggtccaaactacttgggaggctgaggcaggaggatcgcttgagcctgggagttcaaggcttcagtcagccatgatagcaccactgcactccagcccaggcaacaaagtaagaccttgtctcagtaaataataaataaataaaatgaacaaaaagcagtgatgttctggaaagatggagtagatgtatttatttattctgccaagtataactgaaaaccttgaacgtgacaagacaagcataagaagactgaaagatggagagaagcagactggttaggaacctcgggacttaaggaatggtggtgaattccctgggatttctctttgcctcatatatctcaggctgaatactggagaagccaacaactgaaaatgccaaggggcacaaacaagaaaaagtcccaacagaacaagttctagcaaaactatgcttttctagccaaagaacgaggaaaggggcatcct

SEQ ID NO: 1560130 - DNA, 4001 bp, Homo sapiens
cagatcacttgaggtcaggagttcaagaccagcctggccaacatggcaaaaccccatctttactcaaaatgcaaaaaattagccaggcgtggtggcgtacacctgtaatcccagatactcatgaggctgaggcaggagaattgcttgaacccgggaagtagaagttggaatgagccgagatcatgcaactgcactccagcctgggcgacagggcaagaccctgtctcaaaaagataaaaaataaactaaaaatgtacagagctggtcaaacaaaacctatctgtgggttaggttctgcaactgttgcccatctttctttctttctctgcagtgagcttgtcctctaccatccctgacctctgcatagagttatatttacatagagttaaatttaagtcccaatttacatgatcatggccctccgtgctggcccccggggaccctgaaggatgtgacagcagagtgtgtctccggtctcagcaccaacccaagcccctcccactcacctgccaacatttcacacgcatcaatgttcctctctctgtctgtttatctcctcgggccacatggctcatgccaaaggctgctgggtatctgttcatgggtgtgcggaaagctaagctgcttgccgacagcaggaagggggtctggcctgggctaagcatgaatttggggtgcagggtctgaagctgaggcagattccccaggcagagctgacatcagccccgcaggtactcatcatgtcacatgcaaaaaacatcttcaaggtcacatacacttgagaaaggcagggtaaaagagttaagtaagattctttttttttcttttgagacagagtctcattcttctgtcgcccaggctgaagtgcagtggtgtgatctcagttcactgcatcctctgcctccagggttcaagtgattctcctgcctcagcctcctgagtagctgggactataggcatgtgccaccacacccgtctgatttgtttgtttgtttgtttgttttagtagagatggggtttcaccatgttggccaggctggtttcaaactcctgacctcaggtgatccccccaacttggcctcccaaagtgctgagatgacaggcgtgagccaccgcacctggcttaagtaagattctttactgcaggactttaaaaacctttcagtaaactctatctacaccattaatctctagacatggggattagagtatagtataatacattgtccatacttctttggccatgggatctattttacatgttccataaaaaacttagcagggttgcagagccagagttctttgaaatccccttaaggttacctaaggggtaacaagggctgtggcaaggactagactccgttccctgcagccaacacttgcctccaggagccgggccattgtccctcctctgccagcaccctccagccacaacctgctctgggacgggctggagcatcccagcatgagtgggagatgggcgcctccagagcaggactgtgtgctgcctcaaggagctccaggagtctctggagcacaggagtagggccccaggcccgggaattggaaggctgagggtggggtggaggttagggacagcagttattatgcacagaggctcaggacagggccatgctgtccagacctcctcagtccaggcctgttgagggccttgcagaaccttggggctgacctccctggctccttcttccctcctgggcatccaataacctaccctactctcagaagactcagcaggcctggcaaggaggatgctcaagacaggggtctgtctacaacctgttgtaacaccggtaagagagagccagggaggtccccactgtgttcccagctctgggaggtatgcctggcccataactgctgttccgtaataacttgcttgttgaatgcaaaataaaagcaaaatgatttttacctgtttccgcgtgtcttccctcttcagggaccctggcagcatctgagagcaaaaggagaagtacagtaaagtctctggtgacagaggtttcccctccatggccacaccccctgcttctctatggctctgagggggaccaagcagcaccgtgatctggggagtggggaaaagagacgattgagggggatgcgggctcggagtcagattggaagactcgaatacgtatgggcagttcttcctttccgtgtatgggtttgcaatatcagatcagtttcagaatgggctcctccacaactccccctctacccagctctcaggaaatgcgaatgactcaagccaagcaggagaactgcagcccgctgaaaaaggcacaggcctacctgaaagtatttgtagtttagtgacaccatccagttattaccatttccactcttttcatcataggcataaatggtggggaatctgaccacctacactgaagcccccaagggttgagggaggagcacatagatattgaggaggaaaaagatatctcggccgggtgcggtggctcatgcctggaatcccaacactttgggaggctgaggcgggtggatcacttgaggtcaggaattcgagaccagcctggcgaacatggtgaaattccgtctctactaaaaatacaaaaaattagctaagtgttttggcaggcgcctgtagtcccagctactcagggggctgaggcaggagaatcacttgagcccaggaggcggaggctgcagtgagaagagatcacaccactgcagtccagcctgggtgacagagtgagactctgtctcaaaaaaaaaaaaagaaagaaagaaagaaagaaagaaaaagaaaagatatcttgtaggactgggcatggtggctcatgcctgtaatcctagcgctttgggtggccaaggcgggtggattgcctgagctcaggagttcaagaccagcttgggcaacatggtaaaaccccatctctactaaaaaaaaaaaaaaaaaaaatccaaaaattagctgggtgtggtggcgggcgcctgtggtcccagctactcaggaggctaaggcaggagaatcacttaagcccgagaggctgaggttgcagtgagcagatcgcgctgtggcactccagcctgggtgacagagccagatcctgtctcaaaaaaacaaaaaagatatcttgtaggaagtgttattgaatggagagtctttaggctgaaacctcatcacctttataatcctgtagccagcgagtgtctcaggagcagaacagacagcattggaagccatgcacatcctacagatgaagagggatgcgctgagaggtcttcactccagcaccactgccctctatgggcagctggccatagggagggaaacagagagagggaagaacaccttcttccaaaagcaccgatagggctgggtgtggtgacttatgcctgtaatacgctttgggagagcaaggcaagaggattgcttaaggccagaagtttgagaccaacctgaacaacacagcaaaactctgtggggctagtcaacaaaagcaaaaaatgaaaagtagctgggcatggtggcccatgcctgtggtccaaactacttgggaggctgaggcaggaggatcgcttgagcctgggagttcaaggcttcagtcagccatgatagcaccactgcactccagcccaggcaacaaagtaagaccttgtctcagtaaataataaataaataaaatgaacaaaaagcagtgatgttctggaaagatggagtagatgtatttatttattctgccaagtataactgaaaaccttgaacgtgacaagacaagcataagaagactgaaagatggagagaagcagactggttaggaacctcgggacttaaggaatggtggtgaattccctgggatttctctttgcctcatatatctcaggctgaatactggagaagccaacaactgaaaatgccaaggggcacaaacaagaaaaagtcccaacagaacaagttctagcaaaactatgcttttctagccaaagaacgaggaaaggggcatcctaga

SEQ ID NO: 1560131 - DNA, 4001 bp, Homo sapiens
ggtcacataagggtccaagctgggtccagagaagatcccggctgtcctagattctgagcagggaagctcagctgcttgccgacctggaggggcacggaggggcccgcaacctgggccaagggacagaggaagggagtggcctttacggcttcctcctgggtgcggccaggggaggtggcaaatccgccaccctggcttagcttcactctgccaaggcctttaacctcttccacctttacccaccagccatgagcctccaaccccccactccccactgccagcccctcctcggccttcaggcctaattgcacctacttgccacagggtccctgagctctatggatcccagaagagctgtggacaaaccggtgcctgcttccttccccgcccccgggagatctggcagcctccaggtgtggctctccacccaggcgcagacttccacagccctgacacctctgacctcccttcgctggactgcgggagtgtgtatccctctgcaaagtggacagtagagcacagcagtccccgcctcatagggtgtaagcctgacaggagttacagtgaccagtgactttctctcctggcctcagtttcctcacctgtaaacggggtatgctgggaatccctacctcaacatcctgagaaaaaagagactgtgtatagagttttgtcctgtaatcccagcactttgggaggctgaggcggacagaacacttgaggtcaggagttcgagaccagtctggccaacatggtgaaaccccatctctactaaaaatacaaaaattagccgggcatggtgacggtgcctgtagtcccaagctactcgggaggctgaggcatgagaattgcttaaacccgggaggcggagggtgcagtgagccaacattgcactgcactccagccagggcgacagagggagactcaaaaaaaaaaaaacaaaaacttttgtacttggttaacgtgaacgctgcctccttaaaaaaaaacaaacaaaaaaaaacccaggaacatttaacgtgaatgtcagggactttgggatgagtccagggacctagaagtgcggaatgcacaaaggagctgggaaagtgtgtgagcctgagcccagggctgcaagttgggagtgcctgagtgcacagggaggccactccaaccctccagctgcctctaggggtatcagagagggagcccgtccccactggccaccaatacctcttaggccagggcgaacacgtccacgggggtatattcaacttgtgaccccagtctctgcgagagcctgcagtagcatgggggggagagacctcgcgttctctaaggatggaggacaaaggaggagagactgggagggcagggacggttgcggaacggtcacaaggcctgggcgcgagggtttggaaggcaaaggtgcgagaggcaccaggtgacccgtcctgcgtgattagcggtcggacaatctgagcctgctaagagctttcctgaccacgctggtatgaagggcggcttggaggtgacaatgggggacgacagggcacagcaggtgtggagacggtgtgcagggccggagcaaaaccgttaaaggcaggtggagacaccctcctcccctcccccagcatggggtcttcctagcaccagtgcgcgccttcccacaagcgatgaagtccaagtccacgtgctgggggagtgtcatgaactgacgtgcggtgcagccagtgactaggcgttgtcggtgcgcggcggcggggcgaagcctcgcgaggggtgggagcccgcgctgcggggcgtcactcacctgcggcctgggcagaggtcggggtggaaagcgggctcgcggcggcctccaggcctagtccgaggccgagcagcagcagcagcgccaggcccagagcccctgttcgccacgctccaacctgcgccatccaaccgccgctcatgctgtccccacagcggcgccggccacgcgctgtccagaccgctctcttatccctgcgcacgcgcacgcgcggggttggggcggggcccaagcccctgagttctgcggcgcccgcggctacgcgtaccgtaaatgtcagaatagcagggaaaagagaattagaggcccgtccccactttccccagtgaccagatcagttgaaaggtatggagcccgcttgaagttagaaacttctggggatgggaaggaatttgttggtgttcatttgcattatttcccgttccaaatgaggactgctgcaaatgttactgcctcgtgatcttctttaatatggcagccacgcccctcaggcactccgcatttcctccctcatcccactgcttttgtggcgccgacaggtaatttattttatttacttattctggtttgttgtccgagtccccatagaatgctagctactggagggcagggatcttctgttgctcactgctttattctcaggatctgacacatagtgcttgactcatagtaggctcttagtaaacatttggtgagtaaatgaataaatgaaacgtccattctcggagtcgggttgcttgggggggaaaaaggaaaggaaatcaattaattaattaaatttaataataaaggccgggcgcggtgggtcacgtgtgtgatcccagcattttgggaagcagaggcgggcagatcgcttgagcccaggagttcgagatcagcctgggcaacacagcaagtccccgcccgcctcaagaaaaaagaaaattagctgggcatggtggctctaatttgtagtcccagctactcaggaggctgaggtgggagaatcacttggggctgcactccagcgtgggtgacagtgagaccccatttgttagaaaagttggccggcgcgctggctcacgcctgttaaccccagcactttgggaggccgaggcaggcggatcacgaggtcaggagttctaaaccagcctggccaacatagtaaaactcccgtctctaccaaaaatacaaaaattagccgggtgtggtaacatgctcctgtagtcccagctactagggaggctgagatgggagaatcgcttgaacccgggaggcggaggttgcagtgcgccgagaccacatcattgaactccagcctgggtgacagagtgagactctgtctcaaaaaaaaaaaaaagttgtggtcataaaacttggttcagatgccgtcagcggcatgccttgcctagggtcttgccctccttgtggcctctgcacaccctgcctagtctttccttccctcctgacctttctgaatctgattcatccttttgccccaagcagaatcccaccttctccaggaaggtgttagcctttgtaggacccactctgggacactggtacctgctgcctgtagccgtggcctttccccttccagagggcagggcggtctcagcaccctcttggtccacagctgatcttttttagctgctgaagggtctggggctgtgccctggggaagccatgacactcccctgcgtagggtcactgggtggctcctgcagccagacttggacaccctccctttgcagatttctgtctcctccccaggaaccagctgccttccttctggggcgaattcattcttatcccacagccccagcataatgggatctggctcagggaggcctttcctgatctgccctaggtttgccttccctgtgagcagcccttactgtcctctgccttccccgttgagctgcagggtgaccatggtcaagcaggagcctcagtgggaaggtgctgaggaaggttcatgtgagaagtggctgtgggagccctcaagagatggaagttaggccaggcgcggtggctcacgcctgtaatcccaacacttcgggaggcagaggtgggcggatcacttgaggtcaggagtttgagaccagcctggccaacatggcgaaaccccgtctctactaaaaatacaaaaattagctgggcttgtggcaggcgcctgtaatcccagctactcgggaggctgaggcaagagaatcacttgaacccagga

SEQ ID NO: 1560132 - DNA, 4001 bp, Homo sapiens
ggattatcattcagccataaaaaataatgaaatcttgttattcactataacatagattgaactagaggacattatgttaaatgaaataagctaggaacagaaagttgaataccacatgttctcactcataagtggaagctacaagaagttgatttcatagaagtaaaaagtagaacagagaataataagggctgggaaggttaggggaacaatgataaggagagagatttgttaaaggatactagattacacctggaaaggaagaataagttctggtgttctataccactgtaggatgactatgcttaacaataatagatagcttcaaatagctagaaaggggatattgaatgttcccaacaacaatgaaataataaatgttcaagatgatggatatgctattaccctgatctgattactatacattattagtatggaaacatcactatgccatccataaatatgtactattattacatatcaattaaaaataaaataccccaagacattcagagacaggagggagacaaagagcattatttggatgggcaagggggaagttgctagtcatccccaaatatccttttccaaggtgcctgatgtctacccgtgtctaactgcaggccttgcctctgaacatttgactctgaaagtccagatctgaccaaacctgacacagactcaatgtcagtaacagccccaggcggggaggctccttcctacctgagccatctcctggaaagataccagttgttgggttctgtggaacatctaggagaggaagagaggatttccttcagttgggggtagagatgagataagggtaggcatttccccttactcctgccagaaaccacagaaatgcagaagggacagggctcatgtccttctggctcccgaactcagccaggcctccaggacactaaatgtccccagcaccagcccatcctgtctcccctacaccctcagggaccccagcatcctggcccagcacttacaggtgacgttgagctggatggttctctccgtagtcacaccagctccagcgaacttcacctgacaggtcaggttggtgccgtggtcctggggccgtggggtgattatgagcaccgaggagtgagtagtcctggggcccagggaggtgggggcagctgacaaccaggagaagatcgggggtgttccctgctcacaggcccaggacacagagcaggtcaggtttttggagtggccgggttctagagtgccagggatgaggattttgggcctgtgggtcaagtctagtgaggagaaagaggggatgcagaatcaggagggagggtccaggtgagggcctgagagaagatcaacctctggtcaagctcccccgctaagcacgacaggctttacccctaaacccctcccagtaccagggtcccatcccagccctgccctgcagtacccatgaacttcccttgcggccacttctgaagcctgtgcctcacctgtcacatgcacagagagctggggagatttgtaactgtatttggtacttcctctctccatccgaaagaagtatgaaccattatccctcctcctggcgtctacgatgctcagggagcagttgttcctactgggatccccaaggaggcggaatctgccctgagtctcctcctgtacttcttgatctagcttgtttgtggccactggagagtccctggatataatggctccttcccggaaccagtaaccatgaactggggagttcttgtcgtagtagggtatgggatggaagaaagtgcagggcacgaggacgcacaaaccctcctgtaccgtcactgactcctgcacttgcagccagaaatttggatccatagccagggcccctgtggggaaacgagggtcagctcggcccagcccgacaacccctctccccacagccactcacctgcccacagcaggggcagcagtagcagcagcggcatgtctgaggaagcagcttccagggcttcctgtgtgagcagaaaagaggaagggagtggaggggaaggactacagggccggacaggaagctggggaggagcaggagacctcagccctgcatggaagaggaacctcagacccacacatgctcagagcttgtcccctccacacagattgaccctcatgggccagagatgccagagacccgcccagagatgggaggagatggagcagaatctgagtcttgccttccaggagcaccagagcctggatcagtaccttcagggccatctgagacatgcgaaccccatgtctaaagtccttccactctgaggtgcttttctgtgcacaactgtttacaccagggctgatcactgctggcctggcccgagtcgcagcctcacctagatccatggggtgtttagtccagcaggatataggattctatagggtccgtgtgagtgtctggggcagagaaacaaagaagagtcctaggtaaagtgaaggtggcagccattcatttattcattcattcactaaagatatagtgagtgacagagcaggagcaccgtcatctcggagaaacactgcctctttaagttccaatttcctttctagcctcatgcatttcaaggaaatcacttctctgctaactacaagcaaccagaaagagcagacagtgaaacacagataagacagctcgggcacagagggaggtagggggagagtctcttgagttactgccaaacttcaccctcatacaatggccctagtaaaacagtgggccttaataagcaaattcctttcccttcaggtgcactaagatagggaagctaaaagcagactcagtgggtatgcctgtagctgcagaaagatgtatgggtacagacacacacctctctctcccagataagcacaacaaagagactcagaagcagtccaagtctctgataaactctcccaccctaaatccttaaaaactcttagtctgtaagagagtgtgcctctgacttaactcggccagaaactcctctcaggtttgttttctctaaaatctgtcttgactggtgagccaccattcgtgtttctttcctctttctttaattcttacagtgagcctttgtgtataggtggggcttgagaagagatgccactgacctgattcctgcccttaagatactccccatccatagcctcatgtcctcaccacacacacacatgctgtctggctttagagctgtgaaaagttgggaatttgccatgtatcatggtagcatattggaaattttaaaagaaatatgactatagaattttcccctggcacctagtacactgatttgcacagtgtcaatgacatctccaaaacaagaaccatgcagcatcttcctgtgaaacaaaagggagaacacatgttctatgaaccagtgcagaaaaaacttcttttccattcatgctgccatttggttcagtgtgggcagaagcaagtttttttagaggctcatcatatggatcaacattttctttcatgtaaaaatctgcttctcacagttaaatatggcccaaagacataatatttccagacaacatgagtggagtgtacagagaaaattaaactttaggtccagctacatggttttccatatcactctgtgtagtatgcatccagcaaaccgttgatccctgggacatattagtacttgccaccatacctttgtcaaatctctacacacaatagtatctagataactcttcattcatccttactaatagagaggtagctgcatcctcatttgatatacaacaaattaagtctccagtaaataatatctgttgtaagttatttaaatatttagcatgtggcacgtaatagaaaattcaatacatttagtgcttttttttttaagacagggtcttgctttgttgcccaggctggagtgcaccggcctgaccacagttcactgcagccttgacctcccagactcaagtgactctcccacgtcatcctctctagtagctgggatcacaggctcatactaccaggc

SEQ ID NO: 1560133 - DNA, 4001 bp, Homo sapiens
tcctggactcccacctcagcctcccaaagtgctgggattatgggattacaggcgtgagccaccaggcccagcctcttatttctctttatctaggttagcccctgtctgcccttgtttcggtctctctccaccctctcccaccactcccttccctctcctccctgctgggggtgggtggtggccactgcaggaagctcacctgggcccgctgagtggagatgaggattcccagggtgatctgtgtggcaaacaggagcagcagcatcccaaaatactggggagcagagtggagagatcaggctgaccacccctgcaaccccggcccaggccatttttgagggtggggataggagtgttcctagggacggagagggatggtgcactcaccaggcccaggaggcagcggagctccttgagggcccccacacaacccaggagggcgatgcccatggtgaagattcctgagatggccaggactttggaccagatctgcagaggcacgaaggccaagcctgggagaggtgaggggagtgatgatgagctgtgtggcacagctccaggcagccccatttcccacctaggcagccacccaagtggggagcagtatcttggtgcccctctctctgggactctgtccctgccccaccctgagtccctgtttccttctgaaactttctcttctttctgggcctgtttcccgtccctggatctctgtctctcttcctcttaccctctccttcctccttcagctcctcctcgtccccagtagtttcagccctatcacttgttctgtgacattggcttggctccttaaacctccctgaggcataggagatgatatctatttcttagggtttttttttgagttggagcctcgctctgtcccccaggctggagtgcagtgatgtgatctcggctcactgcaacctctgcctcccaggttcaagtgattctcctgcctcagcctccctagtagctgcgactacaggcatgtgccaccatgcctggctaacgttttgtatttttgagtagagacagggtttcaccatgttggccaggctattctcgaactcctgacctcaagtgatccacctgcctcggcttcccaaagtgctggaattacaggtgtgagccaccgcgcccggcccctagggtcattttgagagacacatgaggacatgtgttcaacccagtcctcaacacagggcaaagacttcttaaatatgagcgtttagggttatatttcattattatttagggtcatacttcattattattttcctattattaatgttattttggctcttttacgtccttgctgtatgacatccatcaaggggcttcccctctctgaacctcaagcgaggggaaggtttgtgggggcatctgaccagccacaagtcccgacagataggaagtgcttgagaaatggctctcatgatcattgttgtttgtatgcacaaccccatttgccggaagaagactcaggctccaagaagcctccggtgagcagtggatgggagcctgtagcctgcctgcagagtagggcaccgtaggtctccctgagacaagggagaccccaggaagttgcttgggttgggggaggccctcccacctgccccagcccccctcacccacaaaggacacgaagctggtcttgtcaatgaggatccagatgccgaagcagaagatcaggctgccgaggacctggggagaggagatgcggatacgggggtgggccacaggggaagatgagggctgggttagcggcaggggctgggccccggctgggtagccatgaggcaactcacgaagaagaagaggttgaaaacgaagaggaagtacttgatgaggctgaggcagctctcctgggctgacatcttcacctagtggggtaagcggtccactcaccacacagaagaggtgctgacagtgggggagacagggagaaagaaagaggctgagagagaaagagagacggagagctgagagagaaaggaagaaccccaaaagaggaagttccaggggtggggctccacccactcccgcttcatgtaaggtggctttctgtctctctctctgtccctgtctccctcacctgctccactgggacacatgctctggtacctgaggggccttggaatttgtgggcaccaaggactcatggggcagtccctcccaggtctccatgtctcaggcgctgggggatctaaagggacccctgatctactggaacccacctctgggcatggggacctcagggctgaccctggacagcagctgacctcacagacactctgacctcatggcctgctaagctctcccatctctgcatccagctgtgtctcccatttcctgccctgggtctcttgttcctcctctctgggtctttgtccccaccttcctgctactccccatctctgtccccttatctcagcagagtctctccctcctctgggtctctgtcctcctgcctcctggggtctctatcctccctctctctgtgtttctttattttatttatatatttgtttctttttgagacagggtctcacttttcacccaggctggagtacggtggggaaaacagctcactgtagcctgggctcaagctatcctcccacctctgccttctgagtagctgggattacaggtgcacactaccatgcctggctaatttttgtattttttgtagaaatggggtcttgctatggagtgggagtgttgtattttttatatttaattaaaaaaaaacagagatagggtctcactaggttgcccaggctggtctggaactcctggactcaagcgaccctcctgccttggcctcccaaagtgttgggattacaggcgtgagccactgtgcctggcctctctctgcttctggccccttctttgggtccttcctcctttctctcttcatctctcttttgtttttgtttttgagacagggtcgcccaggctggaatgcagtagtgcgatcatagctcactgcagccccaaccttcccaggctcgagcaatccttgcacctcagcctcccaagtagctgggactacaggtgcacaccaccatgcctggctaattttcttcattttttgtagagatgggagtctcactgtgttgcctaggctggtctcaaatttctgggctcaagtgatcctcctgccttggcctcctaaagtgctgggattatgggcgtgagccactgtgcccagcctgtcttcttttctctgtctcccccttccccacttgtttttgtgcctctcagagtctgcagcctgttctggaccagggagcacccaggtgctgggggcaggggctgggtacctggggaagtgaaagtgctacaggctcgaggtgggaaggtccctgggagtggggagggcgctgggccgtgccaacacccccagcggaagctgagcatcaggcggtacttcctgcctctgcagtggggcccgaggagcggaggccccagaggaggaggcactgagcctgggatcctgacagtcagatctgggtctgcagtgcctggttgcaggtgcacacccagtggcctctgcagtttcctctgatgtccccaaattctctcacctggtttcctcatctgaggcagccccaccatctatctagtcatgaggtcaaagctccatcttgtcccctcttccccaacagcgcatcagtctcttagccagatccctcctgcctgctgagtctccactccacccctcttctctgtcctgagggctcaggcaggctctgggctcctgctctcctacctggaccctgactttaggcttctccctggcttctagtttctccctccagtctgtcccccacatagccccagaggggtctttttgaaacccagtcctgagccacacagttctgtatccaaacgctgagtcaccacctgcctcatccctcagcttttatttttttggtggttgttgagacagagtctcactcttcgcccaggctggagtacagtggtgcaatcag

SEQ ID NO: 1560134 - DNA, 4001 bp, Homo sapiens
gatagcggtgccgcttgcctgccaatttgcccttgacgatctgggagccagagagaggcacatgccgcccattgaagctacagagagaaacagggagggcagaggcttaagtggaacaggagagggaaggttttttgattttttttttgtttttttttgagagagtcttgctctgttgcctaggctggagtgcagtggcatgatctcggctcactgcaatgtccacctcctgggttcaagcgattctcctgcctcagcctctcaagtagctgggattacaggcacctgccaccacgcccagccaatttttgtatttttagtagagacaatttcactatgttggccaggctggtcttgaactcctgacctcaagtgatctgctcgcctcggcctcccaaaggatgggattacaggcaccagccactgcgcctggctggcctctggtttttaataaaacatgactagagtgactccatcttaaagtgagtagctaggcacttacaaggttcatgcttatggcctgaaaataaccacatcccaggctgaccaccaattataattacagaatatttatggccatacagaacatgttccaccaagcctgcagaatgtccaaatgtcctaagaatgcagcccccattacttaaatataacataaatgagcaagcttaggttgcaggattaatggtcgtggataacaccaatagcccctacctttagtgagcttatctgcacactccaagtttaactatagttccttatagtttcttataagtagaaatactaacaaagggctgtgggtttctccccctgctttctgaggacactctactctgtaaaggagtagtttccaataaacttgtttctttcactgtgctctgtgactcacctctaattctttcctgtgacaaattcaagaacccgctcttggggtctggaccgggaccctcttttccgtcaacaagaccactcaccattctggggcaaagtctgcaggggcctgaataagccacagctccgtatctggacccgtcagcgcctccaaggagaaacgaggggactctgaggctgggggcttcgcggtaaagttggggggacaagagaaccgagcagcatctgcagcagaaggggaaatggggtcgactgacacctccttgccggtccaatcttgcagggcgcgcctatcggtccattggtcttaacctcgtgagcactccagtcccctcaacctggtttctcctttctgcccacctgttccccaggggcgacctcaatttcaccgatccaacccctgggggcgccttgctctccacgggtagccccccacaagataaccctctctccgttcgaattcccgttcgcccactgggaatgcacgctcttcgcaagtcctgcttgcaggtacgcctccttttccgcccgaaccctctcggacgcccctttctccttccaccaacgcaccctccgcaccccgtcaacccgcaccctcaccgccggcctggggctcctccatcctgggacccacacctcaggcaaccctgtagcccgggctgctcgcaccaggttgcagaccacgtggatccaaaggggtagggcatcatccgggagcgcccaactggtgcgggagcgcgggggtaggcattgctcgactcccgatctgcaggaaaaactggggaaaatttcaacgtgtgcagagcagaaaaccgaggaagaagtctttttccgaaaaatgtattcccgaaagccgctgattcgctgtattgctggagtcagaggcccgtcgggtcccgatgggtcgcccccatcgtctgtccaatatggtttgttgcaacgcctccttaaaggggcagccacactgctcttcctaagccttaaagagacaggacggtcgattggtctgaaattcttgaagagacaggtaagaatactagttagtagggctgtgctttctgtgttaaatgtcttctggggaggcccagatgcctcacaagttcagaacttgactgggagaagcgggaaaatggagaaataggggcaatccgtccggagggcgtgaagttccagccaggggcggggcttctggactccgggggagcgggaaacatagggggaggagcttgtggttctcgagggcggagcctcggacccaggagccccacacgcgtggagtggtgctgggcacggtgtagcgtttgtggatcaaatgggacttgtagatgccctcgggggtttagtctcatgcgtgggaaacctcgatgactttcaggaagggacctgatcggcgactcctccctgccccagggagcgtgtaaacagcggcacgtggacacagatttgggggacgcacccacttcccttcccactggggccgccccgcgttgggcggcggttggagccgcgagacggtggctagacagggtgacccgactgcattcctggccagtgtgtcagcgccacttcccgccccctctgccaagatttaggatcctactccagaattggggcaccccttctccccaggtgggagaggctttccagagcggagggagggtcaaggggaaggggaaatgtttcccctatccaggatctccagacggtttccttcgcgtgggcgagagagacaccggggtgcagcccctgcgggctccaggactacaattcccacaggacccgaggcaaagagtcgcccgagggcggtcgcggaggctgctgggggttgtagtccaaactaagattttgaactcttgctgggacatcctttgaagatccaacccgcgctttttatcgacggggagattcgggctcagagaccctgggggatactgatcaggaaaggggatagtgcgcctgaaggggtggggcaagggctcaggagtcagtctccagccacagcgaggcaggcgtctcggctcttctgtatctccctggcctggtcgctctcggcttctgggcctcgcccttcctgtctgtgaaatggactctgggtgaatccaaatgggatcgtcttgggctacgtcctgtccctccgggactacaagtcccaaggtgctcgaggcgaccttggctccccctccccaccgggacccgcctccctccagcccaagtcacgtcgtctaacctgttcccagctcctgccccgccccgttctccgctccccaagccggagcccgagctggaggaagcccccaggtgccaggatctgcccggatccgtgagtttcaccctcctggggaccagaggccctgaaaaagcccaacacccgcgtccctgggaggattgggaggggactcggacgccaggtcccagggcggaatttggggcgcgccgacacctggatccttagaaggaaactccgttgcctgttttactggagggaaggaaagcgggttcggatgcctgaattcttggaatggagggattctaccccttcatcccggggagacgttggagctggaattcctgagtccctcgaactggggggctctaggaagccgagtctttgggtagtataggggttcgaatccccgagtcttggtcagaaatgagaggctcagactggtggggctcaaggtggaatgggtgaccaccctgccagcctcaagctgctgtctcgaccgatcttctaggtctctgagcagaattaagggtggggcagggatagtggagcctgggttcctgaagtggagcaggacaggtacccggggtccctccggaggctgtgtcccggctctcccccgacttttcggctcggggatgggggcggggtaggagagaaaacaccgaggcagatctccaacctcctctgtgccgctgagcgaacccaacatgtcattaacctgggcgtcagacctgcctaaccagagaagggacatccgccctagggcaccccctggcggaggtgggctcccctattgccttatggggtgggaaacagctgggtttgcagaggtagttctagaacccagggcagaattccggaaagcggctattggattctggga

SEQ ID NO: 1560135 - DNA, 4001 bp, Homo sapiens
atctctttctcccccgccctgtttttcttcttccccctctctgtctctgtctcttcctctctgttattctccttctcttttcctctctctggctttctttcttttctttctcttatttctttttttctctttcttctttctttttcctttctctctctctcacctccctccctctctccttccttccttcttctctttcttttccttccttcctttctttctttttcttttcctttcttctttttatttatttatttgacagaatctccctctgtcacccaggctggagagcagtgccattatcttggctcactgcaacttctgcctcccaggttcaggcgattctcctgcctcggcctcctgagtagctgggattacaggtgcctgccaccacacccggctaatttttgtaattttagtagagacggggtttcaccatgttggccaggctggtctcaaactcctgggctcaagtgatccacccgccgcgccctccgaaagcgctgggattacaggctccagcaaccacgccaggtcgcctctctcgtttttattctctcttcctctatctgtcttttttctctttctccgtctctctccctctctctcgttctgtctcccccgcctgtctccctccctccctcttccactctccctgcgtctctccctgtttctttctttccccttcttctcctgtcccgtctgtcccctctgtccctctctctgttcttttttctgtctctccctccctttctctgggcctctccctccctctctgtcttctctctgtctccccctctccgtttccctccctatctctccctccctctctccctccgtctctgtctgtgtctctttctctctgtctctccccacttgtctttctacctctccttccttctctctctgtgcctcttcttctccccgtccctccacgtcccccgtgttacctgtgtgattcagctgcagctcagctacgtcccactggaagaaaagaccagaaaacagggcacggacgtaagcagagaggttctatgtgtcccctgtgccaggagctctcttttctctgtccatcctcctttccacctctcatcccacggcgcgcactggtgattttatttcattttatttttttttactcttaagacttcttaaagaggaagcaggtctgaaccagcggggaacgtgaagtcgagaccttcaaaagaacttcttcgtttcccgaatcgttttcctggatgtcactgggcgcgagagcaccgcgcgcagcggactctctacgctgcaaaggcgcccggcgcggtccccaaagggacccctcccccacccggagcgagtggctggggccatcccgtcctaggaggccccaggaagcccccacgcccagccttgtgaagcccccagcagcctctgagtcagcctgccgggggaacaccagagccgagtcatcttccatttccatgtgtgcctacctttcccatcccgggatctccctgtacctcctggcagggctgcctgtctcgtagcccctacaccgggcagcctggtccccgcctcgcctccctgttctggtctctgtctctgccctaccagatcttcctctctggcctctttgtacccatctcattctgtcttttcggtcacgcgcctctctatgttttcttcccaacttttccatctcaactcaccccaagtgactcgagcggcagctgctgctgagcctgtgcgaagcgctggatgcacaccacgaggcagatcaccaagcccgcgaccaatgggaccaaagcagcccgcaggacgcacccatagggcctgcgccgcaccgagcagcccgaaccctcctccggcatcgccgcggcgatcacctccgctagcgcaggaggggcgatgggggcgcggagcgctgccgagaaggaaggaaggaaactgcagccccctcccggggctcctgggcgtctacttgcttcaacctgtcaggggaccagcctgcccctctctggggatgtccggccggtcgaggggagggacttgagcaattggcgaggggaaattccctccaaccgctgccagtctgaagatcctaaagtgggtggaggcagttgccaggatgcaggcagtggccccgggtgagcctcagagttgcctgcccccaacccctccccgcccgaccttcaggcaggagacattcaatcttcctattcccctctccacctcattcttctggggcccattcatttattcaacaaacctccactgcacatttattagggattagattgtgctgtgcactggggatacagcagacatccaagaattgggggtgctccccaaatattcgtgtacccctctcctgcatttttttgatttgttttgtttttgagacggaggtctccctctgtcacccaggctggagtgcagtggcgccatctcagctcgccgcaacctcgatctcctgggttcaagcgattctcctgtctgagcctcgcgagtagctgggagtaacatgcgcgcgccaccatgcctggctaattttttgtatttttagtagagatggggtttcaccatgttggccaggctggacttgaactcctgaccttgggtgatccacccgccttggccttccaaagtgctgggattaaaggcatgagacactgcacccggtcagttatctcctgcattcttggagaccacctgcttttttgtttaaagttaaattaagttaatatttttattttttatttttattttattttattatttattttttttttttttgagacagagtctcgctctgtcgcccaggctggagtgcagtggcgccatctcggctcactgcaagctccgcctcccgggttcacgccattctcctgcctcagcctctcaagtagctgggactacaggcgcccgccaccacgcccggctaactttttgtatttttagtagagatgggttttcaccatgttagcgaggatggtctccatctcctgacctcgtgatctgcccgccttggcctcccaaagtgctgggattacaggcgtgagccgccgcgcccggcctaaattaatatttttagagacagagtgttgctctgttgcccaggctggatgcagtggcgccacacagctcacagcagcctcaaactcctgggcttcagtgaccctcccatctcagccttttgcatagttgggtctaccagcacacgctaccatgcccggctaattttttttttggggggggtagaggatagggtgttactatgttaccaggctggtctcaaacatctgggctcaagcgatcctgctgcgtaggtcccccaaagtgccgggatgacaggtgtgagccaccgcatccagcctcctgctgctgttctcgatggctgtagtgggttaacggtgtcctcccagaattcatggcctcctggaactgcagaatatgacctcattttgaaattacggggttttttttgcagatataattaggcttaaatgaggtcatactggattagagtgggccctcaggtggagagaaaagaggctcatagagaaggagccgtgtgaaaacagaaacagaaactgaatgaggcagatgaaagtcaagaaacaccaagaaggagccaggcgcagtggctcacgcctgtaatcccagcactttgggaggctgaggcaggcggatcacttgatatcaggagtttgagaccctcctggctaacacggtgaaacccccgtctctactaaaaatacaaaaaattagccgggcatggtggcgggcgcctgtagtcccagctactcaggaggctgaggcaggagaatggcgtgaacccgggaggtggagcttgcagtgagccgagatcacgccactgaactccagcctgggtgacagagtgagactccgtctcaaaaaaaaaaaaaaaagagttggagaccagcctggccaacatggtggaaccccatctctactaaaaattcaaaaaatagctgggtgtggtggtgggcacctttaat

SEQ ID NO: 1560136 - DNA, 4001 bp, Homo sapiens
gaggacgcgccaccaggtgacgttggcgttgttgctgctattgtgcgggcattggaagtgggcgtcttcccccaggctcaccatcaatgatgctgggaccttgtgcatccacagggcctggcacccagggcctgtggagagacagggtgggtgggtcagggactggggatggtgacacatttccccagccctggcccctgcagttccagcactcctgggaagagggtgaggactctcctgggtggggagggagagagagagcccctgacaggggctgatacatcctggggagaggggggatgcgggaaagtgaagaagcccctgggaaggagagaggacatacctggttggggtgggtgaggatatcctgggagaggagaatgagactccctgggatggtaagacccctgggaggcccttctcacctctgcagcgccatctcttgcccccctcccgcatacccactttgtactctggccctgtgaactctctggattttggatgtttgttccaggcactggaggaccgctgtccagacagctccttccagaagcagtgcaggcgtcccctcctcccgcagccttcccggtccatttttgcaccccagcctcagccaggcccagcacctggcgctttttcttgtgtaatcattcacagaaccctagaagtaggttctctccttagccccattttacaggagggatggctgaggctctgggagggcaggcgggttgccagcatcaccaggcagtcaggagtggcactgggttcaaactcttggctccctggcctctccctgcctgggctgaggagccagtctgtggcctgccctggcctgtgaccctgtgcctggccctcattctctgtaagttgtatgtgtcaacctaggggtcaggggtgagttcagtccttgggctgggctgctggtgattgaaggggctcagagcggggtggagactgggggtgtctctgagtgagacgaggcggctcaggctggctgcagtgtccaatccgggctcctctgggaagccccagctctcagccaggcctcccacatggccagtcccctcttctggaggtaggtggaggagggaggtgaggaagagagaaggaggaagagatggggagaggggccgagcaccctcatcgtcacgggcttaagactcagacgtgaactccaatccttgctcccagtgtccccttgggtggggaacctttttctctgaactcctgggttagcgtggccacagcccctgccagctgtccttgagcaggtgagggggagtccatgagacacccattcccccagtgctgagaagggactcccaacagagagaggcacctgaggtttaaggcagagaaagctttttctccccttgacagacgctgaatgctgctacccctaagtccccttcctgcccccagccctggtgctcagtcaagagcaactttagttccttattttggcctgtggggaacaggaggtgggggaggtgactcttgctcctgcctccctgtgtgagactgtggacgccccttctccttcgctgggctccctccagccccaccttggcccatcttggcacagatacgatttctataggcatcttccctgggtcccctatcctctgcctcctcttcccctttccctgagcccccttccctctgcctgtgccctctctgcagcctccacagcttcccccacctcccgccagttcctgccctttggccacatacccaggtagacagcagacagcaggaagaggaggaagatggtggcaggcagagcttggaggactcctggacccccaggcatcttctcccagtgggttggttagtttgagttgcagcagtcccagggtaccagatccctaccccaaaccccaccctacttcctgcccagccccccggagatgggctccagtggccctcgctactgggccctttgcttgttgggcctggggacagcccctgccgggtatgcttcaggctgtgagtggagagaaactgctccctgcacctgtggtggccacaattcccctgagaggtggctgcttgggtgggggaagaggctggttcaagggctggctcgtcactgctgagcctttggaaggaagcctagggaacctgagtcctgggcatgtgtcatgggcaggtgatggttctgagcttgacctctccccctgcctggacttgggcaaaccttgtcccttccctgaccccatttccttgcttcttgggattagaaacaaggacttaaaggggttgtcacatgcacagaaatggcccacagtaggcgcccagtaaatgttagtcactataaatactcatgaagaataaataaggcaggctgacctgtggctgactacccgtgtgactaggtgggcactttgatccttcgaagcttgacatttttcatctgtgagatgaggaccagaatgtctccctgtctcattatgtgatacgagatggtgttcctggtattcaaggagtgagaaccatgatcagctctttactggaattctttttttaaaaaaacaggccagctatggtggcttatgcctgtaatcccagccctttgggaggctgagacaggagaatcacctgaggtcgagtttgagaccagcctggccaacatggcgaaaccccatctctactaaaaatacaaaattagccagatgttgtggcacatgcctattattccagctactcaggaggctgaggcaggagaatcagttgaacccaggaggtggaggttgcagtgagctgagatcacaccattgcactccagcctgggtgacaaaagcgaaactctgtctctaataataacaataataacaacaacaacatatatttttcttcttttttttttttaagagggatgggatcttgctatattgcccaggctggtcttgaactcctggcctcaagcaatcctcctgcctcagcttcccaaagtgctgggattacaggcatgtgccactgtgcacagccagaagttgttttatattgacctgccatgactggcaaggtaggccatcccccattttacagagggggaaaccgaggccagagaggggaggttgtcacttgcgggtgtcatacagtctaggggtggtggacagagattcaaagtcatctttgtgttgctcccagtttcctttgagcatgtctggtaggagggaaatgaggtctgagtggggagggcggagttgctgagatatttgtgagcagttaggggaccctcacacacatacaaggggatatataaaataaatttattgcagggagatttttggtagcaaacattgagaagcaaatgaaaagtccatttgtgggagaatgggtgcatacactgtggcaaagtgagccaacagaatgctacagaataggggaaggtgtcataaggctgtctcagaaacagcacaaacatcagaaaaaatatcgtagcatgatacagttgacttgttttcaaaaggcgtccgctgcttagggacacacgtttgtagcagaggtgtagacccgtgcaggggagtggcaaacgcccagttcctgggaggggttacctctgggggacgccagggttgggtctggggagggacacacagagacacagagagctcatcttgtcttggttttatttcctgtgttactttttttttttttttttttgagacggagtctcgctttgtcacccaggctgaagtgcagtggcgtgatcttggctcactgcaacctctgcctcccaggttcaagtgattctcctgcctcagcctcctcagtagctgggattacaggcggccaccaccatgcctggctatatttttgtatttttagtagagaccaggtttcaccatgttgggcaggctggtctcacactcctgacctcaggtaatccacccacctcagcctcccaaagtgctgggattacaggcgggagccaccgtggctggccacttttttttttttcttttttagagatagggcctctctctgtcacc

SEQ ID NO: 1560137 - DNA, 4001 bp, Homo sapiens
tgcagcttcaacctcctgggctcaagggatcctcccacctcagcctcctgagccactaggactacaggcgcacaccaccaagcccgactaattaaaaaaaattttttttggctgggcgcggtggctcatgcctgtaatcccagcactttgggaggcggaggcgggtgaatcacctgaggtcaggagtttgagaccagcctggccatcatggtgaaaccccgtctctactaaaaatacaaacacaaaaactaaaacaaaaaactagccgggcatggtggcaggcacctataatcccagctactcggggtggatgggggcgaggcaggagaatcgcttgaacccaggaggcggaggttgcagtgagccgagattgcaccattgcactccagcctgagcgacaagagcgagactttgtctcaaaaaaaaaaaaaaaaatttgtttttggtagagacaacgtctcgatgtgttgcccaggctagtctccagtccctgggctcaagagatccacctgcctcggcctctcaaagtgctgggattgcaggtgtgagccactgtgcccagccaacacttttaaaatgctgtttacctaattcttactgtgaaccaggaatagtttgtgtcctaactcactcatcccttaaaacaatctaagacggagacgggttgtgctccattttatagatgagaaaagtgaggcgcagaggctctctgacttggccctggtgacacagacagccagggcgtggaacccttgggaagccaggtcttggcaactgcccccaacaagtgtgcccccaagaaacccaaggtgggctcttgtctctcactctcaagccaaggcggggtgctgagctgacacctgccacttggggctggcccagggaagctgtgtccctgtggtccaggaagttctggtttttgccccaaatgtcatttcttcactctctttgttgccccgttgcttaggcaacgagctaccctgataaccgttacagtcaccttgggtggggcgggaaagggagtcccaggaagtcacaacaaaaatcaaattcaaacccagaaccaggcaaagtcccttcgatccgcagctgagccccagccaggtctgcggggagcaagaactggggtctctgggggctgcccctgctgctgagactgcgagggacaaattgggggtaccttgcagtggagaagtcctggcttctagcttccccacccccgcccatgtccttctatgcgttatattaagcacagcggctctcagggtcccagcactcactttttgcccctttccttcccccgtgcctcagtttcccctcttagggagcagatgccagactggctccagtagaaagcttgaggatccctccaggcagggtagcaggctccaagagcaccctggagttcctgccggggtgtgggggtgcccaagcaccaccagcccctctcgccgtgtgcccgtgagtgcctgcttgaccatgtggcttcctctatcgcaggccccacagacaccagcggcgcctcccgtttctcagacgcagccaaggggtcccgctggagcttcctcgcccctcccagcggggccccaaagtacttaccgagaaagacgcggcctcccatggttggagctgccggcaggagcggcaggggaaagagtgagtgggacagggctgtcccgtctccacaggctaggcagctgtgcaggctgtcccgaggccaggactttatgaaggagggggggcggacagccgctggcccagggccctccccggaactggcggtgcagctggaagccagcaggaaagtgcaataaaaacacagacccaggggcgctgcatacacacacacacacacacacacacacacacacacacacacgtgcactcagtaagaatgaagtgcaacctgctttcaaaaaccctctgctagagtttccaccatgtggctctgacgaaccctttggcctctgtgttggggctggctgctctgaggggaaggtgtggcagccgggcggggcggtcttgcctggggccacttggctcttccctgggcaggcgcaaaggggtcttgtcagaaatagctctggacgcccacgctggtgggactcgccctgtgcccagagctttggcatgccagagttggcagagcctgcgtcccagctggcagaacgtttccctgccattttccagatgaggaaacaggtcgggtgcagaggctcgcacctgtgatctcagcactctgggaggccgaggcaggaggatcgcttgagctcaggagtttgacaccagcctgggcaacatggcgaaactcttgtttctacaaaataaataaataaataatccaggctggtggcagacatctgtagtcccagctactactactcaggaggctgaggcggggagaatcacccgagctggggagtttgaggctgcagtgagctatgatggtgccactgcactccagcttgggtgatagagtgagatcctgtgtcaaaaacaaaaagaaagaaagaaaactgaggcattacagtgtccacataaaagcccagggagggagaaggggccctcttccgatgccaggcaggtgccaagaagagaagcttcaccgcacagagcagacctcctggatctttctgatctttctaagccagtttccccctgtgggaaacttatatttcagaggcctcttcgttaatcaacagagaatcatgtgataggagggttctttcctttctggataaatcacatgattagcttgtctcttgagctacctcataattttttaaaacgctattttttggctgggtgcggtggctcacacctgtaatcccagcactttgggagtctgaggtgggtggatcacctgaggtcgggagttcgagactcagcctgaccaacatggagaaaccctgtctctactaaaaatacaaaattagccgggtgtggcggcacatgcctgtaatcccagctacttgggaggctgaggcaggaggactgatagaacccaggaggcggaggttgtggtgagctgagattgtgcccttgcactcaagcctgggcaacaagagtgaaactgtctaaaaacaaacaaacaaacgctatatatatttttaagagatcttactctgtcacccaggctggagtgcagtggcaccatcacagctcactgcagcctcaaactccagggctcaaaggatcctcctgcctcagcctcctgaggagctgggactgcagctgtgcaccatcacgcctggctagttttttcttaagtttttttttttttttttttaagacaagctctcgctatgctgccaagaaaatgctattatttatagagcacttagtctgcaccaggcctggtcataagtttgttttttttttaatctattttaactcatttactcctcaaaacatctgcaatgatgttgtcattcccatttgacagaggaggaaactgaggcacaagtgacctacccagctgagaagatccataggcgggcagcccagccccagagtccctacaatgagcccaggggaaagtctctactgggcactaacatgtctttagcgcctccgtgaccctgaggcttagcaggcgtctgtgtccagccagaattcaaggacttggttttgagttccttatattcacatttatttttaggtttccctactatttggggcaatgaggagggtttttcagtgaggatgccgaaatcaagtctccttgttacatgaataaattcaagatgcagaagtgatgaatgctaagcaaaatatagttcaattgttcaaagggggagattgcagcgatggggaaaaaaagtcactaatcactgaagtcacagaactattgtcctgggaataatcaaacatccccagtcctagaatttaccccttcctgtcctgggctcctgtgggggtggcctgggctgtgggggaggggaatgaacaccagcagaagctggaaggagagagggccagaccagctctggagggatttt

SEQ ID NO: 1560138 - DNA, 4001 bp, Homo sapiens
cggattatcccctaatgctggcccaggaagctctgcccacaatccctggcaaccggtctggtgggcacagcagccagaaacccccatcccctccttccagaacagcagccgcctcacaggcctggcttcgaggtggggctgcggctcctcagccagctgctcccccaagcagacagaaggggctggcggaggagctgctaaaaccatttggcaacctcgagacccaaactctgttccctgtgtggggacgcaggattccagatgcagaacccacgggcgtcccactctctgctcaggaatcgcccccagcagaccaggctgctgccctcacagccgctgagcgggtgcggttcagacactaattagctcggagagcagacacatatcgtgcgggaggcatcggtccctcggccccacgcccgcagctggccggggcagagcgggccgggccctgcagtgtcgtgtcgtgtccaggctcttggcaggaagtgacggtgggagggggagattcctggacagggtgctcgttccccaccgctcacacagggcccctcgctttgtccctctggccccaagaacgaggtccctgaacgctaaaagaagtcaaaggtcacgtctggatcgtgagatcaagaaaactgccctggttttggcctgagtccttttcacatgagacagaaacagcctccccgctcccaacaacaacaaaaacatccagaaactgcttggaattaaaccgccagagggcagaagaaacggcccagaactcggggtttgggtcccaagaagccacctgttcagtggactctgagaaaggccaagaccagctgggatgagcgagcccggagcttctgaggtcggggtccgggacgcgggcccgagccgggaggcctggagagagctgcagggagcaggtgggaggcacgcccctacttcggccttcccgagggcgcaggttacataaagcaggggatggagcccagggcgcctggccggctgctactggcaagggtggccgctttccaggcgggtcctggctgccaaggctcatccgggcctttgttggagactgagcgagtggccgcgccagccacccccaggctggcctcgctcccccgctcacgggcccagctccccaacaatagcagctacggggtctgggggggcctctttgtctcctccggggagggcggggagggcagctgaaaggccggcgcggcctgggctccgctccctctttctcgcaggggcggagggggaggcagccggggtccagcccccgccaaggaggaggtgggcaagagccccacgcccagatgctacagggagggcccccggccacccctccgggggccaagagcctaacaggggaccggacgatgccttgaagggaactggggattttcgaggactgcagcagaggctgaaggtccccgagacggtccgaggagggggccgggcagagctgggtgggggaacgtggccatagaagggaaacgagcccaagccaggaggcttcggggcccgcccagcaacagcgctaggaccgcggggcagggagctggttcccggcgcccgaggtcgctcgtgggctccgggacccgggcgggggtcgccgcgctcaccttgaagtagccgccctcgtagtaggtgttggggggcccgaagatggccacctcccagttgtatagatcgccctcgtccaccagtgtcacgcggaatccctcgaccggctcttcctgcagccccttgagctccagcagcagcgccttctgcgagctgggcactagcggccgagccatggcggcggcggaggggcccggggtcggagcagcgcggggccgcgcgaccaccgcgagttcgcgagacgggccgggccgcgcaccgtccgggggggagccaccggggccgccgcctgcctcctcctctgcgccgccgccgccgcccggggaccccgagcgctccagcagctctggcgccgccgccccaccggcgcttgccttggccgggcccgcgcgccccgccccccgctgcgcctgcgcgcaccgcctggccccgactgcgcctgcgctccgcggccaggtccgacttgcgcctgcgcgcccggccgcaggggacgccgggaggtggagtcccggccccggtcccgcctacggcgccgagcgcctccgccgggagggagggttcgagcgcgcagccccgggctcttccgatccccgaggccgccgccgtcgccccctgctcgaccagcaccgcggacgctgtgcgcaaggaggcgggcagggctgctctgcgccgtcaccggcccggtcccccggctttggggttgttttgtgacgtgccggcgcggggcggggccgcgggcggtgaacggggcgcggcgcggggtcctgaccgggaccggaggggcagggccggtccatccggcgcgaccccgcgtccccgtctccgtttccccgtctgtgcaggggacgggcgcgaagtctgtcctagggtcgcgctggccacgcggaagggaggaaggggcgggagcgaggcgggatccgcagacctggcttccaggcgcggcgctgcctcggttcccccgacagcgggagctctgagaagtgggcgaggtcggggagggctctgaggggtgggaggggcgagggcttccctggtccccgttgaagtcaccatgtggtgtgaggcgagtgcaggcgctggagccatcagaggttggcaaggtgctcctgccccccagagaaactgggaaagaggcctacgccggccagcatcggctcagcacctgacccgggagaggcgccagccccacggagcccccaccccaagctgagcccgagcctggctgtgccctcctcccagcctgacctttgtcctacccgagtcttttttttttttttttttttaaatgagacagagtctcgttctgtggcccaggctggagtgcagtggcacaatctcactgcaacctccgcctcccgggttcaagctagtgtccgcctcagcctcccgagtagctgagattacaggtgcccgccaccacgtccggctaattttgtattttaagtagagatggggtttcaccatgttggccaggctggtctcgaacccctgacctcaagtgtgttgttaggttttgaaaggaaggggaggatgcagtttggactaataaagggatccgtctgcgtcggcctcccaaatgctgggattataggcatgagccaccgcgcccagcccacctgagtcttgaccccagctgattccgggcatcactgtgaccccacctgacttctgacctggctcagtggctgcccagacacccacatgctccttgctgtgaagcttggtcgggagaactggccgtggtgaggacggggcagcccagcctcccctgagtcgtgcccgtgacgggtggccctgccctcggactgtgccagtggcattgttgctatgccctgggtacacacagctgcatcaacatacaggccgggcacggtggctcacgcctgtgatcccaacactttggggggccgaggcgggcggatcacaatgtcaggagatcgagaccattgtggctaatatggtgaaaccccgtctctactaaaaatacaaaaaattatctgggcgtggtggcgggcgcccgtagtcccagctactcgggaggctgaggcaggagaatggcgtgagcccgggaggcggagcttgcagtgagtctagatagcgccactgcgctccagcctgggcgacagagactccgtctcaaaaaaaaaaaaaaccaaaaacaaaaaccagtctgggaccagggccactctgtcccgcaggtgccccaacacctggccccggcttcatgagtctggtccccggaagaggaccagcaggcaaacctgtctggggaaaggaaaacagcatcaggagtggagagggagggagggatccaagaaagagctctgggccgagcggtcacttccagagctgtccagggccgaggccgaggcgtc

SEQ ID NO: 1560139 - DNA, 4001 bp, Homo sapiens
aatagaagcgctagaactttcttcccacactccagtggcttgcttggcaggtacactacccaggagactcaggatttaaggaataggtctggaagtgggactgggagctagatgaagagactaatgccgtattccagagtattctggaaggatgggaaagggaccttctagttgtttctggataaatgatggggaattgccctatgggagggtggggtaagagatcctcactagaaggttctgagaggtatatgcccttcgtttaagagcacaacatggctgggtgcggtggctcacgcctgtaatcccagcactttgggaggccgaggtgggtggatcaactgaggtcggaagttcaagaccagcctgaccaacatggagaaaccctgtctctaccaaaaatacaaaattagccaggcatggtggtgcatcatgcctgtaatcccagctactcaggaggctgaggcaggagaatcacttgaacccgggaggcagaggttgcagtgagccaagattgtgccactgcactccagcctgggcgacaagaaggaaacttcgtctcaaaaaaaaaaaaaaaaaaaaaaaaaggaatacaacagacactggtatgtaatgcaggcacactcatttggggtagcaggaggttaaacctttaagtcttagtcatcccattggctcgtgagcactgagagggtggtgggacatggatcacccaggcttgggattctggggtctggattcgggacctctgttgtggtcagatagaagaaggggtggtgaatttagaatcagaccaggagagtccctggataagagcagggacaatttgggtcacagagtagctaacaggctggggacaaaaggtggggtgggtttggggttctgggcttgagttaggggagagtttccaatgctggctgaggctcatacaggaagccagtctgggaagtgggtggtgacagggtctgcaataccaagtaggagcaggggctctggctaggccggaagccacgtgggcaggatttcctggtataatgggaaatgggtctaccggaggccaaaggagaggctggaatgtgaggctctatcgggttggagctggtagttagatccagaggggaaccagattccaaaacccaagtactcggtgagactaaggatcctgaagggggacggttctacactctaggaagggggtcctgggtgtgggcagggacaggaatatcagagtagcacagagttccttgttccgtttagaaaaggagtggcgactccggatctgaatgggaaccccggatcaagatcccggaaagtagatcccgggacagaccaaagtattgggggtccagactacggaggtgggggggcgatgggagatcccagataggaagtgaatacccgaataggatgagggatcatctagaagaatttggggtccaaactttgaggcagagttctgggtataaatgttaactgccgaacagaattagggagaacccccaagactcgtctaggggactccagactatgaagaagttctagggggtgaatagggaatcccacgcaaaaatcggagcagggagtgggggagcggagatccagggcagggactcagggtcccaatggtactggggtcccggagttgaatcgaagctcctgaaaatccagactgggggggtgagaatcctaggtgtgaacagcggggtccctgggcagtatcggggatcacaactccgaagcggggtccgggagtggggaaagggatgggcgcgcgcgccttacctgatgccgccagcggaagagactggccgtgtcgatgttggggtgcgtctcgtcttcatcatcagacacctcaatgtggtcccacacgctgtagtccaccatcttgccttggcggcccagcccgctccggctcgggtggcggcgacggcggcagcagtggagactaggagcgcggagccccgccccttccgcttccgccgagcgcgggaaaccccgccctgtgtgacgtcacatccctagtaaccgcggcagcggcactagctacccagccagccttaaagggccctgcgtaagtgttccggccccctggagttcccgcagagactccgcgtcatcgggcgctggggctccgctaggtctcctgggggcatatgagtgcgcgcttcaactccgagcccccctcatctcccgccgctccacggtgggcgtttggggtggcagggaggggacggttgatgagactgagaggactgtcccctcagccacgccgcagtgacgtctgcaaggggtagggacacggcgggaaggccctccccctgcccttcgtaaacggggacctaagcctgcgctggagaggggcgcctgatgactcctcggactttctcagcccgaggaggactggacctgccctgggggtgtctaaatcgggggtggtatggccctccccttgcagggttaaacgtggaggggagactgtggccctgccttgggagctggggtttccccgcctcggcaacagccttctccttgtcttccacctcctgccattcgcagcgaggactcgcgcgagcgcgcgcgcgcacacacacacacacacacacacacacgcacacacacacacacacacactttggaatcacccggaccccctcaaaacgggtctcggctccccaccccgctggccgctgggtgtcgctagagtctagcccacggcgcgtattcctggccccgcgcttggtggggggaatcgtggaggggtggaagggggctttccttgtcgtcacagtctggggccacgcatagcccctccccgttcgtcttggggtacgcttcctccgccggggctctaaggactccattactctaagcatgcagggcctcgaccacctcacacttccatgcatcccaatccacgctttgataccaggataataggccgtgttgcagccttgggccaggattatctcagattaaagggtgctccctcgggggtcaggctggataggaggagctccagccactccggtgaggggcgcctcttcctagtctcccctggagccgacgttggaggcagtgcctggagagagcgagcgaagttctccagaagggggaggattccccggtgcatggagcgggaagggccatcggacaaaaacgtcctcccgctgccgcccttccccctcgcgcttcattcaaacccgcgagtgggcgggcaggggcgggggagtccccatctcctacccctccctcttcccctccaccctggcagtccagcacatcagtggccgtcacggcccgggcacgcgcgcgcacggacccacaccccggcggctctcacaatcgcacacacacatacacacacacaccagcaaacaaagggtctggacacccccgtcccctcccgccccccaggccagggagggcggggcatcccctccccaggccccccgcaaggtaagcttggggctgcgagctgcggtggggagggggacacggtgccacagtgggagggggccaggaaggtagggggttccccggctccccaggaaagtcgtacccccacccccaccgtatgccctttagggattcggccccgtcatcagcctgggggtgtttggagagaatcccagatgtcggggattcccggataggcgcgggggtctcttcctggctctggagactggagctgcccagcttcagcaaaacagggttcccggagcctcagcttccagaactggggatagagcgccggaagcttccccatcaaccccaagcatttcctaatctgccagcacagcacctccagccctggggactgaggagagagacccctaagttgctttgcactgtccctctgtccccggtccccatcccacccccatcggtgcaaaccctgctatgtctctcctgcctgtgtgtgtgtgtgggggggaggtttgcgggaattgggaacgctttttggggctacctttgcttcttctgctacatcccatagccac

SEQ ID NO: 1560140 - DNA, 4001 bp, Homo sapiens
gttcacctctgtcctctctcagtcccggccccgccaggacggaaataacaacccactctagatccggcccaactggttctcagacccgtgggagctgcggtgcagccgggtcgggggaccccagatggggagacccccggcccggcgagggcttcactgcgcgcttcctgcagccacgtggctgcggccgggaattcagcggcccttttccctcccgaccgggacccaggacccctgtccccaccgcgccttacctcgcggtcctcccagagcggggcgggcgcgcgctcacgactccagctctagcccggacccctggttccctggctccgagtccgcctccgtctcctaatccccggcccgcgccttccttcttcctccgggcgggttctcacctggtaaggaaagtgtcatgtggaacccggagggagattcaggagccaggcatccgggtccgtagagccacctcctccttcgccctcaggtcctaggcgtcctagatcttcgctttcttaatcccaccccagacccgaaagtcaggggcccccagccccttcttcctcagacccaggggtcaagaccccccagcccctcctccctcagacccaggagtccagacccccagcccctcctccctcagacccaggagtccagaccccagcccctcctccctcagacccaggagtccagaccccccagcccttcctccctcagacccaggagtccaggcccccagcccctcctccctcagacccaggagtccaggcccccagcccctcctccctcagacccaggagtccagacccccagcccctcctccctcagacccaggagtccaggcccccagcccctcctccctcagacccaggagtccagaccccccagcccctcctccctcagactcatgagtccagacccccagcccctcctccctcagacccaggagtccagacccccagcccctcctccctcagacccaggagtccaggcccccagcccctcctccctcagacccaggagtccagaccccccagcccctcctccctcagactcatgagtccagacccccagcccctcctccctcagacccaggagtccagacccccagcccctcctccctcagacccaggaatccaggccccatcccctcctccctcagacccaggagtcaagaccccccagcccctcctccctcagacccaggagtccagacctccagcccttcctcctccctcagacccaggagtcaagatccccccagcccctcctccctcagacccaggagtccaggcccccagcccctcctccctcagacccaggagtccagacccccagcccctcctccctcagacccaggagtccaggcccccatcccctcctccctcagacccaggagtccaggcccccagcccctcctccctcagacccaggaatccaggccccatcccctcctccctcagacccaggagtccagacccccagcccctcttccctcagactcaggggtccagacccccagccccttcttcctcagacccaggagtcaagaccccccagcccctcctccctcagaccaggagtccaggcccccagcccctcctccctcagacccaggagtcaagaccccccagcccctcctccctcagactcatgagtccagacccccagcccctcctccctcagacccaggagtccagacccccagcccctcctccctcagacccaggagtccaggccccacccctggcaagccctggcataaggcccctttacctgcaccgggagctaaagtgtcagcccctctcgggggccatggcaggagcccaggcagaagcggaatcaccgcccagtccccaggcagagagggttttggcacaggcccctcccaggctttcttatcccccaaaagtttgcctctaggagttaaaggactagaaagcagtggtggaaaagctgaggcccctctgggcggagtgtgggggcgggaggaggccaggactaagtgtgcagggggaactggcagagggggtggggctggacagggcgcgcccccagcctggcccctcccctgcacagcttggaatttcctgaaactggggaagtctggctgtttagaagagtaatttcttccagattgcagctgtatggagagagagagagggagagagagagagagaaagagagaagagaggcaggtcagacagtgaaagcagcaggaggatgaagagcatggagggtgtctgagaggggcagctctggctttgctgcggcgtcccctagatgaacctccctgcctggagccactccgtcatagaaagctcatatctcattctaagcaccagtgtctattgatgacaagagagtgaggtttgagtgttagggcaattccttcagggcggtgcgggcagggagagagagcggagggggagagcagagtcccaaggcaggatgcagctcagtgggaagaaggtgggaagcccaggtgggagtctaggtctgtgggagggaggtggaggcccaggtgggaggctgggtcagcgggagggaggtggagatgcaggttggagcctgggtcagggtcagagggagagggagagggaagcccaggtaggaggcagctcagtgagagaaaggggaggcccaggtgggaggctaggtcagtggttttacccctagctggggctggggttgtagtgctggagagaagacagtcaatttgcgataacaggaagcagccttgagctgggtcttaaggatgagtgagagttgatggagcccaggagaggaggatggatatcggagcagaatggggaagctgggtggggcagagggttctcagacaccaggtggagtttgatttgcctggagaagccagcttgaaagccactgggagcttcagtttgccctgcaggcgtggggggaccgcggaggaatggcagggaaagatccaggtgttagaaagttcccactggggtccccgcaggggatggagtgaagcaggtcaggactcagcacccacagcaaaatttaaggggggagggggcagtggtcaccagaaactcagtaatcagaaaaactatatatatatatatatatatgttacagacttttattaagtattttttattgatgtaaaattcacataacataaaattaaccatcttttttttttctttttttttaattgagacggagttttgttcttgttgcccaggctggagtgcaatggcgcgatctccactcactgcaacctccaccttccaggttcaagcgattctcctgcctcagcctgttgagtagccgggattaccggtgcctgccaccacgcccagctaattttgtatttttagtagagacggggtttctccacgttggtcaggctggtctcgaactcccgacctcaggttatccgcctgcctcggcttccaaagtgctgggattataggtgtgagccactgcatcgggccagaattaaccatcttaaggtgtacagttcagtgacatttagtacattcccaatggaacatacctaattggtacactggtaattgtgtagccatcctttctatcaagttcccaaacattttcatcacccctaaagaaaaccctattaagcggtcactcccatgccccgctctctgcagcccctggaaaccactcccctgttttctgattcatggattacctcttctggacattcgcataaatggaatcacacatcatacagccttacctatctgacttccttcacataagcaggttcatccgtgtgcagcatgtgccagtggttcattacatgtattatgtacatacgttaagatatatataaaggccaagtgcagtggctcacgcctgtaatcccagcactttgggaagccaaggcgggtggatcacttgaggtcagaagctcaagaccagcctggccaacttggtgaaacgctgactctactaaaaaaatacaaaaatcagctgggcgcagtggtgtgtagtctcaggtactc

SEQ ID NO: 1560141 - DNA, 4001 bp, Homo sapiens
ctgcagcagtgggcaggagaaacaagaagagaaagtgtttcttcccctctcttctgatacataaccccacggggttctcttgctggagagggtgaccccagatcacagcggggccaccatgtggccctgcaggatgtccacgaggtcctgagcccctctctgcagtgccagctccaagggtgtgagacccctggcgtccctgcgatggagatcagattcagctgccagaaagctgaccacagcagtgtgaccctcttgaactgccagatggattggaagtgccccggtgccatcaggcacgttgacatcagccccgtgctccactaggaccttcagggtgtccaggaatccagtgcgggctgcgtcatggactggactggtaccggaggtgtcctggacattggggctggcaccttgcttcagcagctccagggcgatggcggtgctgccaaacatcatgacctgtgtgagggacagaggatcaggaggtcctcaagggaggaggttccacaaaaggggtcactggaaagagaagggtcatccagaaagaggcatctcccagaaacaggaaatgctagaggaggggtcctctagtgaacggagaagctgcataagcccccaggaaagttcttctgggaatagggaccccccccaaaagctggtcactcccttaagaatgagaccccccaacccagagaacagccccccatggaaactttcaaggaacctaagactctcccccaagggaccaaagacgcccccagatatgggcaatcaccaggaaacagaaaatcccctccaggaaatgggcccccagagatggagaactacccccaaagaattgatagtcctcataagggaaaaaagatgtcaaaggaaagcgaaccccttctccaggaaatagcctcctcctacataatggtgatgtcacctcagagtacctgagagctcctttcaagaagcgggattccaaaagtaataataaaagagaaacgagacttccctgtaaaatgtctcccagggaatatagggatgtcttgcaatctgacattgttcctccattggggcccccatactatatcaaggatccgcataacctttaggaatgaagaccccacccccaagtaaccagatttgtctcagagagccccctacaaaatgaggaacccctagagacaggacctctccttccagagatcggatctccccatagaagccccaagaaacgtgagccgtccccatggaaacggcatccaaaggagctgaacccgcacccacggaataagaacctccccagggaaagtgaatccccggcactcagagaaccaggaatcctcccagagaagatgctaaaaagctctcccctccccccacaacctagcctcacccaccacccaccttcgaagggggactgtgggggaacaatgaaagcctagagaagaaggaccggttcccagtgggtcaccaccagggccaggagaccagagaggagctctggggtctcgatcctcatcccgcttagccgccccgccccaacctggaccggcccggcctcacctgcagcgccgtcttgccgaagcggttgagggcgtcgggatgcaccagctcccggtgcagaaggcggcgcacctcctgcacgtcgccccgggccgccgccccactcagccggtcgccggcgcgaacctcctccagcagcatgtcgacactggcggcctgcaaagccccccgccccgccccagcccggcgctgtcagcgcggagcagccggcgggcgctggcccgaacagccctcccggggcgcggccgcggtgcacccggctgcgctgctctcccgtcccggctccccagcccgagaccccggccctcccggcgggctcctccccctgtcagccggaggacggcgaggggctgggagccgggcccaaccctcggccgcccgcggggccctgcccggcgcccgccccttgggggccgggtctccccctaactcaccctccctcctcctcgccgggcggggtctgctctgagcctgcgccgccgccgccgctgaggcagccgccagggggcggagccaacgtgctcccggccacgccccgaacgcaactgatttgttttcttacaaactcgctactgtgtagcggcaccgcgttgcccggcgcgcgaccttacggcgttccgcccacagggcctgcataaccagtggctgcgcgtcgccggggaaacttcgggctcggcgtgaaacgcgtcgctcctgattggtcagagtgtggcaaccggtggaccgccggcaatggcggggttttcggttttcaaatgaacccggcaggcgggaaagaaggctggtttaactgacccagggagaaaggtcaggggcagggtcgcgcgggctgctctgggacctcggcgcctcctgagggaagggaggcagggctggagccacccaatccgaggttccactactaatagacattcattggcccttactacgagctgggcgctttatttcattcatttattcattcactgtgtgcagggagcgtcctgggagctggacgcgcacattcaaacaaccaaataatattagatagtgtcaagcaccgtgaagaaagggaaacggagagacggagtggatgaggaagggatcaccctgccgggctcagactgagccagcaggaaaggagcctgcagctgccacgtgggaaggcctgagaggacatagtcgcagccagacagggactcagaggtcttcgttcaaatatttacttagcacctcctagaggggcccgagtggagagcacgccagtcggcccctgctgcagggacacctatggtctggggccagagacaatagttaatttttatttatatatgtatttatttttgagtcagggtctcactcctgtcacccgggccggcgtgcagtggcgcgatcacagctcactgcagcctcgacttcccgggctcaagtgatcctcctgcctcagcctcccgagtagctgggactacagggcgcaccaccacgcccggctaatttgtgtttttagtagatatgaggtttcactatgttgcccaggctggtgttttttgtttgttatttgtgtttggcttttaaatacagatttttttttttatgttggggttcttgctttgttgcccaggctggtcccgaattcctgggctcaacggatccttctgccttggcctccaaaagtgctgggattacaggcgtgagctcctgctctccgccaatagttaaatctttttagagtggtagaggactgaccagatgagccattgaaacggaaaggcaaaaagccgggcgcggtggctcacacctgtaatcccagcactctgggaggctgaggtgggcggatcacgaggtcaggagttcaagaccagcctgaccaacatggtgaaaccccgtctctaccaaaaatataaaaaattagccgggcgaggtggcgggcgcctgtagtcccagctactcgggaggctgaggcaggagaatggcgtgaaccccagggggcggagcctgcagtgagccgagattgcgccactgcactccagcctgggcgacagcgagactccgtctcaaaaaaaaaaaaaaaaaaaaaaaaattagctgcgcctggtggcacgcacctgtaatcccagctactcaggaggctgagacaggagaatcgcttgaacccaggaggcggaggtcgcaggagccgagatcgcgccattgtactccagcctgggcaacagagtgagactctgtctcaaaaaaaaaaaaaaaagaaaagaaaagaaaagaaaaagaaacgcaaaggcagggagggcctccctgaagaggtgacatttgatttgagacctaaaggtgagggagggagacttgtggttatatggggaaaagcacaccagctgggaggcacagcagatgctaaggcccagaggtgagagcgtgcctggtgtggtacagagcaggggagagcaggtaggtggggtatcaggatggca
